(19) United States
(12) Patent Application Publication
(10) Pub. No.: US 2023/0087228 A1
(43) Pub. Date: Mar. 23, 2023

(54) NOVEL TYPE IV AND TYPE I CRISPR-CAS SYSTEMS AND METHODS OF USE THEREOF

(71) Applicants: THE BROAD INSTITUTE, INC., Cambridge, MA (US); MASSACHUSETTS INSTITUTE OF TECHNOLOGY, Cambridge, MA (US)

(72) Inventors: Feng Zhang, Cambridge, MA (US); Han Altae-Tran, Cambridge, MA (US); Soumya Kannan, Cambridge, MA (US)

(21) Appl. No.: 17/801,815

(22) PCT Filed: Feb. 24, 2021
(86) PCT No.: PCT/US2021/019494

§ 371 Date: Aug. 24, 2022

Related U.S. Application Data
(60) Provisional application No. 62/980,904, filed on Feb. 24, 2020.
(60) Provisional application No. 62/980,922, filed on Feb. 24, 2020.
(60) Provisional application No. 63/000,224, filed on Mar. 26, 2020.

(51) Int. Cl. C12N 9/22; C12N 15/11; C12N 9/14; C12N 15/90; C12N 15/86

(52) U.S. Cl. CPC C12N 9/22; C12N 15/11; C12N 9/14; C12Y 306/04012; C12N 15/907; C12N 15/86; C12N 2800/80; C12N 2310/20; C12N 2750/14143

(57) ABSTRACT

The present disclosure provides for systems, methods, and compositions for targeting nucleic acids. In particular, the invention provides novel class 1, Type IV and novel class I, Type I Cas proteins and their use in modifying target sequences.

### CROSS-REFERENCE TO RELATED APPLICATIONS

[0001] This application claims the benefit of U.S. Provisional Application No. 62/980,904, filed Feb. 24, 2020; U.S. Provisional Application No. 63/000,224, filed Mar. 26, 2020, and U.S. Provisional Application No. 62/980,922, filed Feb. 24, 2020. The entire contents of the above-identified applications are hereby fully incorporated herein by reference.

### STATEMENT REGARDING FEDERALLY SPONSORED RESEARCH

[0002] This invention was made with government support under Grant Nos. MH110049 and HL141201 awarded by the National Institutes of Health. The government has certain rights in the invention.

### REFERENCE TO AN ELECTRONIC SEQUENCE LISTING

[0003] The contents of the electronic sequence listing (“BROD-5060WP_ST25.txt”; Size is 50,909,273 bytes and it was created on Feb. 24, 2021) is herein incorporated by reference in its entirety.

### TECHNICAL FIELD

[0004] The subject matter disclosed herein generally relates to systems, methods and compositions used for the modification and control of gene expression using Class 1 CRISPR-Cas systems and components thereof.

### BACKGROUND

[0005] The CRISPR-Cas systems of bacterial and archaeal adaptive immunity are some such systems that show extreme diversity of protein composition and genomic loci architecture. There exists a pressing need for alternative and robust systems and techniques for targeting nucleic acids or polynucleotides.

### SUMMARY

[0006] In one aspect, the present disclosure provides a non-naturally occurring, engineered composition comprising a Cas protein that comprises an HNH domain that is less than 600 amino acids in size, and at least one guide sequence capable of complexing with the Cas protein and directing binding of the guide-Cas protein complex to a target polynucleotide.

[0007] In some embodiments, the Cas protein is a class 1, Type IV Cas protein. In some embodiments, the class 1, Type IV Cas protein is a DinG protein. In some embodiments, the composition further comprises one or more Cas proteins. In some embodiments, the one or more Cas proteins comprise Cas7 or a Cas7-like Cas protein, Cas5 or a Cas5-like Cas protein, Cas6 or a Cas6-like protein, and a Cse3 family protein. In some embodiments, the one or more Cas proteins comprise Csf2, Csf3, Cas6, and Pfam08798. In some embodiments, the Cas protein is a protein with nucleotide sequence listed in Table 11 and SEQ ID NOs 1-405. In some embodiments, the target sequence comprises a protospacer adjacent motif (PAM) at 5′ side of the target sequence. In some embodiments, the PAM sequence comprises CC. In some embodiments, the PAM sequence comprises (C/T)CN. In some embodiments, the target sequence comprises a PAM at 3′ side of the target sequence. In some embodiments, the PAM sequence is GG. In some embodiments, the composition comprises cascade/helicase activity. In some embodiments, the composition does not comprise Cas3 DNA shredding activity. In some embodiments, the composition further comprises a donor polynucleotide. In some embodiments, the donor polynucleotide: a. introduces one or more mutations to the target polynucleotide, b. corrects a premature stop codon in the target polynucleotide, c. disrupts a splicing site, d. restores a splicing site, or e. a combination thereof. In some embodiments, the one or more mutations introduced by the donor polynucleotide comprises substitutions, deletions, insertions, or a combination thereof. In some embodiments, the one or more mutations causes a shift in an open reading frame on the target polynucleotide. In some embodiments, the composition further comprises a plurality of guide molecules capable of complexing with the Cas protein and directing binding of the guide-Cas protein complex to one or more target polynucleotides.

[0008] In another aspect, the present disclosure provides a composition comprising one or more polynucleotides encoding: one or more class 1, Type IV Cas proteins or functional fragments thereof, wherein the one or more class 1, Type IV Cas proteins comprises DinG protein with a length less than 600 amino acids; and one or more guide molecules capable of complexing with the class 1, Type IV Cas protein and directing binding of the guide-Cas protein complex to one or more target polynucleotides.

[0009] In some embodiments, the composition further comprises a donor polynucleotide. In some embodiments, the donor polynucleotide comprises a polynucleotide insert. In some embodiments, the one or more polynucleotides encode part of all of the components of the composition herein. In some embodiments, the one or more class 1, Type IV Cas proteins comprise Csf2 (Cas7 like), Csf3 (Cas5 like), Cas6, and Pfam08798 (Cse3 family).

[0010] In another aspect, the present disclosure provides a vector comprising the one or more polynucleotides herein.

[0011] In another aspect, the present disclosure provides an engineered cell comprising the composition herein.

[0012] In another aspect, the present disclosure provides a method of modifying a target polynucleotide sequence in a cell, comprising introducing to the cell: one or more class 1, Type IV Cas proteins or functional fragments thereof, wherein the one or more class 1, Type IV Cas proteins comprises DinG protein with a length less than 600 amino acids; and one or more guide molecules capable of complexing with the class 1, Type IV Cas protein and directing binding of the guide-Cas protein complex to one or more target polynucleotides.

[0013] In some embodiments, the method further comprises introducing a donor polynucleotide. In some embodiments, the donor polynucleotide: a. introduces one or more mutations to the target polynucleotide, b. corrects a premature stop codon in the target polynucleotide, c. disrupts a splicing site, d. restores a splicing site, or e. a combination thereof. In some embodiments, the one or more mutations introduced by the donor polynucleotide comprises substitutions, deletions, insertions, or a combination thereof. In some embodiments, the one or more mutations causes a shift in an open reading frame on the target polynucleotide. In some embodiments, the cell is a prokaryotic cell. In some embodiments, the cell is a eukaryotic cell. In some embodiments, the cell is a mammalian cell, a cell of a non-human primate, or a human cell. In some embodiments, the cell is a plan cell.

[0014] In another aspect, the present disclosure provides a non-naturally occurring, engineered composition comprising a Cas protein that comprises an HNH domain and a helicase domain, and at least one guide sequence capable of complexing with the Cas protein and directing binding of the guide-Cas protein complex to a target polynucleotide. In some embodiments, the helicase domain is a DinG domain. In some embodiments, the Cas protein is a class 1 Type IV Cas protein. In another aspect, the present disclosure provides a composition comprising one or more polynucleotides encoding one or more components of the composition herein. In another aspect, the present disclosure provides a method of modifying a target polynucleotide sequence in a cell, comprising introducing to the cell one or more components of composition herein.

[0015] The present disclosure provides systems and methods for nucleic acid modification. In one aspect, the present disclosure provides systems for one or more components of a class 1, Type I CRISPR-Cas system, such as a class 1, Type I Cas protein(s) and/or a guide RNA molecule(s) capable of formulating a complex with the class 1, Type I Cas protein(s). In some embodiments, a class 1, Type I Cas protein comprises an HNH domain that is less than 400 amino acids. Nucleic acid sequences of exemplary Type I Cas proteins in the systems include those in Table 2, SEQ ID NOs. 495-1212 in the Sequence Listing herein. In an aspect, the class 1, Type I Cas system that comprises an HNH domain that is less than 400 amino acids in length, and at least one guide sequence capable of complexing with the Cas protein and directing binding of the guide-Cas protein complex to a target polynucleotide is provided. The HNH domain may be comprised in an McRA protein/subunit protein. The HNH domain may be comprised in a Cas5 protein. In an aspect, composition comprises cascade/helicase activity. The composition may comprise a system that does not comprise Cas3, in an aspect the system does not comprise Cas3 DNA shredding activity.

[0016] In another aspect, embodiments disclosed herein include systems and uses for such Cas proteins including diagnostics, base editing therapeutics and methods of detection. Fusion proteins comprising one or more class 1, Type I Cas proteins herein, and nucleotide deaminase may also be used for base editing. Delivery of the proteins and systems disclosed is also provided, including to a variety of cells and via a variety of particles, vesicles and vectors.

[0017] Methods of modifying a target polynucleotide sequence in the cell comprising use of the systems described herein.

[0018] These and other aspects, objects, features, and advantages of the example embodiments will become apparent to those having ordinary skill in the art upon consideration of the following detailed description of illustrated example embodiments.

### BRIEF DESCRIPTION OF THE DRAWINGS

[0019] An understanding of the features and advantages of the present invention will be obtained by reference to the following detailed description that sets forth illustrative embodiments, in which the principles of the invention may be utilized, and the accompanying drawings of which:

[0020] FIG. 1 shows determining of PAM sequences of exemplary class 1, Type IV Cas (SEQ ID NO:406-412).

[0021] FIG. 2 shows the alignment of sequences of exemplary Type IV Cas proteins comprising HNH and DinG.

[0022] FIG. 3 shows examples of loci comprising DinG and HNH sequences.

[0023] FIG. 4 shows identification of PAM by spacer BLAST.

[0024] FIG. 5 shows an exemplary Type IV Cas performed plasmid interference with 5′ (C/T)CN PAM.

[0025] FIG. 6 shows determination of PAM sequences of exemplary Type I Cas (SEQ ID NOs: 1122-1130).

[0026] The figures herein are for illustrative purposes only and are not necessarily drawn to scale.

### DETAILED DESCRIPTION OF THE EXAMPLE EMBODIMENTS

### Definitions

[0027] Unless defined otherwise, technical and scientific terms used herein have the same meaning as commonly understood by one of ordinary skill in the art to which this disclosure pertains. Definitions of common terms and techniques in molecular biology may be found in Molecular Cloning: A Laboratory Manual, 2^{nd} edition (1989) (Sambrook, Fritsch, and Maniatis); Molecular Cloning: A Laboratory Manual, 4th edition (2012) (Green and Sambrook); Current Protocols in Molecular Biology (1987) (F. M. Ausubel et al. eds.); the series Methods in Enzymology (Academic Press, Inc.): PCR 2: A Practical Approach (1995) (M. J. MacPherson, B. D. Hames, and G. R. Taylor eds.): Antibodies, A Laboratory Manual (1988) (Harlow and Lane, eds.): Antibodies A Laboratory Manual, 2nd edition 2013 (E. A. Greenfield ed.); Animal Cell Culture (1987) (R. I. Freshney, ed.); Benjamin Lewin, Genes IX, published by Jones and Bartlet, 2008 (ISBN 0763752223); Kendrew et al. (eds.), The Encyclopedia of Molecular Biology, published by Blackwell Science Ltd., 1994 (ISBN 0632021829); Robert A. Meyers (ed.), Molecular Biology and Biotechnology: a Comprehensive Desk Reference, published by VCH Publishers, Inc., 1995 (ISBN 9780471185710); Singleton et al., Dictionary of Microbiology and Molecular Biology 2nd ed., J. Wiley & Sons (New York, N.Y. 1994), March, Advanced Organic Chemistry Reactions, Mechanisms and Structure 4th ed., John Wiley & Sons (New York, N.Y. 1992); and Marten H. Hofker and Jan van Deursen, Transgenic Mouse Methods and Protocols, 2^{nd} edition (2011).

[0028] As used herein, the singular forms “a”, “an”, and “the” include both singular and plural referents unless the context clearly dictates otherwise.

[0029] The term “optional” or “optionally” means that the subsequent described event, circumstance or substituent may or may not occur, and that the description includes instances where the event or circumstance occurs and instances where it does not.

[0030] The recitation of numerical ranges by endpoints includes all numbers and fractions subsumed within the respective ranges, as well as the recited endpoints.

[0031] The terms “about” or “approximately” as used herein when referring to a measurable value such as a parameter, an amount, a temporal duration, and the like, are meant to encompass variations of and from the specified value, such as variations of +/−10% or less, +/−5% or less, +/−1% or less, and +/−0.1% or less of and from the specified value, insofar such variations are appropriate to perform in the disclosed invention. It is to be understood that the value to which the modifier “about” or “approximately” refers is itself also specifically, and preferably, disclosed.

[0032] As used herein, a “biological sample” may contain whole cells and/or live cells and/or cell debris. The biological sample may contain (or be derived from) a “bodily fluid”. The present invention encompasses embodiments wherein the bodily fluid is selected from amniotic fluid, aqueous humor, vitreous humor, bile, blood serum, breast milk, cerebrospinal fluid, cerumen (earwax), chyle, chyme, endolymph, perilymph, exudates, feces, female ejaculate, gastric acid, gastric juice, lymph, mucus (including nasal drainage and phlegm), pericardial fluid, peritoneal fluid, pleural fluid, pus, rheum, saliva, sebum (skin oil), semen, sputum, synovial fluid, sweat, tears, urine, vaginal secretion, vomit and mixtures of one or more thereof. Biological samples include cell cultures, bodily fluids, cell cultures from bodily fluids. Bodily fluids may be obtained from a mammal organism, for example by puncture, or other collecting or sampling procedures.

[0033] The terms “subject,” “individual,” and “patient” are used interchangeably herein to refer to a vertebrate, preferably a mammal, more preferably a human. Mammals include, but are not limited to, murines, simians, humans, farm animals, sport animals, and pets. Tissues, cells and their progeny of a biological entity obtained in vivo or cultured in vitro are also encompassed.

[0034] Various embodiments are described hereinafter. It should be noted that the specific embodiments are not intended as an exhaustive description or as a limitation to the broader aspects discussed herein. One aspect described in conjunction with a particular embodiment is not necessarily limited to that embodiment and can be practiced with any other embodiment(s). Reference throughout this specification to “one embodiment”, “an embodiment,” “an example embodiment,” means that a particular feature, structure or characteristic described in connection with the embodiment is included in at least one embodiment of the present invention. Thus, appearances of the phrases “in one embodiment,” “in an embodiment,” or “an example embodiment” in various places throughout this specification are not necessarily all referring to the same embodiment. Furthermore, the particular features, structures or characteristics may be combined in any suitable manner, as would be apparent to a person skilled in the art from this disclosure, in one or more embodiments. Furthermore, while some embodiments described herein include some but not other features included in other embodiments, combinations of features of different embodiments are meant to be within the scope of the invention. For example, in the appended claims, any of the claimed embodiments can be used in any combination.

[0035] All publications, published patent documents, and patent applications cited herein are hereby incorporated by reference to the same extent as though each individual publication, published patent document, or patent application was specifically and individually indicated as being incorporated by reference.

### Overview

[0036] The present disclosure provides systems and methods for nucleic acid targeting and modification. In one aspect, the present disclosure provides systems comprising one or more components of a Class 1, Type IV CRISPR-Cas system, such as a Type IV Cas protein(s) and/or a guide RNA molecule(s) capable of formulating a complex with the Type IV Cas protein(s). In one example embodiment, a Type IV Cas may comprises a helicase comprising a DinG domain and a HNH domain. In another example embodiment, the Type IV Cas helicase protein comprising a DinG domain and HNH domain may be less than 600 amino acids in size. Nucleic acid sequences of exemplary Type IV Cas proteins, which are alternately referred to herein as Type IV subunit proteins, in the systems include those in Table 1, and SEQ ID NOs: 1-405 in the Sequence Listing filed herewith.

[0037] In another aspect, embodiments disclosed herein include systems and uses for such Cas systems including research reagents, therapeutics, and diagnostics. Fusion proteins comprising one or more Type IV or Type I Cas proteins/subunits are detailed herein, and nucleotide deaminase may also be used for base editing. For Type IV Cas systems, fusion Delivery of the proteins and systems disclosed is also provided, including to a variety of cells and via a variety of particles, vesicles and vectors.

[0038] In another aspect, the present disclosure provides systems comprising one or more components of a class 1, Type I CRISPR-Cas system, such as class 1, Type I Cas protein(s), which are alternately referred to herein as Type I subunit proteins and/or a guide RNA molecule(s) capable of formulating a complex with the class 1, Type I Cas protein(s)/subunit(s). In some embodiments, a class 1, Type I Cas helicase protein comprises an HNH domain comprising nuclease activity that is less than 400 amino acids. Nucleic acid sequences of exemplary Type I Cas proteins in the systems include those in Table 12, SEQ ID NOs. 495-1212 in the Sequence Listing incorporated herein. In an aspect, the Class 1, Type I Cas system comprises a Cas5 or Cas5-like subunit comprising an HNH domain. In one embodiment the Class 1, Type I system comprises helicase activity. In an aspect, the Class 1, Type I system does not comprise Cas3 DNA shredding activity.

[0039] In another aspect, embodiments disclosed herein include systems and uses for such Cas systems including. research reagents, therapeutics, and diagnostics. Fusion proteins comprising one or more class 1, Type I Cas proteins/subunits are detailed herein, and nucleotide deaminase may also be used for base editing. Delivery of the proteins and systems disclosed is also provided, including to a variety of cells and via a variety of particles, vesicles and vectors.

### Systems and Compositions in General

[0040] In one aspect, the present disclosure provides for systems and compositions for modification of nucleic acids. In general, the systems or composition may comprise one or more Class 1 Cas systems that comprise one or more HNH domains. The HNH domains may have less than 1000 (e.g., less than 600) amino acids. The systems and compositions may further comprise one or more guide sequences. The guide sequences may be capable of complexing with the Cas protein(s)/system and/or hybridizing to a target sequence. The guide sequence may be capable of directing the binding of the guide-Cas protein complex to the target polynucleotide.

[0041] In some example embodiments, the CRISPR-Cas system may be class 1, Type IV CRISPR-Cas system. In some embodiments, the class 1, Type IV system may comprise a helicase and one or more of Cas7 or Cas7-like proteins (e.g. Csf2), Cas5 or Cas5-like Cas proteins (e.g. Csf3) or Cas6-like Cas protein, a Cse3 family protein (e.g., Pfam08798). The helicase may comprise a DinG domain. In certain example embodiments, the helicase comprises a DinG and a HNH domain. In one example, the systems and compositions comprise a Type IV CRISPR-Cas system comprising a helicase comprising a DinG domain and a HNH domain, Csf2, Csf3, Cas6, and/or pfam08798. The systems and compositions may further comprise one or more guide sequences. The guide sequences may be capable of complexing with the Cas protein(s) and/or hybridizing to a target sequence. The guide sequence may be capable of directing the binding of the guide-Cas protein complex to the target polynucleotide.

[0042] In one aspect, the CRISPR-Cas system may be a class I, Type IV CRISPR-Cas system comprising a fusion of multimeric subunit components.

[0043] In one embodiment, the class I, Type IV CRISPR-Cas system may comprise a fusion at the N-terminus, the C-terminus, or any accessible part of the protein complex, e.g. on a subunit of the Cas systems.

[0044] In some example embodiments, the CRISPR-Cas system may be a class 1, Type I CRISPR-Cas system. In some embodiments, the class 1 Type I system may comprise an HNH domain that is less than 400 amino acids and one or more of Cas1, Cas2, Cas6, Cas7, a Cas8e-Cse fusion, CasE, Cse2, and McrA. In one example, the systems and compositions comprise a Cas system that comprises an HNH domain, and Cas1, Cas2, Cas6, Cas7, a Cas8e-Cse fusion, CasE, Cse2, and/or McrA subunit proteins. In some embodiments, the composition comprises cascade/helicase activity. In one embodiment, the Type I system comprises cascade/helicase activity without Cas3 shredding activity typically present in Type I systems. The systems and compositions may further comprise one or more guide sequences. The guide sequences may be capable of complexing with the Cas protein(s) and/or hybridizing to a target sequence. The guide sequence may be capable of directing the binding of the guide-Cas protein complex to the target polynucleotide.

[0045] In one aspect, the CRISPR-Cas system may be a class I, Type I CRISPR-Cas system comprising a fusion of multimeric subunit components.

[0046] In one embodiment, the class I, Type I CRISPR-Cas system comprises fusion at the N-terminus, the C-terminus, and any accessible part of the protein complex.

[0047] In one embodiment the class I, Type I CRISPR-Cas system comprises fusion of the Cas3 Cas5, Cas6, Cas7, Cas8 and Cas11 subunits, and in any combination thereof.

### Cas Proteins

[0048] The methods, systems, and tools provided herein may be designed for use with Class 1 CRISPR proteins. In certain example embodiments, the Class 1 system may be Type I, Type III or Type IV Cas proteins as described in Makarova et al. “Evolutionary classification of CRISPR-Cas systems: a burst of class 2 and derived variants” Nature Reviews Microbiology, 18:67-81 (February 2020), incorporated in its entirety herein by reference, and particularly as described in FIG. 1, p. 326. The Class 1 systems typically use a multi-protein effector complex, which can, in some embodiments, include ancillary proteins, such as one or more proteins in a complex referred to as a CRISPR-associated complex for antiviral defense (Cascade), one or more adaptation proteins (e.g. Cas1, Cas2, RNA nuclease), and/or one or more accessory proteins (e.g. Cas4, DNA nuclease), CRISPR associated Rossman fold (CARF) domain containing proteins, and/or RNA transcriptase. Although Class 1 systems have limited sequence similarity, Class 1 system proteins can be identified by their similar architectures, including one or more Repeat Associated Mysterious Protein (RAMP) family subunits, e.g. Cas5, Cas6, Cas7. RAMP proteins are characterized by having one or more RNA recognition motif domains. Large subunits (for example cas8 or cas10) and small subunits (for example, cas11) are also typical of Class 1 systems. See, e.g., FIGS. 1 and 2. Koonin E V, Makarova K S. 2019 Origins and evolution of CRISPR-Cas systems. Phil. Trans. R. Soc. B 374: 20180087, doi: 10.1098/rstb.2018.0087. In one aspect, Class 1 systems are characterized by the signature protein Cas3. In Class 1, Type I systems, the helicase-nuclease fusion enzyme Cas3 is specifically recruited to the R-loop-forming Cascade, nicks the non-target strand (NTS) DNA, and degrades, or shreds, its upstream region (PAM-proximal side), and degrades target DNA. See, Xiao et al., Science. 2018 Jul. 6; 361(6397):eaat0839. doi: 10.1126/science.aat0839. Epub 2018 Jun. 7.

### Type IV Systems

[0049] The Cas systems may be class 1 Type IV Cas comprising one or more Cas subunit proteins, which may also be referred to herein as a multimeric Cas protein or system. In some embodiments, the systems may comprise one or more class 1 Type IV Cas subunits or proteins. The Cas system may include Cas subunit proteins that have at least one HNH domain. In certain examples, the Cas subunit may comprise only one HNH domain.

[0050] In some embodiments, the HNH subunit protein of the system is less than 2000 amino acids in size. For example, the Cas protein may be less than 2000, less than 1900, less than 1800, less than 1700, less than 1600, less than 1500, less than 1400, less than 1300, less than 1200, less than 1100, less than 1000, less than 950, less than 900, less than 890, less than 880, less than 870, less than 860, less than 850, less than 840, less than 830, less than 820, less than 810, less than 800, less than 790, less than 780, less than 770, less than 760, less than 750, less than 700, less than 650, less than 600 amino acids in size. In some examples, the Cas protein is less than 600 amino acids in size.

[0051] The present Type IV systems may lack one or more hallmark components of CRISPR-Cas systems including an effector nuclease, even when a CRISPR array may be present. See, e.g. Pinilla Redondo, et al., Nucleic Acids Research, Volume 48, Issue 4, 28 Feb. 2020, Pages 2000-2012, doi:10.1093/nar/gkz1197, for general Type IV systems. In an embodiment, novel type IV CRISPR-Cas proteins are detailed. In one embodiment, the type IV protein comprises an HNH domain, a well-characterized nuclease domain. See, e.g. Keeble A. H., Mate M. J., Kleanthous C. (2005) HNH Endonucleases. In: Belfort M., Wood D. W., Stoddard B. L., Derbyshire V. (eds) Homing Endonucleases and Inteins. Nucleic Acids and Molecular Biology, vol 16. Springer, Berlin, Heidelberg. Doi: 10.1007/3-540-29474-0_4; Zuo et al., eLife 2019; 8:e46500 DOI: 10.7554/eLife.46500.

[0052] In one aspect, the present disclosure provides for systems and compositions wherein the CRISPR-Cas system may be a class 1, Type IV CRISPR-Cas system comprising a helicase (e.g., DinG HNH), Csf3 (e.g., Cas5-like), Cas6, Csf2 (Cas7-like), Cse3 and pfam08798.

[0053] In one embodiment, the class 1, Type IV CRISPR-Cas system comprises DinG HNH Csf3 (Cas5-like), Cas6 and Csf2 (Cas7-like).

[0054] In one embodiment, the class 1, Type IV CRISPR-Cas system comprises DinG HNH, pfam08798, Csf2, and Csf3.

[0055] In one embodiment, the class 1, Type IV CRISPR-Cas system comprises DinG HNH pfam08798, Csf2 and Csf3.

[0056] In one embodiment, the class 1, Type IV CRISPR-Cas system comprises DinG HNH, Csf3, Cse3 and Csf2.

[0057] In one embodiment, the class 1, Type IV CRISPR-Cas system comprises DinG HNH, Csf3, pfam08798 and Csf2.

[0058] In one embodiment, the class I, Type IV CRISPR-Cas system comprises fusion of the DinG, Cas5, Cas6 (e.g., cas6b, cas6e, cas6e/f), Cas7, Cas8 and Cas8-like, Cas10-like, Cas11, Cas2 and Cas4 subunits in any combination thereof.

[0059] In an embodiment, the class 1, Type IV CRISPR-Cas system comprises one or more components from Table 1.

TABLE 1

| Map Label | Feature Label | Sequence |
|---|---|---|
| DinG_HNH_1_ | DR | ggtcaagccaccctgcatctgggtggttactacaac |
| 0172379_ | (SEQ ID NO: 455) | |
| 10000168_ | | |
| organized | | |
| | Csf3 (Cas5 like) | atggacaagatcaaagtaaccgcgcacctgctggccccagttgtcacagggggcggcta |
| | (SEQ ID NO: 456 | catgaccctcgacggtctgctggcggcactcctgttcgatgacctgcaagacgtggacg |
| | | ccgcacacgcggccatcccgattcggcagaccgacggcctgcaccacgccagcgccgcc |
| | | atcatggaggcaagtcgggagcgtatctcgttcattgccgcactgcggcccggccacag |
| | | catcgatcctgacctgatccagaagaacaagcacgggcagttgcaccgcaagttcgaca |
| | | cgtccctgaccaacgtattgaacagctacgccctgctgactgcgcccacggtgacgtgg |
| | | tatgccgagggtgatgcggatcacatcgagcggctgatctccccggttcagttcatcgg |
| | | caagcgccgagcctctgggtttggccgcgtggcgcgctggcaagtcgagcctgatgatc |
| | | tggatggtatcgaaggcccgttcggcgaaccgttgcgacccgtgccggtagggatgttc |
| | | aagggtgacacgtcgcatcccatcgtcgacgctgcatggcgaccggcctactggaaccc |
| | | gattcaccgcacggcgtgttacgcgcccgtttaa |
| | Cas6) (SEQ ID | atggactacgcaatgcaaaagccgccaagtgtgcgcggctacgccctgcaccggatcgc |
| | NO: 457) | cgctggcttggctgatggcgagaaggtgctgttcgcggactgtggcgatcacctgctgc |
| | | tgcgtaccagcaagccgctggacgttgatcggcgcaaggttcgcaccatcacggcggga |
| | | gacatcgtcggctttgaacttcgcgcctgcgtcggcaagaaggtcaagggcaagcaccg |
| | | ctacttccactcgtccgactggcgcagccggcatgactggctggaacgacagggcgaag |
| | | cgcacggctttgggatcatcacgctgcactgcacgacgcagttgcagaccgtcaaggca |
| | | ggcgaccgggaattcacggtcgatcagaccgacttcaccggcgttctaaaggtcacgga |
| | | tgccgaacgcttcaacagcgctgtcgccaatggcgtcggcaacaaggccaaggctttcg |
| | | ggtttggcatgttggtcatctaa |
| | Csf2 (Cas7 like) | gtgaaaactatcgtcatcaacgccaccctgactaccgtcggccccttgtccatcaccat |
| | (SEQ ID NO:) | gcccatcgctgaaggccagatgggcaacaagttcaacaatttccccgtcgtcacgcgcg |
| | | gcatggatgatgacggcaacaagcaggagaccggctacctgccggccaccacgctgcgc |
| | | ggctttctccggcgtgccatcgtcacggatcagatgacgcaggccgccgccgacggcaa |
| | | gccctacaccttgcagaaagcctatgccgacctgatcgggcaggatgcggcgtccgagt |
| | | cgaaggacgacatcgacctgctcaagatgcgccagacccgcgaggaaaatcccgtcctc |
| | | gatctgttcggctccggcttgggcatcaagtcgcggcttctggtatcccacttcatgcc |
| | | gacccacaacgtgctgccggaagtcgctaccggcgtccgcaaagacttggaggacaccg |
| | | atggtgtgctggagtcgctgtcgtcgcccgaccgcgatagctatcttggacgctccggt |
| | | gcgaacagcaagcgcgctgccgccctgacggtggcaaaggggttggagggcaagattcg |
| | | caagacgaagaaggccggcgaggacatcgccgaacttgaggcggcgctgaaggaggcgc |
| | | agggtatcgtcgcgcgctatgaatccgacatgggcaacatggtcaactcatcgcgcacg |
| | | ctgaccaactattttgcgcttccggcaggcatcgaactcaagggccgcttggtcatcga |
| | | gaaggcgcgcgaccgcgatctgccgatggtggaacttgcgctgaacgaattgtccaagc |
| | | gtccgatcttgggggcacaaagcgcccgtggctgcggcgaaatcgaagggacattcgat |
| | | gttctggtggatggcgttcttgccaagaaaatcagcatcggtggttggcaagcggcgac |
| | | cgtgaccgatttttgtggcgacgaattagcgaaatcggctgcgtaa |
| | DinG HNH | atgtttcgttctaccgaacaatcaacctttgcggcaatagtcgccaagcatatggcgag |
| | (DinG Helicase) | tagtgatgcccctctgctgttggaagggggagtcggcatcggcaagacccgcgcctata |
| | (SEQ ID NO: 458) | tgtcagcgctggttcaatccgggcaacgggtcgctgtcgtcctgccgacgcatcagttg |
| | | atcgaccagttgctcgcatcgtccgatctgggggcgacgcgcggcaccgctacgctggc |
| | | ggcgtttcggcctgcccgaatgtttgaacgccgggccgactacgaggccaacaagcgcg |
| | | cggcgactgacgcacaactgatgttctgtaccgccgccagcgtcatcattgaccatcgc |
| | | ttgggcggcgagtacaacggttccaccacccgcgcctacatcgtgttcgatgaggctga |
| | | ccaactgccggacatggcggcactgcaaagcgacttcaccatcacgcagacagaactgg |
| | | ctgacatgggtatccgcctgacgaccgtcgaggatgcgttgcaggcgattctggcgaaa |
| | | ccgccacgcatcgtagaaccggaaaccaaggccgcagcgcagatcatcctcgatgccat |
| | | cgaggaaccggcgtggtatcagtccgcaggcatcagcgacgacggcgacatcatgctga |
| | | cgcacaagctgcccggccgcctgctgaagaagatcagcaaccgcagcaacgtggcgttc |
| | | gtctcggccaccctgacggtcggcggtcgcttcaaggattttcagaactcgatgggcat |
| | | cgagaagatcagccacctgtcgtccgcgattgaaccgcggcagcatggttcgctggatc |
| | | tccacatgatcccgatggcggtcgatacgccggaatggatcagcgcagtcgtacaagtg |
| | | gcgaacgatgcgccgaagcccgtgctggtggcaactccatcgcatgacctatccagcct |
| | | gctcggcggacgtctgccgggggctgtcgtcaggtctgtcgaggaaacggcggctcagg |
| | | ctggcgacagggtgagcgccgctggcatcctgatttctgccggggcatgggcagggctg |
| | | gatacaccgctgcgctggcgctcgattgtcgtgccgcgcgtgccgttcggtcagccggt |
| | | cgtgattgacgggcaagccacgaccacctatttcgatgcgcgcaacaccgccgtgcgcc |
| | | gcttgcgtcaagtcatcgggcgcggactgaggacaccggatgcagtgtgcagcgtgtac |
| | | atcttggatgccagagcggagaaactaagcggcttcgtaccggagcgcttttctaacga |
| | | gtgggctactcggacatatatcgaaggggcgaaaaaggaggtcgtactgtccaaggctg |
| | | aacgcgaccccgcagttcgtcgggcggcgctgaatcactacggacggaagtgcatggcc |
| | | tgcggcttcatgccgaaggtcgattcacagcttgacgtgcatcaccttgaccccatcgc |
| | | cgaggggcagcggcgtaccaagatcgaagacgtggtggtgctgtgcgcgaactgccacc |
| | | gactggcgcacgcgaccaatccgccgacacggctggatgttacggagacagggcagccg |
| | | cttccttgctga |
| DinG_HNH_2_ | DR (SEQ ID | atcaagccaccctctaaatgggtggttactagaac |
| 0206130_ | NO: 459) | |
| 10001073_ | | |
| organized | | |
| | KOON_pfam08798 | atggatcacacaatcacaaaaccagcgcgcgtcgaaggctacgccgtccaccgtatggt |
| | (SEQ ID NO: 460) | cgccgctttggtagacgacgcacccgcgctgcatctcgatgccggcgacaccctaacca |
| | | ttcgcaccgatgcgcccctgcccagtgggcatattgtgggcttctcgttgcgtgcctgt |
| | | gtctctgtcaagaacaaggggcggcaccgctatttccccagtgctgactggcgctctcg |
| | | ccacagttggctcgagcgaaaaggcgtacagcatggcttcgaagtcatcaccgtgcatt |
| | | gctctgccaaacacttggtcatcgaaaaacaatctggccaattcagtgttgatgacacc |
| | | ttgtttacgggtgtcctcaaagttgtcgattacgacaagtacaacgccgcgctgctatc |
| | | gggcatcggcaacacggcacgcgccttcgggttcggcatgttagttatttaa |
| | KOON_mkCas0162 | atgccaaagcaaaccatcgttatcgacaccgttatcaccacacaaggcccgctgtctat |
| | Csf2 | cgccatgcccgtcgcacagggcacacgggcaaacgactacaacaactttccattgatgg |
| | (SEQ ID NO: 461) | cccgtgggcaggatgaactgggcgccgtattgcaaacagcctacctgcccgctagtacg |
| | | gtgcgtgggttccttcgccgtgcggctggcattgccgcgatggaaaagcgcggcgtagg |
| | | caacaccacattgcagcaagcgtattccgatattttggggcagtctaaagacgccaaag |
| | | aaacggtggacttggtccagctgtctgccatacgcgaggcagaccccatactcgacctc |
| | | tttggttcgtggtctatcaagtcgcgcttactggtgagtaacttcttgcccacaaccaa |
| | | cgtgttgccacaggccatcacgggtgtcagaaaagacttagaagacaccgaaggcgtgt |
| | | tgaccctcttgagtgagaccgaccaacaggcctattacaaccgcagtgacatcaacagc |
| | | cagcgcgcagccgctgacgcagtcgtcaagggcctcactcgtgacatcagaaaagccaa |
| | | aaaagacggcaacgcactcactgacctagaggcggcgcttgtgatcgccgacgcgaagg |
| | | ccgtggccttaaaaacggatatgggcgagatggcgaactcatcacgcaccatcaccgag |
| | | ttttttgccttgcccgctaacatggccttgcacggacgcatcgtggttgagcaagccaa |
| | | ggagcgtgaccttgcattgatcgtggaggcgctagacaccctgtctattcgccccatgt |
| | | tgggcgcccaagtagcgcgcggctgtggcgaggtggcggggcagttcaccatcaaggtg |
| | | gatggcatcgtggtcaagacagtcaccacgggcggctgggtgcctgcgcaggtcgaaga |
| | | cttctcgtctgatgcgcctgcaccagccgctgtctaa |
| | KOON_mkCas0093 | gtggaccagttacgaatcaccgcccacctcagcggcccccttgtgacggggggcggcta |
| | Csf3 | cctcacctttgatgcgttgctcgcctctgccacttacagcttgacgcaagacattgagc |
| | (SEQ ID NO: 462) | aggcccacaaccagctgccacttaaacaagttgccggcctgtaccacgccagcgccgcc |
| | | atttatgaacccgttgccatcggggcattggctattgtgcaagccatgcgtcccgacga |
| | | cctgtggcttgaccaccagtggttaaagaagaacaagcgcggcgctgtgcacaccaagt |
| | | tcgacaacctatccgacaacatactgaccacctacaagaccatagcggcaccgaccatg |
| | | acctggtactgcgaaggtgatgcagaccgcattcgtgtcttactagcgcatctacccct |
| | | cattggtaaaaagcgggtttgctccgtgacccagtggaccgttgaggcgggcgagcttg |
| | | acggtctgcatggctatgccgatgagccactgcggcctgtacccgttgagctgtgggat |
| | | ggtgacaagagcagccccatcgtggacgcggcatggcgtcccgcttattgggatgcgac |
| | | tgggcgcaccgcttgttttgtgaactga |
| | -> DinG Helicase | atgtttcgttcctcagagcagcagcatttctgcaatgtgcttattaagcatttgaaacg |
| | (1,444)[631.5]\| | cgtcgatgcgcccatattgctggaaggcggggtgggtcttgggaagacgcgtgcctacc |
| | DinG HNH | tggccgcactggcaactacgacgcaaacggttgccattgtgttacccacacaccaactg |
| | (SEQ ID NO: 463) | attgaccagttgctggctagcgctgacttgtcagccgttgccttgccattggccgtgtt |
| | | caggccagccagtcggtttgacacacgggaggcgtaccaagcgcagcgagaggcggccc |
| | | gtgctgcgcgtgtcatgctctgcaccgctgcaagcgtgattattgaccaacgccttgcg |
| | | ggggcttacaacggcgcaacacagcgtgatgtggtgttatttgatgaagccgaccagtt |
| | | acccgatatggcggcattgcagagcgactttgtgattgaggcggcgctactgcagggcc |
| | | agccgctgcacgcggccttagagcgcataagcaccacccgttcacagtcggttgaggcc |
| | | gagcaaaaggctgctgcgcgggtcatgcttgagatattggccgaaccggtgggctacgc |
| | | atccgtcgggcttgatgatgatggcaatgcgcggctacaccacgccctgccaggtcgct |
| | | tattaaagaaaattagcaatcgcggtagcacggtgtttctttctgcaacgctgacccac |
| | | aacgataagtttgatgacttcaagatcgccatgggcctagacgcggtgagtagcctgtc |
| | | aacaagcattgagccagaacagcatggcacgctcgacttcaccgtacacgcgcacgagg |
| | | tggacacgcctgactggtttgcggccaccgttcagtgcatacaaagcgcgcagcgcccc |
| | | acgttggtggtcacacctagccatgacctcacagagcggctacaaaccgccgtgggtga |
| | | gcaagcagacttgcttatacgtgcgggtgcatgggcgggtcttgacacgccaacgcgct |
| | | ggcgtaccgtggttattccgcgcgtgccatttggcgcaccagtcattgttgacggggtg |
| | | gcggtcacgtcttacttggccgccaaggtgacggccagtcggcggatgcgccaagcaat |
| | | tggccgtgggcttagaacacctgaggcggtgtgcacggttgtggttttggatgcgcggg |
| | | cacacaacttaggtcgctttgtgccagagcgttttgcggcagattggtcgtctcggcaa |
| | | gtgtttgaggagggtgcccgccatgcggtggtgctgtccaaagcggagcgcgaccccgc |
| | | tttggccaaagccgcgctcagacactacggcgctcaatgccaacaagcgggttgttccg |
| | | tgacagaggcgtgtcagctggacgtgcaccaccttgaccccgtaagcgaaggcgtgcgc |
| | | cgcacaaccttgaaggatgtgaccgtgctgtgtgcaaaccaccaccgacaggcccacca |
| | | cgacatgaaaatggggctgaacgtgtcgtag |
| DinG_HNH_3_ | DR (SEQ ID | atgcagccaccctctcaaggggtggttactacaac |
| 209632_ | NO: 464) | |
| 10012131_ | | |
| organized_ | | |
| PAM | | |
| | KOON_mkCas0093 | atggaaaaactaaccgtaacggcgcatatgaagacaccgttcataacaggtgggggcta |
| | Csf3 | catgacctttgacgctttgctcgccggtatcttatttgaccagctgcaagatgttgaag |
| | (SEQ ID NO: 465) | ccgcgcacgcctccgtccctatcaaatgcactgacggcttgttccatgcaagcgcggcc |
| | | atgtacgaacccttggatcagtcaagagttgcgttcgttgcaaacatgagagccgacca |
| | | ctctcttgatgcagatctgtttccacggaagaaggacggaacaatgcgcaagatgggcc |
| | | gactaaggcggcgtgactttggcgctgtcatgaatagctacgattcaaaacaagttgat |
| | | tcacttgaatggcatgttgaaggtgattccgaggagatattaaaactaattgagccgat |
| | | ttcttttattggcaaacgcagagcaagtggctttggcgaagttcatcgttggagcattg |
| | | aatcttctgaactggatggactcatgggctacctgaacgagcctttgcgcccaatacct |
| | | gttgagcgtttcaagggtaatacaggctcactcaaagtagatgctgcttggcggccggc |
| | | ctattggcatccagccaacagagcgatttgctacgctccggagacacctcaatga |
| | KOON_pfam08798 | atgcttcgtgaatatgaaataaacaaaccggccaatttacgtggataccccttgcatag |
| | Cse3 family | aatggtggctgaattaacaaagaatgagccaagcctcttcagcgatgaaggtgcgacca |
| | (SEQ ID NO: 466) | tgcttgtgcgaactgaagcaacaattgacttagaaccaaaggctttgaaacagataagc |
| | | cttgggcagctaacggcatttgagctccgcgcatgcgtttctaaaaaacgtaagggcaa |
| | | acatatttacccgcctagcgacgactggagagtgagacacgaatggctaaagaataaag |
| | | ctaatagcaacgggtttgagatattgaccctgcattcttcatcaaaaatggtgcggata |
| | | caggaccaagcacgttccttcaaagttgatcaaactgactttacgggaattttaaaagt |
| | | cacagatgaagcccaattcagaatggccctagctaaaggaattggctccactgccaaga |
| | | cttttggttttggcatgctagttatttaa |
| | KOON_mkCas0162 | atgatcgttattaaagcaagtattaaaactgaagcacccctctcaattgccatgcctgt |
| | Csf2 | ggcccaaggatcccgagaaaatgcgtacggcaactttccattaatggtacgcggcatag |
| | (SEQ ID NO: 467) | atgaagagggagaaaagcaatacaccggatacctgcctgctacaactattcgaggcttt |
| | | ctgagacgaggcatcgtgttggaggaaatgaaagaagcggcggaaaacaatcaacatta |
| | | caaactgaaccaagcctatgctgaactgattggtcaggatgccgcaagcgaacaagggg |
| | | gcggggatatagacctcgtcgctttaaaggatacgcgtgaaggatcacccatattagat |
| | | ttgtttggctcgggactggggatcaaatcaaggctgcgagtcagtcattttataccctc |
| | | gcacaatctactgcctgacccgattacaggtacaagaaaagatttagatgataatgaag |
| | | aagcctttgacctcatagatgcagatgaaaaaagtgagttcttcgagcgatccgaagcc |
| | | aacagcaagcgcgcaagagccgcaagccagctggacggattacagcgacaacgcagggc |
| | | cgctgaacgcaagggcgaagatacaaaggatttagccgaacaagtggctgctgcagaag |
| | | cgctggtgaagaaatacgaggcggttatgggcgatatgaagaactcgtcacgaacaatc |
| | | ctaacgcattacgccttagccgctggtttagagctagagggtaaattggtcatagagaa |
| | | cccgaaggaacgcgacatcggactgcttgaaacagggttaaatgccttgtcgttattcc |
| | | ccattcttggcgcgcactcagcaagagggtgtggcgaaatatcaggtacatttgatttt |
| | | attaaggatggcgcattgtttaaacgaatcacaataggaggctttgaagctgcaagagt |
| | | tgatgacttttag |
| | -> DinG Helicase | atgactgttaacttccgatcaaccgaacaagctaatttttcaaagcttctacaggctca |
| | (4,478)[689.7]\| | cctatctaacccagatgcccctcttcttttggaaggtgcgaccggattgggcaagacga |
| | DinG | gggcctatctttatccgttgttggaagctgctaacaacggtaagaaaatcgcaatcatt |
| | HNH(480,5 | cttcccacacgtcaactgattgagcagttgctgaactcagaagacattgacgtatgcaa |
| | (SEQ ID NO: 468) | taaagccggcattgagattcaagcgttcatcccgaagcgttactttgaagatgcagatc |
| | | aatacggcgagcagcgtcaaaaagctttaaatgccccggtgatgctctgcaccagcgcc |
| | | tcagtaatcattgatcaaagactgggcggtgattacaacggcgtcaccaagcgggatta |
| | | cttgttatttgacgaggctgatcagttacctgatgttgcagcgcttcagtctgacgtga |
| | | caattaactatcaaacactgggggatctcaacataaagccggtatccgctcagcaagca |
| | | gcagaagaacttctgaaaaagaaacacgttgagccagaagacagggccaaagctaagat |
| | | tattctagaagcgttagctgagccattttggtttatgtccgccggccttgatgatgaag |
| | | gcgggattgttctgtatcacaagctacccgggagactccttaaacggatcgctaatcag |
| | | cgaaatactgcattcgtttctgcaaccctgactattggtaacaagtttgacgacttcac |
| | | gcgagctatgggaatcagtgaaatcagccgtcattcatcagccgttgagccaaagctgc |
| | | atggctatttaaccttttcgttgcaccagtcggaggaagttaatagtcccgaatggatt |
| | | caggcagtgattgatgcaatcgacgaagctcaaaaaccttgccttgttgttacctctag |
| | | ctacgagacagcgactaatcttgttgagctatatccaagctcaattgcgaggaaccaag |
| | | aagaatcagagacagctagccaagcagctatacgtttagccaatgatgattcaaaagat |
| | | accctaattgcgacagcggcttgggctggcttggacacgcccgtggtatggaaatctat |
| | | tgttgttccaaagatcccgttctcaaaacctacgattattgatggtcaggttgaaagtc |
| | | actatatcaatgcaaggaacgcagccatacgacggatgcgccaagttatcgggagaggt |
| | | ttacgaagcccggatgccgaatgcgacatcattatttgtgatcctaggtggcaaaaaat |
| | | agagtctttcgtccctgatagattcaaacaaaactggtccaacaaaaccttcagcgaag |
| | | gcgatcggtatgaactgactctttcggcagttgaaagaaatccatctgttaggaggaat |
| | | gcaattaagcattatggcttgaagtgttatgcctgtgacctcacgcccaaaacatcaaa |
| | | tcaaatagacgttcaccatcttgacccgattgctgaagggcaacgacagacaataatgg |
| | | aagatgtgataccgctttgtgcgaattgtcatcgcttggcacactccgagcgaccgcct |
| | | ctaacaatagaggaaatcaagagcgtactataa |
| DinG_HNH_4_ | DR (SEQ ID | ctgaagctaccctcgttttgggtggttactgaaac |
| 0206130_ | NO: 469) | |
| 10012455_ | | |
| organized_ | | |
| PAM | | |
| | KOON_mkCas0093 | atgcagtgtgtagaaataaaagcaattctcaaaacgccaattattctaggcggaggtta |
| | Csf3 | tctgacgctagatgcccttttagcatctcttatctttgagaaatgtggcgatgttgagg |
| | (SEQ ID NO: 470) | tagcccataccacggttccaattaagcaaaccaacggactttttcacgctagcgctgca |
| | | ctgctagaaccaatttcaagaagttctgtctcatttgttgccagtctcagagcagagca |
| | | tgacctcaaccctgatttgctaaaaaaaagagcgggagctctaaaaaaaataaagcggt |
| | | tacgacggagtgattttggcaacgttttaaatacttatgggtctcttcaagccgctcat |
| | | atatcatggttcgctgagggcgataaagatgaaattagccagcttcttcaggacgtgaa |
| | | gtttattggaaagcgtcgcgccagtggatttggcgaaattgaaacttgggttatcgagg |
| | | acagcgacatagacggtgttgtcgggccgtttgatgaacctctgcggccagttccagtt |
| | | gaaatgttcattggtgatcagtcttctctgaaagtagatgccgcttggaaaccagctta |
| | | ttggaaccctgaaaacagagcgatctgttatgcgccggagctgatttcatga |
| | KOON_pfam08798 | atgctgcttgatcacgtaatctctaaaccaaaaaatattggaggctacgggctccacca |
| | (SEQ ID NO: 471) | actcgttcaagggctaacagatggggaaagccccttatttgtggatatgggcgacaaat |
| | | ttatagttcgcactgtcaaaacaattactgaaactggcacccccccaaggtccgtagca |
| | | gataaagacgttatcggttttgagttacgagcttgcgtcagtaaaaaactgaaaggcaa |
| | | gcacatatactatcccacttcagattgggctagcagacataattggctaaaacgtcagg |
| | | gcaaaaagcacggttttgaaccactcacgatgaattgtcgctcaaatcttgcaaaaata |
| | | actgatggaaaaggtcgcaagttcacggttgatcaaactgattttgttggggttctaaa |
| | | agttttggatgccttggcttttcagaaagctgttggacaaggcgttggttctactgcca |
| | | aagcctttggttttggaatgttaattatttaa |
| | KOON_mkCas0162 | atgggtgacataattataaacggagcaattactctggtgggaccgttatcaatttgtgc |
| | Csf2 | gcacaacttagatgactacaacgggtttcccataatgtctcggggcactcctgaggatg |
| | (SEQ ID NO: 472) | gcaaactttcaaaaactggatacctgcccgcgaccacaatacgggggaaattgcgtcgc |
| | | gcttatgtttttgaaaatatgaaagaagctgctgctaaaaatgagcattacccacttag |
| | | acgtgtttatgcagaactgattgggcaggacccagatagtgaaaaacaggctggtgaaa |
| | | tagacttacttcaaatcaaaaaaacgcgggatgactcaccggtgcttgatttgtttggc |
| | | agtggtctcagtgtggcaagccgtttgagagtggggcatttttttccaagtatgaatat |
| | | tcttcctgaggaaattggttcgataaggaaagatttggatgaaactgaagaagttgttg |
| | | aagccctagctccagaagacgtgcaacgtttctttgagcggaaagacctcaccagccga |
| | | cgttctcaagcagttgcgctagtaacgtcattagaacgaaaaattagagctgttaaaaa |
| | | aacaagtggcccgacaaatgaacttgaggtggagctcaaagaagctgagggtctagttg |
| | | aaaaatacaatcaaggcatgggcgacatgcaggttggcgcaaaacagcttcctacctat |
| | | ttcgctctgccacccggattgatattgtcagggcgcattgtgatcgtaaatgcgaaaga |
| | | ccacgatctggccattattgaaaagggtttggattgtatgagcctatcccctgtgcttg |
| | | gagcacaatccgcgcgcggctgtggcgaaatagagggcagttttgatgttcaaatagat |
| | | ggaaaaactgttaaaaaaatcacgataggaggctacaaatcaagcagaattgatgtttt |
| | | ttaa |
| | -> DinG Helicase | atgtttcgctccaatgaacaagaatatttcaatacactgcttgagcgacatatgtctgt |
| | (1,449)[600.1]\| | tctggatggacctctgttgcttgagggaggcactggtctaggtaaaacccgcgcttatc |
| | DinG | ttgctgcaataaaaggttttcaaggcaaagtcgcaatcgttttgcccacgcaccagctt |
| | HNH(451,4 | atagaacaacttatcatttcaagtgatttaaaagcagttggcattgaaattaaagcctt |
| | (SEQ ID NO: 473) | ccgtccaagaccgatgtttgacacacaggctgactatgatttgcaaaaagatgaggcgt |
| | | cagcggctgcggttatgatttgcacatctgcaagtgtaataatcgatcaaaggctttct |
| | | ggtggttacaacggagcgacacagcgagactatattctttttgatgaagctgacgctct |
| | | accagacgctgctgcattgcagaaagatttggaaatctcagcatttgaaatcaaagatg |
| | | ctggcgtaaaaacctctgtggtcgcaaatgctttggacgacttcattgacaaaaccgcc |
| | | gatgtagagctgaaagcaaaagctcgtataattaaagaagcatcggaaaacccggcttg |
| | | gtaccataccgtggggtctacagaggagggcggcattagcctctttcaccgaatgcctg |
| | | gcttgctactcacccgaattgccaatcagaaaaacgttgccttcatcagtgcgaccttg |
| | | aaagtcgcaagttcatttgatgacttcaagcgcagcctagggattaaaaaggaaagccg |
| | | cctttcggatagtatcgaccccaaaatacacggtgatatgcttgtcgagtatccacttt |
| | | ctgagaatattgtgactgtaatatctggcgcaccaaaaccttgtctagttgccacgaca |
| | | agctttcagtcttccgaagagctcgctgcattaatcccaacggctgttttgcgcaccag |
| | | agatgaaacgcccagtatggctgctttgcgggtctctgaagacggcgttttgatcgcaa |
| | | ctagtgcatgggccggtctggatactcccagacgttgggcatcggttgtcgttcccaaa |
| | | gtgcctttcggcaaaccggttgagcaagacggtcacatcgaaagccggtatttggatag |
| | | tcgtaatgtggcaattcggcgaatgcgtcaggtattaggccgagggcttcgaacacctg |
| | | acgcgaaatgcacattctacatctgcgactccagatacaaatctcttggaaatttctta |
| | | cctgataggttttctaaaagctggtgggaggggggtaaaaaaaccattgagctttcaaa |
| | | atcagaacgctgtccggcaattagaaaggccgcattaaaacattatggatgtttttgcc |
| | | accgctgcgatcttaggccaaaaaatccgacaattatcgaggttcatcatttatttcca |
| | | atcgctgatggaacccgtaagacaaaaatagaggatgttatccccctgtgcagaaattg |
| | | ccatgagcttgctcatacagaaaatccaccgatacccatagatcgattgaaaacgactg |
| | | atttgtag |
| DinG_HNH_5_ | DR (SEQ ID | atgcaagctgccctttgtcggggcagctactagaac |
| a0187845_ | NO: 474) | |
| 1001177_ | | |
| organized | | |
| | KOON_mkCas0093 | atgcaggctttcgtgctgcgcgcgcatctgcgcacgcccttaattcagatgggatacac |
| | Csf3 | cactctggatgcgctgttgatggcgacacttgagacaggtgatgtcagccacctgctgc |
| | (SEQ ID NO: 475) | gctgtgaaacgggcctttactacgccagtgccggtttcccggtggatggaattgccggc |
| | | cccaatgccgcattcatcgccagcatgcgtccggagcacacccccgagtggttggatgt |
| | | aattgctcccaatacgatgaagggcgatgtgcaaattggcctcgcccgtcagcgtgaag |
| | | gcggcaacgtgctgaatagttatcccaccacgactgcgtcagccgtggagtggtatgcc |
| | | accggggacatggcagcagtgttggaggtcgtcgcccccatcatgttcatcggcaagcg |
| | | acgtgcttcgggctatggtgaggtagttcgctgggaagctgagcccggggtactggatg |
| | | gcattgttggtcacctgggtgagccgcttcgccccatccccgtcgagcggtggactgag |
| | | ggcggcgattgggtcccggtggaggctgcgtggaggcctccgtactgggaggtgcgcaa |
| | | ccgaaccaagtgctacgtccccgaggtggctctgtga |
| | KOON_pfam08798 | atggacatcctgatcgacaagcctccgcgattgaaaggttatgcgttgcaccgtttggt |
| | (SEQ ID NO: 476) | cgagcagtaccagcaagggcgccccgcactatgggctgacgaagggcaacaactacgca |
| | | tccgcccgcgtgatgcgcaagctccactctttgaagttagcaagctgctgggctttgcg |
| | | accacggcctgtgtggtgcccagtacccacgccaaacacaaatacctgccgctcaacga |
| | | ttggcgcggccggcgtgagtggcttgagaaacaagccggcaagaacggctttgagctgg |
| | | ttggggtgcacgtctcaccaggcatgcgccgtattgagacccacgatggccgcagcttc |
| | | accatcgatgccacggagttcacgggcattctcaaagtcacagagccagagaggtttgc |
| | | cgcgtgcctggtgaaaggcctgggccgtgtcggcaaagccttcggcttgaacctgcttg |
| | | tagttcagtaa |
| | KOON mkCasO 162 | atgactaaccgcatcatcggcaccgtgagcctagccaccgtgcagcccatcgccttcac |
| | Csf2 | ccatcatggcattgagggccagccactcatgacgcgaggcgttgatgccgaagggcgcc |
| | (SEQ ID NO: 477) | ccttgcgtaccgtttttctaccggcctctcagctccggggccgcattcgacatgaggct |
| | | gcaatggccgcactgcacagcaagggtgcgcctgtgaagcttgaagaggcctatctcgc |
| | | tgcgctagggcaggatctgcgccccgaagaagatcgggccgaagaactcgttcgtttgc |
| | | gtgagcagcaggtgctgcgtgaagctcagcccctgctcgatttgtttggaacctggaag |
| | | gttgccagtcgcttgaaggtcggccatttgctgcccgatgtcaatgtcgctcccgatag |
| | | tttcagcatcatccgccgcgacctcgactccaatgaagaactgatgaacttgctgccag |
| | | acgaagagcaagaccgcttttatgcccgccaggatagtcagtccatggcctccaaggtg |
| | | gacggcatgatcaaggtggccgagcgcgaactgcgtgccgccaagaaggccaagaacga |
| | | ggctcttactgctgagttgacacagaagctggaagaactgaagaccgccaagcagtctc |
| | | acaagggtgatgatgaatcctccaattccaagcacttgctcagcgtcgaagccatccct |
| | | gcaggggtcaatctgagtggacgctgggtcatcgagcgagcccgtccgcgcgatctgga |
| | | cgtgatcgttgctgccttcgacgggcccagccggcgccctgtcatgggtgcagccacag |
| | | cccgtggctgcggcgaggtttccggggcggttgtgttctctgactctgagggcgaagtc |
| | | ctgcttcgcatcaagtttggccagtacaccccggccatcgttgagtggacagtgtcggg |
| | | caaggccttcatgaccccagcccaggccgcatga |
| | -> DinG Helicase | atgatctatcgcagcaaggagcaggccgcttatgcgaagctgattgcaggcgcgctgcg |
| | (2,461)[605.1]\| | ccccggctcccctttgctggctggcggtgcggctggcctgggcaaagctcatggctaca |
| | DinG | gcatcccgcttctggcatcgggcctgcgtgttgccattgccctgtccacgcgccagctc |
| | HNH(462,5 | attgatcagttcgtgagcagtgatgcccttgccgaggcgaataggggccggcaaagagt |
| | (SEQ ID NO: 478) | ggtcatggccctcaagacgcgggcccatttcgagaccgctgctgactatcaagcccacc |
| | | gagcccaggctttggcggcagatgtcctcgtcctgacgcatgcggctgccttgatcgac |
| | | agctggatccccggttatgccgagctgcggcagcgcgacgtggtgctgtttgatgaagc |
| | | tgatctactggccgatgcggcagaccttcggggcagcttcaccatcccggaagatcaac |
| | | tgcgtggacgtgactgtgagcccagggaagccgccacctatgtgatgcagcacaccgat |
| | | gacccggaaatcaaggctgcggcgtcagcgattttgtatgcccttgatcaccccacgcc |
| | | ttacaaggtcgtgggtcgagatcttgagggcaacctggtcctcaagcaccgcatgcccg |
| | | ggcgcatgctcaagcccctggtgcgcgatgtggccagctgcatcttcaccagtggcacg |
| | | ttgatggtcaatggccgttttgactactttgtgcgggccttgggtctgtcgggcatcga |
| | | cccagcctcgcgccacattgatcccctgactcatggggacctgaacatcatctgtgccg |
| | | agagcgagatgagcccggagcaaaaggcggcgcagatttcgcaggctgcgcgccccgcg |
| | | cttgtgctcacttcaagccacgaggatacccaggcgctggggggtaacttgcccctggc |
| | | cacggtccgcatgccgggtgaggcactgctggacgctctggagcgatgccctgacgatg |
| | | gcatcctgattgcggcaggtgcatggtcgggccttgacagtccacgccttcgctggtgg |
| | | tccgtcatcatccccaaggcgccatacggccccccagtcgaagtggatggacagcaact |
| | | tacccattacctagacagtcgcgtggtcgccgtgcggcgcatctgccaggggctgcatc |
| | | gcggtttgcgcaccccggatgcccattgcacgctgatccttcaagatcctcgctgtcgt |
| | | cggcccgagctgatggaagccatcccttcaaggttcaagggagcgctgatcagtgccat |
| | | ggaaggcgaagttgaggcggccctgcgcaatgagcgtgagcgacatagacccttcagga |
| | | ccctggcgctcaagcactatggatgccagtgcatgtggcatgagggctgcgatgtcaaa |
| | | gcgccttatttgctggatgtgcatcaccgcgatcccgtctcagaaggggtgcgccgcac |
| | | cgctctgcaagacctgatggttctttgtaaaaaccaccatgctgaagcccatcagcaga |
| | | tgcggctactcattttcaatggaggagattcaacaaaaattgatgatggatcaatgatt |
| | | tag |
| DinG_HNH_6_ | DR (SEQ ID | gttgtggcccccattaatttgtggggcaactgaaac |
| a0209199_ | NO: 479) | |
| 1004312_ | | |
| organized | | |
| | KOON_mkCas0093 | atgtttgaacaagtgaaaattgaggcaacccttcgtactccgattattattcaggggta |
| | Csf3 | tatgacatttgatgcgctattaggtgcattactgtttgagcggctacaggatgtcgaca |
| | (SEQ ID NO: 480) | aaacgcactccagcattccaattcaatgtgatgatgggctgttttatgcttctgcagct |
| | | caggttgaagtcattgatcgtggtggtttggcaattgctgctaatctgagggcccagca |
| | | tgacttgaacccaaatcatgtaaagaaaagtcgtgatggctcaaaactgcacaaaagtt |
| | | taggattgaagcgccgtagacagtttggagcagttctaaataaatacagaacaatcact |
| | | gtaaattctatcagttgggatgtgactggcgatattaaccagattgaagacttgcttaa |
| | | tgatgctttttttatcggcaaaaaaagaacagcaggttatggtgaagttataagttggg |
| | | acttcaagaacagtgaaacagacggtctcatagatgcgcaaggacaggcactaaggcct |
| | | attccggtagaacgttttaatggtgataagtctttgccaataattgataccgcttggaa |
| | | gcctgcttattggaatcctgagaacaggtcagcctgttatgctcctgagcctgtctcat |
| | | ga |
| | KOON_pfam08798 | atgctgtttgattataaaatattaaaatctgatgcaaaaaatgcctatgacttgcatca |
| | (SEQ ID NO: 481) | gcttgtcgctgccacctttaagggtgagagtggcagaaatttgttctgtgattacggcg |
| | | accacatacgtgtgcggagcacaaagcacactctaaatgcgaaacaaggtgtcgccgtt |
| | | actgtgcctgccgtcggcgcaatagctttcattgaattgcgagcatcctgttatgtgtc |
| | | tgggggaggaaaaaaatatttcctgatgcaaggtgattggagagccaggcatacctggc |
| | | ttgaaaaaaagagcgcccaaagtggcttttcggttttaaatgtaacctgtcaatcagaa |
| | | ctgatgaaaatcccaaagccaggtgcacagttcacgcttgattgcaccgactttgctgc |
| | | atgcatcaagatcaatgacatagaaaaattcgaaactgccttgcgcgatggaattggat |
| | | cgaaaggcagagcgtttggttttggaatgcttgttttatga |
| | KOON_pfam03787 | atggtaaatacgatctttaatatggttctaacatctgagcagcctttgagtatcacgct |
| | Csf2 | acccgtggccgagtacactcgggcaaataaatttgctaactctccagttatgacccgag |
| | (SEQ ID NO: 482) | ggctcgacgcggaaggtgcgaagcaagaaacatgttacattcctgctacgacttttcgc |
| | | ggaatgctcaggcgtcatgtggttgtcccgctgatggaggagcgagccagaaacggtga |
| | | tcactatactttggatgaagcctaccgtgatttgattgggcaggatgctgccagcgaac |
| | | aacagccagatgaaattgatctgatggctttaaaaaatatgcgtgcacaaaatccaatt |
| | | gtcgatttgtttggtctcggtttgggtgttcaatcacgcctaaaagtcagtcactttct |
| | | tccagagcataatattttgccagaggtatttaccaccgctcgaaaggacttaggcgatg |
| | | cagacgatggtgcaatactggacttggttcgcgatgaagagagagaaaaatatctcaaa |
| | | agagccaacgcaaattcaaagagatctgctgcagaaagccttctggcgcggctggtgaa |
| | | gcagaagaaaaaggacggttcatcagcagacttggatgctcaaatagttgcgacagaaa |
| | | gtaaggttgaagagtaccgtgatgcgatggatggcatgaccaattcttctcggaccata |
| | | cttacgcattacgccatgcctgcgggtgtacagtggacgggacgtttaattattacaaa |
| | | ctccactgaaaaagatatcgatgctctgtgtggagccttagatcgtttcagtagctatc |
| | | cgatgattggtgcccagcatgcccgtggatgcggtgagattagtggtattgctaatata |
| | | gaaacagatagaaggctggttaaaagaattagttttggtggctttgcgccagcacaaat |
| | | agacaacgtagcctag |
| | -> DinG Helicase | atgatcagaatttttagatcggaagagcaagatcagttttttaagctgatccaaaaaca |
| | (4,483)[573.6]\| | tatagaaacccctgatgcacctttactgctggaaggagccactggactgggtaaaacgc |
| | DinG | tgccgttccttgttgccgcagcggtaagtggtaaaaaggttgcgatagttttcccaacc |
| | HNH(485,5 | catcagctgatcaatcaggctttggatagctgggacttaaaagcaacacttgcggccta |
| | (SEQ ID NO: 483) | tcccgcagtgattgtgaaggcctttagacctaggtcatatttcgaagcctcacctgcag |
| | | attacgcggcacacaaacaagaagcgttagacgcagacataatgttctgcacctcggta |
| | | tccgtgatcatagaccaaagactcaatggcgattataatggctcaacagacagagatgt |
| | | gattatctttgatgaggcagatcagcttcctcaatttgctgctttgacctctgatattt |
| | | cactcagcagaattgatctaagaagcctcagaattaatgaatcttcgccaaaagagacc |
| | | attgatgcaatcttcaaaaagaagacattgccgtcagaaatcagggcaaaggcgcgctt |
| | | gatagaagaagcgttaggccttggcgatgtttggtttattaaggtgggttttgcggatg |
| | | atggagccttagaggtgcgctcacgcttgcctggaaggctgttaaaacgcgtatccaac |
| | | cgagcatcgacaatttttataagcgcaaccctgtctgtaaatggtacatttaaagactt |
| | | ttgtcgtgcgatgggaatagaagagaagagtagactgtctgcaatagttgagcccaaga |
| | | aacatggggacctacaatttgattttataactgatgaagagcttggaagcgatgcttgg |
| | | ctggacgcagtttgtgaagcaattgaatatgccgatcatcctgtactggtcgctacacc |
| | | gtcgcattctttagctcaacagattgcaagtaatgctactcaggcgaccttaagagccg |
| | | cggatgaaacaacgtcgcaagctgctgcgcgtatgggagatacaaaggttctcatagca |
| | | gcgggtgcatgggcagggcttgatacgccggtacaatggaaaacggttgtggtacctag |
| | | aataccctacactgggccaaacaatctcagagagttttggtatgatgatgaagaggact |
| | | ttggcgtccagaagccagatccgatgtcatcttttatagattcaaaaaatgctgcggct |
| | | cgtaggctgaagcaggtctttggcagaggcttaagaacacccgatgccgaatgctcaat |
| | | aatactttgcgacccgcgaattgatcgttttaataagattgcaccagccagatttcaga |
| | | aaacgtattttgagggaatggccatttcagttaatgcaacaaaatctgaacgttcgcct |
| | | ctgcttagaaaagcagcactcgctcattatggtgaaacctgcatggcctgtgactttat |
| | | tcctgagtctttaaggcaattagaaatccaccatcttgagccccttgctgatcgtgggc |
| | | caagccacacgaccctgaatgacgtcgtggtattgtgcagaaactgccacggtttggca |
| | | catgacactaatccgcccatacagttgccagagcttaaattacgatctcaaaagttgaa |
| | | aaagaaaagacctggattgtccatgatttaa |
| DinG_HNH_7_ | DR (SEQ ID | gatcaagccgcctgttagatgggcggttactggaac |
| a0335030_ | NO: 484) | |
| 0007884_ | | |
| organized | | |
| | KOON_mkCas0093 | atggttcctttcacattgagggcacggctggcagcgcccatcatccggcgtgggttcgg |
| | Csf3 | caccttggatgccctactgatggctgtgcttggtcgtggggacgtttccgacctgctcc |
| | (SEQ ID NO: 485) | agtgtgaacaggagttgtacttcgcaagtgccgggatcatggccgtcgggggcgcagca |
| | | caacccgcctcatttgtggccagcatgcggcctgagcacacacctgagtggcttgacgt |
| | | cgtggcgcccaacaccgtcaataccgatctgtccatcccggatggtgccaaggggcgtg |
| | | cccgttacaacgacctgaggatcggcctgtccaggcagcgcgagtgcggcaacgtcatc |
| | | agcagttacaccgccgtttccggtggttccgtcgagtggtacgccacgggtgatgccca |
| | | agctgtgctcgatgtcgtcaagcacgtgccattcataggcaaacgccgtgccgcaggct |
| | | atggagaggtggaaggctgggaggttgaggagggcgtgcttgacggggtctgcgggttc |
| | | ctgggggaacctttacggccagttcctgtttcgcgctgggtccatggcggtgactggat |
| | | accagttgaagccgcctggaaggccccgtattgggacgtccgtaaccgagcgaagtgct |
| | | tcgtgcccgagatcgcatga |
| | KOON_pfam08798 | gtggtggacctcctgatcaacaaacctgcaagcgttcgcggctacgccctgcaccgtct |
| | (SEQ ID NO: 486) | ggttgcagagtacctccaaggccgccctgcactgtgggcggatgaaggtggccaagtcc |
| | | gaatacgaccgcgagacgccacgcctcctgcgtacgtcgccggcaccctgctggggttc |
| | | accgtccgcgcctgcgtttcacacagcaccaaaaaccgccaccactatctgcctgtggg |
| | | cgactggcggcggcgccgcacatggctggaggccaaagctgcgccgaatgggttcgagg |
| | | tcgttgctgttcatgtcagtggtgatatggcactgatcgaggcacatgacggacgccgt |
| | | ttcacggtggacgcaaccgatttcactggcctgctgcgcgtgacagacccgcaagcctt |
| | | ttctcgatgtcttgttacaggggtgggcaaggttggcaaggcgttcggcctgggcctgc |
| | | tcatcgtgcagtga |
| | KOON_mkCas0162 | atgaatccggcattcatcctggccgatgtgctcatccatacggcccagccgctgaccta |
| | Csf2 | cacccatcacagcgtcaaggatttgccgctgatgacccggggcgtcgatgcggaagggc |
| | (SEQ ID NO: 487) | gcccccaacggaccgtgtacctgcctgcaggccaattcagaggccgtttgcgccatgaa |
| | | gccgccatggcggcactgcgcgccaagcctgagaaggtcagacttgaagatgcatatct |
| | | tttggctcttggccaggacctcgctcggcaagaagaagatgaacccgaggcggtgcgcc |
| | | tgggtgaccagatcaagttccggcaagacaacccgctgctggacctgtttggcacctgg |
| | | aaagttgccagccgcctgtttgtgtcccatctaatgccacaggtcaatgtcatgcccga |
| | | ccgggtcagccacatcaggcgcgatctcgacagcagcgaggacttgatgggcatgctgg |
| | | cgggtgaagagcaggaccgcatgtatgaccgacaggccaagcaggcactggcctccaag |
| | | gctgggaccctgatcaagctggcggagggagaactcagggcggtacgaaaggcaaagga |
| | | cacggcgctcattgatcagcttgaatcgaagctgaaggaacttgaagaactgaagaagc |
| | | agcacaagggggaagacgactccgacaacaccaagcacctcgtggagttgcaggtaatt |
| | | ccggcaggaattgatctgctgggcaagatcaccgtacaagcgccccgacgaacagacat |
| | | cgggttccttatccaggcacttcagggtgtgagcatgaagcccttgatgggtgcccagc |
| | | gcgctcgtggctgcggcgaaattcgaggtcgcgcttctttccgtaccccagatggcgaa |
| | | gtgctgacggcagttgagtttggcggctttcagcctgcgaaggtcgactggactgcgga |
| | | gggccaagccttcatggggccagcggcagcctga |
| | -> DinG Helicase | gtgaacttccgcagcccagagcaacaggcctatgcccgcctgatcgaaggtgcgctgaa |
| | (2,464)[653.9]\| | gcctggaccacccctgctggccggggcagcaccgggtctgggcaagacacacgggtaca |
| | DinG | ccttgcccttggtggcaagtgggcgccgcattgcggtggccatgagtacccgtcaactc |
| | HNH(465,5 | atccagcagtacctgtccagtgatgccatgcgcgctgcacaagcgttgcgtcctgcgag |
| | (SEQ ID NO: 488) | cgtggttgcgcttcaaacccgccgagacttcagcaatgacgcctcccacagagcgcaca |
| | | gggctgcggcgatgcaggctgacgtactggtggtcacccatgcggctgcgctgatcgac |
| | | agttggcacccaggttacgcagacctgcgttcccgtgacgtggtggtgtttgatgaagc |
| | | ggacctgctggctgacgcagcagacctgcgcagcaccttcagcatcgatgcggaagttc |
| | | aggaggaatgcggcgctgacaaactggacctgctccaggctgtgcaggcggtaaagcag |
| | | aaggccaaggcgacggaggatcgtgcagcggcgtcggccatcctctatgcactggagca |
| | | tccggcttggtacaaggttgtgggccgtgaagaagacggcactttgacgctgaagcaca |
| | | ggatgccggggcgaatgctgcgtcgtttggtcgaggaggcgccgcgttgcatcttcacc |
| | | agcggaacgctgcaggtgggtggccgtttcgaccacttcgtgcaggcagtcggcttgaa |
| | | gtcgatggcgcccgagagccggcacattgacccggtaaagcatggtgacctgagcgtgg |
| | | aactcgctgctgaagacatgagtccgcagcagatggcgctgcgcatccaggcagcagag |
| | | cggcctgttctggtactgacgacgagtcatgccaccacacaaaccctaggcgagttgtg |
| | | cacaggtgcagtctggcgtgcgcagggcgaaacgctcggtgatgcattgaaccgtgtgc |
| | | cagacgatggcatcttcatcgcagcaggtgcttggtcggggttggatgccccgcgcctg |
| | | cggtggcgtaccgtggtgattccgaagactccctaccagaggccagccatcctggatgg |
| | | gcagcaggtcacgcggtatctggactcacgggtggtggctatccggcgtataactcaag |
| | | gcctgcaccgaggtctgcgcacgcctgatgcccgctgcactctcctgctgcttgacccg |
| | | cgcagcggtcgtgacgaacttcgagaagccatacctgcgcgatttcgggtgaattggca |
| | | gagttttgacgagggctcgccaagaatgcgcgcccatgtggccggtgaaaggcatccct |
| | | ccctgcgtaacgctgccctgaaggcgctgggggcgcattgcagtcaccctggctgtgaa |
| | | gtcacagccgtgcacctcctggacgtccatcacctgaaaccagttgctgaagggcagcg |
| | | caaaaccagcttggctgacatcgccgtgctttgcaaaaaccatcacgccgaggcccatc |
| | | accagatgcggcaggccgaaattcttgaggtcaaggaggaagaatcctga |
| DinG_HNH_8_ | DR | ggtgaagccaccccggaattgggtggctactgaaac |
| 0105052_ | (SEQ ID NO: 489) | |
| 10007820_ | | |
| organized_ | | |
| PAM | | |
| | KOON_mkCas0093 | atgcgccgcttccgggtaactgcccacatgaattcccccatcatcttcgggggcggtta |
| | Csf3 | cgctactcttgacgggctacttggagccctgctttttgatcaactggacgatgtggatg |
| | (SEQ ID NO: 490) | cagcccatgcggcgatcccgctggccaacaccgacggccttttccatgcctcggcggcg |
| | | ttctacgaacccgtcgaggtcggcaagacgaccttcgttgccagcttgcgggcgcaaca |
| | | cgatctggatgccgacctgctcaggaaaaacaagacgggcaccgcgacgcatcgggcca |
| | | tcagcacgaagcgcgagcgcgacttcggcaatgtgttcaatacttatcgccgggtcacc |
| | | acgccgaagatcgactggtatgccgagggcgaccaagccgccgtgctgcgcctactcca |
| | | ggacgcgcgcttcatcggcaagcgtcgggccagcggatttggcgaagtcgagaggtgga |
| | | ccatcgaagaggacgaactcgacggcattaccggccacctagatgagcccctgcggccc |
| | | gtgccggtggagctattcaaaggcgaccagagcgcgatcaaggcggacgcggcctggcg |
| | | acccgcgtactggaaccctgcacatcgggcgatctgtttcgtgccgggagacggccaat |
| | | ga |
| | KOON_pfam08798 | atgcttgaccacgtcataccgaagcccgcccgcgttgccggctacatgctgcaccaact |
| | (SEQ ID NO: 491) | ggcggaagccatgaccgacggtgcacggcccctgttcgtggaccgaggcgaccatctcg |
| | | tcgtgcgtaccgacaaggcgatcacgccaaatccgacccccacgcgcgcagcgcaaaat |
| | | ggagaagtcatcgccttcgaactgcgtgcctgcgtggccaagaagaacaaggggcaccc |
| | | catctattttcccctcggggattggcgcgcgcgtcacgaatggctcaatcgcaaggcag |
| | | gacaaagcggcttcgaggtcctggcgcttcgctcaaccaccgcgatggcgaagatcgcc |
| | | aaggcaggccgcacttttaccatcgatcagacagacttcgtcggggtcctgcgcgtcaa |
| | | cgacgtggcgctgttcgagatcgcgatgaccaagggtgtcgggtcggtaggccgcgcct |
| | | tcggttttggcatgctccacatcaactag |
| | KOON_mkCas0162 | atgacgacaacgatcatcaacgcgacgatccacaccgtcggtcccttttcgattgcgat |
| | Csf2 | gcccgtcgcggaaggcggcaccgccaatgcctacaagaacttcccggtgatgacacggg |
| | (SEQ ID NO: 492) | gggtggacgaggatggcaacaagaagctgaccggctacctgccagcaaccacccttcgt |
| | | ggcttcctgcgccgtgccgttgtcctgcgcgacatgaagaaggcggcggcggccagcct |
| | | gccctacacgttacagcgcgcctataccgaactgatcgggcaggacgccgaaagcgaga |
| | | gggcggaagacgataggatcaacctcgttgaattgcgcaagacgagagaggcttctccg |
| | | gttctcgatcttttcggtagcggattgggcatcaagtcgcgcctgatggtctcgcactt |
| | | cctgccgatgtccaatgtcttgcctgatgcgttcacgggcgtacgcaaggacttggaag |
| | | ataccgagggcgttctggatatggtcaaggcggacgaagtcgaggcgtacctcggacgg |
| | | tcggaggcgaacagccggcgcgctgccgccgagggcctgctgtcgcaaatgaagcgtaa |
| | | gctgaacgcaaccaaaaggaagggcgagcctaccgccgatctggaagcccaggtttccg |
| | | tgcttgagacgaaagtcgagggcctgaaggctgagatgggcgatatgcggaacagttcg |
| | | cgtaggccggttggccactttgcactgcctgccgggatcgatctcaagggacgattggt |
| | | gatcaatagctcgaaggacatcgaccttgaaatgatcgagcacgccttgaacgaactct |
| | | ccttgaagccggtgttgggcgcgcaatcagcgcgcggttgtggagagataagcggcacg |
| | | ttcgacgtcgtggtggaaggcgtcttgaagaagaggcttgcaatcggcggctacgaacc |
| | | tgcccggagtatcgatttttcctcaacgccagaaggagaaaaggctgcttga |
| | DinG_Helicase | atgttccgatcatccgaacagcaaaacttcgccgcgatggtcgccgcccacatctccaa |
| | (SEQ ID NO: 493) | ggccgacggcccgttgctgctcgaaggtggcaccggcatcgggaagacgcgcgcctatc |
| | | tgtcggcgctcatcggctccggcaaacgggtcgcgattgtgttgccgacccaccagctc |
| | | atcgagcagctgcttgcttccaccgatctcgcagaggccaatgccagaggcatcaccgt |
| | | cgccgcttttcgaccggcgtcgaagttcgataccagggccgactacttggcgaaccgtg |
| | | aagtcgcggccagtgcgcaactcatgttgtgcactgccgccagtgtcatcatcgaccgc |
| | | cgtctggacggcaaatacaacggcgcgaccgaacgggattatcttctcttcgatgaggc |
| | | tgaccagttgccggcgatggccgctcttcagtccgacatggaggttaccggcgaggccc |
| | | tcaagacgctggggatcgaaggcgaaacgacccgtaatctggccgacgccgtcgtcgcg |
| | | tccaagaaggccgagccggaacagcgcgccgccgccaagatgatcctcgaagtcctggg |
| | | cgagcccgcgtggtttcatgtggcaggcaaggccgacgatggtggcatccgcctctggc |
| | | atcggctaccggggcggctactgcgcgagatcgccaaccaaccaaacgtcgcctttgtc |
| | | agcgccaccctgactgtcggaggtctgtttaacgacttcaagtgtgcgctcggcatcca |
| | | gagtgaaagcgagctgtcgggtgtcgtcgaacctgagcgacacggcacggtcgagttcc |
| | | ggaccgttgtgtcgcaagccgtggacgccgacggctggctcgaaaaggtggcggcgacc |
| | | gtcaggcaggcagaggctcccgtgctggtcgtaacgccctcgttcgaccgtgctgagaa |
| | | gattggcgcgctggtggaaggcgcgacggtgcggcagcgcgaggaagccgttggcgacg |
| | | ccatggctcgaatgggcggctcccgaaccctgattggggcagccgcctgggccggcctc |
| | | gacacgcccatccagtggcggtcaattgtcgtgcctgttgtgcctttcgagcgcctgac |
| | | ggagatcgaagggcaagtcgagagccactacatcgatgcgcgcaacacggccgtgcgac |
| | | gcctgcgccaggtgatcggtcggggactgcggtcgcccgatgcccgctgcaccgtctac |
| | | ttcctcgatcctcgtgtcttgaagctaccggccttctggcccagccggttttcctcggc |
| | | ctgggtggcccgccctcgcgatccgggtgtcctcgaaggggcgcgaggcgaggtggtcc |
| | | tgtccaaagccgagcgcgacacgtctcttagaaagcgcgcccttgcccactacggtctg |
| | | cattgtcgggcgtgtggtctggtacccaaggtcgccgcccagatcgaggtacatcacct |
| | | cgaccccatctcggaaggcatccggcgcacgacgttagcggacctgtgccccctttgtc |
| | | ggaactgtcactcacttgcccactccacgagcccgcctatgccggtcgaggaggttgcg |
| | | aagatcgtgggggcctag |

### Type I Systems

[0060] In an embodiment, the Class 1, Type I system comprises an HNH domain. In one embodiment, the Class 1, Type I system comprises a Cas5 subunit comprising an HNH domain. In one embodiment, the Class 1, Type I system comprises an McrA (5-methylcytosine-specific restriction endonuclease) or McrA-like subunit comprising an HNH domain. See, e.g., Loenen et al., Nucleic Acids Research, Volume 42, Issue 1, 1 Jan. 2014, Pages 56-69, doi:10.1093/nar/gkt747.

[0061] In one aspect, the present disclosure provides for systems and compositions wherein the CRISPR-Cas system may be a class 1, Type I CRISPR-Cas system comprising a Cas1, Cas2, Cas8e_Cse1, Cas5, Cas7, pfam08798, Cse2, McrA, CasE, and Cas6.

[0062] In one embodiment, the class 1, Type I CRISPR-Cas system comprises Cas1, Cas2. Cas8_eCse1, Cas5, Cas7 and pfam08798.

[0063] In one embodiment, the class 1, Type I CRISPR-Cas system comprises Cas8e, Cse2. Cas7, McrA, CasE, Cas1 and Cas2

[0064] In one embodiment, the class 1, Type I CRISPR-Cas system comprises Cas8e, Cas7, McrA, Cas6, Cas1 and Cas2.

[0065] In one embodiment, the class 1, Type I CRISPR-Cas system comprises Cas8e, Cse2, Cas7, Cas1 and Cas2.

[0066] In one embodiment, the class 1, Type I CRISPR-Cas system comprises Cas8e, Cas7, Cas5, Cas6, Cas1, and Cas2.

[0067] In one embodiment, the class 1, Type I CRISPR-Cas system comprises Cas8e, Cse2, Cas7, Cas land Cas2.

[0068] In an embodiment, the class 1, Type I CRISPR-Cas system comprises one or more components from Table 2.

[0069] Nucleic acids sequences of exemplary Type I Cas proteins are shown in SEQ ID NOs:495-500 in the Sequence Listing herein. All loci sequences of exemplary Type I Cas proteins are shown in SEQ ID NOs: 501-936 in the Sequence Listing herein. Complete loci sequences of exemplary Type I Cas proteins are shown in SEQ ID NOs:937-1121 or may comprise 80%.

TABLE 2

| Map | Feature | |
|---|---|---|
| Label | Label | Sequence |
| c5eH_1- | DR | GTCTTCCCCACGCATGTGGGGGTGAACCG |
| 0172376_ | (SEQ ID | |
| 10001016_ | NO: 1173) | |
| organized | | |
| | Cas2 | tcatgaagcttctggttgcccgcctttagcccgaagaagcgtcaccaaggctaaaccct |
| | (SEQ ID | cgcgttcgatcagcatccgccttgccgaaccatattgccggaactggaagccctggggc |
| | NO: 1174) | gtcgggcttgaccagatttgcgccacatagcccagaggcggcctttcggtcaccttcgc |
| | | ccaaagctcatccctcaccctccggctgcaatggcccaggaaaactcccggcttgattt |
| | | ccatcagccagcgagacagctttcccctcaagctcgtcgggattttctccgagatcatc |
| | | agcagcat |
| | Cas1 | tcatccctcaccctccggctgcaatggcccaggaaaactcccggcttgatttccatcag |
| | (SEQ ID | ccagcgagacagctttcccctcaagctcgtcgggattttctccgagatcatcagcagca |
| | NO: 1175) | tcgagcacctccgcgatatccggcaatatgcgcctcatcaacttggcctggtgaaaagc |
| | | cacacggcaggccaatcgtgtttcccgctcaagcccgggcccgtccttggcggccatcg |
| | | tgaatgccatcggtaccgtcaattccgacttgtacaagtccgcgatgtcgtaaacgaag |
| | | ctcagcattttccccacatggatgaacccgaggccggcggaatatccggctccgacgat |
| | | cgcggcatggcacaggccgtaaaggcacgcgttcgccgccgaaaggcaacgattgacag |
| | | cgttggccttgaaccagtcatcctggtcgtaggtccgcccgtcccatggaactcccgtt |
| | | ttcctgctccattcctcgtagcaaacgcggacccggtatccttccatgccccgcaactg |
| | | ttccattgtcttggcggaaacatcctgtcccgggaatcgcttggcatacatccggcggg |
| | | cgacctgcatccgtgtctcctcccgactcaccagcatcgcctggttgatcagccgccgc |
| | | gcgctgaatgtcgcgcccgtggaatgggcgtaaagcctcacgccctgctcgccaaccca |
| | | cgccaccatgcaggcgttgtcggccaggatcctcatcgcggcgtgggtgacggaggtgc |
| | | ccggacccagcttcaggagcgccaactggtcgatcggcaccggggtctcgccatcggca |
| | | tcgcggaataccagcgccgaggcggtgcaatccagcttgccatgttcgaggtaaagatg |
| | | tgaccagcggtcggaaaaccgcggcagatcgtgcaggcggcgcat |
| | KOON_ | atgggttccgtcgtattggataattccgacccggcacgatggaacacgctgtcatcacc |
| | pfam09481 - | ctggttggaagcgctggatagccgcggcgtcaacatccggatctcgccgctcgaggcgc |
| | Cas11 | tcgccaattcggcggacttgtgccaacttgccttttccaaccctctcgaccttttcgcg |
| | Fusion | gcccacaggtttttgctgtcgctcctgtactggaaggcgggagccgctaacggcacccg |
| | Cas8e_Cse1 | ggcgctgcgcgagcggttggtttcgggaaccatgccccagggcgttatcgaatcgattc |
| | (SEQ ID | gggaggaagcatccgcattcaacctttttgatcctgaaaggccattcctccaggatccc |
| | NO: 1176) | gcttgccgggacgacaaaaaggaatccccgccctcctatcttttcgccgaaatggcctc |
| | | gggaacgaatgtcgcccacttccatcacggggaggacgattcatcccggctatgccttt |
| | | gctgtgcgactcggggtttattgcgactggcgccctggatgcaatcgggcggcaagggg |
| | | ttgaaacccgccatccacggcgcgccgccgatcatggcgatcgccatgggggacacatt |
| | | gcgtcacaccctgggcctcaacctgattccgtttgacgggcatttgggaaatccgcaat |
| | | ggaccggaccattcaagccgacgcgcgagggggccgtcaccccgctcctcgaggcgttc |
| | | acctggaacacgcgacgcgtccatttgctcgatccttctccgctggactgctgttccaa |
| | | ttgcggatcggaaagcggtttcggtgtcggaccgatcgttttcaaggcgaacgaggctt |
| | | gcaaggatgattcggatgaggggcaagcgtatgccgacaattggcgcgacccggcggcc |
| | | ttttacaccgtgaaggatggcgatactgtcaacaagaccgtcaagtcgaccgacgagtc |
| | | acaggcctccgtcgccgccgatctcacgcgcctgattcctcaaaagaggggcaaggcgg |
| | | aagtaccggcgccacggtgtctcctgacgcaggccaatccgggacacgcgaactggatc |
| | | cttgtcattccctgcaccaatcccgccaataacaagacattcgatcaccgcttggtggc |
| | | gatacggggagagctgcccggcgccatcgtaccgggccgtaacgatgtggatgcgattc |
| | | ctgttcttgccggggacccgcgcacgctgcgcaagccctggtcggcgaaccccagccgg |
| | | ggcgcgagggtattcgtgaacgccgccagccgcctgcaaaagggtgactgggcggtgtt |
| | | ggcggggtccgccggcaagcccttgggacacgacgccgcggccttcgacatcttctctt |
| | | ccctttattggccaatcaggagccgggtttcctcggcgccttcgcgggaagccgcctgg |
| | | atgaccctcaaactgatggcggtttccaacctcggtggtaatgccgccatgggtgatat |
| | | tcgcccgtggaatcatttgaaaaacagtatgcggaaacagaaaagccggaacggcatca |
| | | acattgcctacccgaggcggattcccaagggcgttcaccttgaaaccgagcttgggggg |
| | | atcatcaggcgtttttccggcaagggactcgactgggcgggcctttgccaattcctcaa |
| | | cgaccatctttcctga |
| | KOON_ | atgtttgtccagatccacatgcttcaaagtgttccgcccggcaatctcaaccgggatga |
| | pfam09344 | ttccgggttgcccaagaaatgcgtttttggcggcgtcacccgcgggcgcatcagcagcc |
| | Cas7 | agtgtctcaagcgcaacatcaggctttcacctctgttcaaggaagctttcgcggaacac |
| | (SEQ ID | ttggccgttcgctcgaaataccttcccacgctggtcgccaacgccttgagggaaaacag |
| | NO: 1177) | ggccgaagccatccctgaaaaggaaatcgaggcggtcaccgcggccttggccgcgaggt |
| | | tcaagaaagaggaaaaagccagggattccgaacaggacaccggggaggacgatgaggct |
| | | gccgatgcccccgaggctttggcggtcactccgcaactggtatttttccgccccgcgtt |
| | | cgccggcaagatcgcagaactcgcgcggaacttgaggagcaccgatccgctggcctaca |
| | | agcttttcaccaagatggaaagaatctcgaaaaacgatgagagaagcgccaaggccggc |
| | | gtcgaaaaattcatcaggtcggtgttcgaggcgcgggaatcgttgtcggtcgatgtcgc |
| | | gcttttcggtcgcatgaccaccagcgacatcgtaatggatatcgaagcctcgtgccagg |
| | | tggcgcatgcgatcgcgacccatgagaccttgattgaaagcgattacttcacggcgatg |
| | | gacgacctcaacgacagcttgggcaagggtgccggtgcggcattcctggggtcgggcga |
| | | caccgagacattcttcaattccgccgtttattacaagtacctgaacatggacacgggcg |
| | | catttttgcgcaacctccggggtgatgacacctccgtggcctccaaggccgccgcggtt |
| | | ctccttgaagccgcggcactctcgacgcccacgggaaaacagaactccttcgccgccca |
| | | ttccgtaccggaattggtgctggtcgaggtctccccaaggaagcagccgatcagttacg |
| | | ccaacgcgttcctggggcccgtgcaaggggaggacctgatggcggcctcggcggacgcc |
| | | ctggctgattattgcgggacagtcgcggcggcattttcaccgccgaaaactcaaagatt |
| | | ttaccttgccgttggcagggcccggaacttcaggatccccatggaaggtgaacggatcg |
| | | acagcctggccaacttggcccttgaggttgggaaaggtgtcaaggctgccaacgcgggt |
| | | gccaagtga |
| | KOON_ | gtgagcgacaacaccctgttgctgcgcctggcagggcccatgcaggcgtggggcaccga |
| | pfam09704: | ttcccgattccagttgcgccggaccgaatccgttcccggcaagtcgggcgtcatcgggc |
| | Cas5 | tggttctttgcgccatgggaatcaggcgcgaagaggcctccgcgaaggctgccgaattg |
| | (SEQ ID | tcggccttgaaaatggccgtccgtgtcgaccgggccggccacaccgactgggactacca |
| | NO: 1178) | caccgtcggcgccggcatcggaatccgtcaagccgaggggggcgtcaagaaaacggcaa |
| | | gcacgggtgaaccggagacccttctgtccaggcgccagtacctttgggacgcctctttc |
| | | acggtggcgcttcagggtcccggcaacctggttgcggatgccgcccaggcgctgagtga |
| | | acccgtttggcctccgttcctcgggcgaaaatgctgcgtgccaaccgaacccgtctttt |
| | | tggccgctggccgtttcgcaaacctcgcggaggcgctgggggcgatcgaatggacggac |
| | | catcatggatcgtcgaggaacgggacgacggaactccaggcattcattgaacacgacga |
| | | aggcggcccggtcccaccaggtgccttcgtggtttacgacacaccgcgaaccctgcgaa |
| | | atcccagccatgggccaaggttggtggttcccggcacgatcaatgttcgggttgcgacc |
| | | gttcaaccggccaacgcaatcggcaggcgaggagtgaactacgccgcggcccaatggcg |
| | | agcggtgagggaaaggcggttggaactggaccgtttcctctgcgtcttctgcaagatgc |
| | | ccgcggaggatgtgcatcatgtgacctacgaaagggctggaaacgaatccctcgacgac |
| | | ctgaggtcgttgtgcaagatctgccatgacgcctgcacgcaactcgaatacggctccgg |
| | | catgactcgggaaaggattgatccggcagaacccgcggcgcgcaacgccatcatggagc |
| | | aggttggcaaacttctttcacaaaggcgcctggcaaggcgtcaggccatacgcgatttg |
| | | gcccgcggcgactttttcgacaatgttcccgatgcggggatatcctga |
| | KOON_ | atgttcctgtcccaattgatcgtcaatacggcgggaaatccggaccaaccccgtcccgg |
| | pfam08798 | cagggaatgggtgcgatccacttacagggtgcatcagcgaatctggatggcttttcccg |
| | (SEQ ID | acgaacacaagcgccatgccgatccgtttttccttggcgcctggtcaacgcctgatggc |
| | NO: 1179) | gtcaagcctcgaaggacggaggcgggattccttttccgcgtcgaaccggatttgccgac |
| | | ccgggttttggtccaatcggttttccgcccggattgggaatatgccttccagaacgcca |
| | | ggcatttgctggcggaaacgccaaatgtgagggaattcaatccggacccagtcgccggc |
| | | caaccatacaaattcaggctcgccatgctcatggtgaagaggaaaacacacaagggatc |
| | | cgaatcagccgggcccgtcgagcatccgatccgttgcctggttccctcgcccgtggctg |
| | | gcgagccttttcggcccgatccgaaattcacggcttggcgggaaaagctatcctcggaa |
| | | gccttgcggcatgggtttgcgctgggcgagtatccctcaaggctttcagtttcgccgat |
| | | caggcacctcatgatgaaaccggacaaggacggcaaggccatgcccttcaacgccgcca |
| | | tgttcgagggcgagttgacctgcaccgacccggaaaaactcaaggccgcgatggttggt |
| | | ggaatcggccgtggcaaggctttcggcatgggcctgctttcgctcgcgatccttcccaa |
| | | gaaagcctccggctag |
| c5eH_2- | DR | GTCTTCCCCACGCATGTGGGGGTGAACCG |
| 0172382 | (SEQ ID | |
| 10009164_ | NO: 1180) | |
| organized | | |
| | KOON_ | atggaggagagctcaatgtataatttgcttgaacaagattgggtgagggtgctctaccg |
| | pfam09481: | cagcggagaacctaagctaatctcgctatcgagactgcatcgggatgcggataaattgc |
| | Cas8e | atcttgcctacagtaatcccatggaccggctggcggttttccgctttcttctcgctttg |
| | (SEQ ID | ggctattggtgttttgccaatacgaaccaaacaccggcacgagataaacccatacctga |
| | NO: 1181) | agcatggctgtcctggctggaggagaacaagcagtatttgaaactttatggtgacggtc |
| | | ccaggatgtatcaggacccgggcgttaaacgcacacgtcccatcaccgacttgctgcac |
| | | gaaattcccacgggaaacaatctttcgcatttcaaacacaccttggactatgtctccgg |
| | | cttgtgcctgccctgctgcatacaaggattgctgcgtttccccatttatgcaacctcgg |
| | | gattgccacaactcaaggccagcattaacggcatgcccccattttatgccctgccatgg |
| | | gggaacactctggcagaaactctttacctgaattgggagccacgcgaattgatgggaac |
| | | cccggcctgggttttcaacaccgttgaccccgaagacggccctgtgccactcttggagg |
| | | gtcttacttcacttgccaggcgctgtgtattacatgaccccatacccggagatggcgcc |
| | | tgttccgcatgtggcgaccgaagcggaagcttggtatattcctgtggttacgacacggc |
| | | tggtgttgttgccaatcccatgtgggaagacccgcacgtatgctacgatgtcaaaaaaa |
| | | ccaaagcaaacaaggcgttgaatttaatctctgaaaaaccaatgatgcaggatagaaac |
| | | tggcaacgtgcattcactggttcttccaagttggagtccggcgatgaaagcatcaatct |
| | | gctctgcattggagtatcagttaaccaagccgtcataaatgacgtgtgggagtccacca |
| | | taagaattccgccccgggaagccggaaaagaccccaaaagcataccgaattggacttgg |
| | | attaaccgtcgacttgttggtggatatgaaagaaacagattgtattgggccgataaatc |
| | | agtttccggaaaacccagggctccgctcagtgaatcgctcatcagcgcagtttctccgc |
| | | atattcttcattatgcgattcaggagacgggtggttttttgccggataacggtgaattg |
| | | cccaaatcggtacagattgagtatagaaacatgctgaaagctgttgccaaatcccaggc |
| | | accggctgtcacaatagaggatgccatcgcgtccaagtttgtgcataatcagcgtccac |
| | | agcttgagcaagccaaagcttccaagcaggataaaaaggaggaccaagttgattga |
| | KOON_ | ttgattgaaacatccacagctcaattcatcaaaagaattgcagaactgaagtctggaga |
| | pfam09485: | cctgggtcggctgagacaattgagaggttgtgacctgcatgagaatctggacgggttcg |
| | Cse2 | acctgttcaccggcctgtggtggacattgagaaaaaactcgccccgggcgccccgacgt |
| | (SEQ ID | gagattgcctggctcgttaccaaactgtatgcgcagttcccattctctcaagaggacgg |
| | NO: 1182) | gctaaccttgcctgtaatccttggacgtatttacaggactctggcaacgcaaaaggaaa |
| | | aacgaatcttcgccatgaggacggatgccattctgcaagcgcaggcaaaccagttggaa |
| | | caccccttaagctgggccctgcggatgcttgccctgtatggctacgcttcgctggattg |
| | | gattcaacttaccgacgacctttcggtttggcatgaaatagtgcgacaccgatggacgg |
| | | aggcatttctaacacaatcatcaaaggacaaaaacaaggagaattaa |
| | KOON_ | atgttaatcgaaatgcacatgattcaaaaccacagcccggcaaatctcaaccgggacga |
| | pfam09344: | ccttggcgcgcccaagacctgttatttcggcggagtgctacgttcacgcatttccagcc |
| | Cas7 | aatgcatcaaacgcagcatcagaaccagcgatgattttcagactctgcagggcggggtt |
| | (SEQ ID | cgcacacgcaggctggtggaacttatccagctggaagctggggacacagattgcaggaa |
| | NO: 1183) | aagagcacaggaaattctgacctattgcggatttaaacatgaaaaagacaacagcaaaa |
| | | tgctgattttcatgtccagagacaaggtgaaataccttgccgagattatcttggatgaa |
| | | tccctggaaatagcagacgctgcccagaaggttgccgatgtgattacccaggccacgtg |
| | | ttcccccgatattgcgctttttggaaggatgttggaacctgaaacaagcaagactaaat |
| | | ggagagatacaacagtggaggcagccatgcaggttgcacacgccctttccacacacgcc |
| | | gcccgtccggaaatcgattattatgtggcggcagatgacgttaagggagaagatgccgg |
| | | tgccggctttgttgacgaagcgatgtttgcatccgcctgcttctataaatatttctcca |
| | | ttgattgggaccaactggttaaaaatttgaaaggcaacgaagaactcgccgcacaaaca |
| | | gttggggcatttatcaagtctgctgcgctcaccaatcccagcggcaaacaaaacagttt |
| | | cgcagcccataacccgcccgatggcattttggtggaattcaaggatacacccgtcagtt |
| | | atgccaatgctttcgttcgtcccgtaaagcttaccgccgaatcggacttggtggaactc |
| | | agcataggccaactcgccaactatgttaaagatgtaagcgaagcatattatcccggcca |
| | | catggaaggcaacgcattttggttctctcccaacggacgccatcccttgttaccacaag |
| | | acggggacatacaagccgagcaagttggacaactggaagaactgataaagaaaacggtt |
| | | cataaatgcggttatgagtgggaagccatcaagcaaaaaaaagtagaaggctga |
| | KOON_ | atgagcgccaacaccctattcctaagactggagggaccacttcaatcctggggcgggca |
| | pfam09704 | tgaggcgaaattttccattcgccgcacttctgatgctcccaccaaatcaggagtctttg |
| | McrA | gcttgctttgcgccgcactgggaattggcagagtcgaagcaggtgaaagctgcctgccc |
| | (SEQ ID | gaactggcgaacttacgcatgggagtgcgcatagacaggctcggtgtccgctggtggga |
| | NO: 1184) | ttaccacaccgtgaacgctgggattccgatgcttaaatctgggctagaggcgtctgaag |
| | | acctcagcgatgtgggcaaagccagggcagaccgactgcttaaaaaagaactgagtttc |
| | | gacaaacgcgggttgctcagccgtcgcgaatatctggcggatgccagttttctggtggc |
| | | cttgcagggtgaaccttcaacagttcaaaaactggcggaagctctgcaaaaacctgtct |
| | | ggacactatatctgggcagaaagacctgcacaccatcacgccctgtgggagagcatacc |
| | | cccggtaaatatgcgagccttgaggaagcattgttggccatacccgtgcaggtgaggga |
| | | taaacacgaaaccctgccccagtccctccaatgtgttctggactggattccggcttatg |
| | | atggtgaacccgctccggattgcgcggaaatccactacgacctacccatgtcttttgac |
| | | cctccccggcatttgccgagatttgtgattcgccgtgaactgcccttaagtgtagatat |
| | | cgaaacacaacaggttatcattggaagaccctggcgtccggcacgcagtagggccgatt |
| | | acacaaacactcaatataagagagtccgcgcagaacgtctggtgatggatgtcgggcta |
| | | tgcatggtatgcaaggcgcctgccacaacagtgcaacacgtaaactatcgtcgcactgg |
| | | agggagggaagagcctgaagatttgcgcgccctgtgtcggctgtgccacgacgcatgca |
| | | ccatgctggaatatggcagcggcatgaccatggaccgcatagacccgtgtgaccccgcc |
| | | tggcgtaaccgcatcataagcaaacgcaatgaaatcatcgaattccgctcgctggaaca |
| | | acgcagacgaaagcttgaccccaaggaggaaaacggatga |
| | KOON_ | atgtatctttctcaattactcatagataccggtggaaatccggacagactcagaccggg |
| | pfam08798 | acgttcgtggctcaacaatatttacaacgtccaccgcaggctttccatggcctttccca |
| | CasE | tgcggcaacgaaaagatggtgacccccggttcctgcagccttttaacccggctgacttt |
| | (SEQ ID | gagcgtcaccgctttctgttcagggtggacaacaacatcgacggagaggaaaccagagc |
| | NO: 1185) | catggttctggtccagtcatcaatactgccggattggaactacgccttccaaaacgcca |
| | | ccggctttttggcggctcctcctcaggtaaaagaatacaccccaaatttttcccccgga |
| | | cagcagctgcgcttccgcatcctcatcaacgccagcgtaaagcgcaaaatcgaagaaat |
| | | gaaagacggggactccggaagagttaagacggggaaagtgctgcataagcgtgttgcct |
| | | tcacttgggatgctgatgtttccccttccgatgcacttgccgaatggttcgccaaaaag |
| | | gcgtccaaactggggtttacgccaattaaaacagagctggttaagcttggctggatata |
| | | tggctccaaacctgaaccgcgaggtgaaagaccacgaagagaaaatgaataccgccccc |
| | | tgaaatatcgttctgcactgctggaaggatatcttaaagtggatgagccggagttattc |
| | | aagaagactttggtcacgggaattggcagtgcaaaaagcatgggatttgggctactttc |
| | | cgtaattcccacacaagatgcgtaa |
| | Cas1 | atgcgtaacaaagacctgcgctccatcccaaagatgagagaccgcatcacctacctgta |
| | (SEQ ID | tgtggaacatgcaaaggtggataaaaaacataaatccatagcctttcatgatgccatgg |
| | NO: 1186) | gttccacacaggtgccatgtgctggactggctcttttgatgctcgggcccggcgtatcc |
| | | attactcatgccgccataatggtgttggccgaatgtggttgtcttgttgcctgggtggg |
| | | tgaacaaggcgttcggttttatgcttcaggcgccggcaccacccgcagttctgcaaacc |
| | | tgatgcgtcaagctgccgcatgggctaatcaggataaacatatgaaaatagtgcgcacg |
| | | atgtacgagatgaggttcatggaaaaactggacacctcatatacccttgcccagattag |
| | | gggtaaggagggtgcgagagtgcgagacacatatttcaggttgtccaaagaatatggag |
| | | tcaccatgaaggccagagaataccaaagagacaattggattaaaacagaccctgtcaac |
| | | cgtgcaatttccgtggcaaactcgtgcctatacggaatatgtcatgctgcaatagtggc |
| | | tgcgggttattctactgccttgggctttatccatacgggaaaacaactctcgttcgtat |
| | | acgatattgcagacctttataagatggaaacttcagtgcccgctgcctttatggcaaca |
| | | gctgaaggaagtgacagccttgaccggagaacgcgaatagcctgtcgtgaccaattcca |
| | | tcaatttggtttgctgaaaaaaatcgtcgccgacatccatgcccttttcgacattttgg |
| | | aaactccggatgatgaacccgacctggtggatatcgatgccgcagcacccggtgggctg |
| | | tggaacccggataaaagtataagtccaggcgggcaatcatggggtttggattcacaagg |
| | | aactgaagatgatggttctgattcttga |
| | Cas2 | atgatggttctgattcttgaaaatgttccaatctcactccgtggtgaaatcacccgttg |
| | (SEQ ID | gttgcttgaaataaaagcaggcgtatttgtcggcaacgtgtcagctctggtcagagaaa |
| | NO: 1187) | agatatgggataaagtcaggtcagattgtgccggcggcacttgcctcatggtcttcagt |
| | | aaacattgcgaacaaggctttgacataaagttttggggcgctgcaggaaaaattgtcac |
| | | agaatgggaaggtttaaaacttatgactaaacatccgtaa |
| c5eH_3- | DR | GTCTTCCCCACGCATGTGGGGGTGAACCG |
| 0187892_ | (SEQ ID | |
| 10009586_ | NO: 1188) | |
| organized | | |
| | KOON_ | atgactttcaatttgctcgttgaaccgtggattcccgtcctccgtacaaatggacgccc |
| | pfam09481 | tgcgcgagtaggcgtccgggaagcgctaacgactgcgggcgccatccgacagatcgccg |
| | Cas8e | cgtcgaacccaatggataacgtcgctctgctccggtttttgctggccgtgctcatgtgg |
| | (SEQ ID | tgcaagccgcgtctaagtgacgaagaacgcacacagctcgacgtcgcgaagggcgtccc |
| | NO: 1189) | agaagagtggctggccgaacgactcggcggtgcaagtacgccgtgcgaggagttcaacc |
| | | tgctcggtgacggcaaccggttcttccaggatcgatctaccccaaataacgcgcgcccc |
| | | atcggcgacctgctcgttgagtttccgacagaaaccaagatcgcgcgcttccgccacgt |
| | | ccgagacacgcagtacggcttctgtccggcctgcagcgcgctcggcgttgtgcggttct |
| | | gcgctttcgccaacgcgtacggcggcggtcgctacacatccgcccttaacgggcctacg |
| | | cccgcatatgtgatctcgcaccgccccacgctagttggcactctgctgctacactggcc |
| | | tatgaacaatccggtcaaacgatcgccgccgtggctttgtgctgatccgccgtccgaaa |
| | | gcgacctagaccttcccacggccttcgcctggcgctcgcgccgcatttggctaaacgat |
| | | cccgatgccgacggggattgcgcatactgtggtcaccgaagcacactcattcgacaact |
| | | cgcgttcaccggggcgtggaagccgccatttgaaaccaaggggcaggagaagaggttct |
| | | gggagaaggatccgcatctgatcgtcgtggagaaggaccgcgaggcgccagcggaggag |
| | | acggcagccgatgacagtgacgacgcgccccaccgtgacgccaagagcagcgagcgccg |
| | | ccgcacgagaacaacgctcggtttcccttccccggggtcgcgagtcgcggcacattcga |
| | | ggttctggcgcagagcccttcgcgctaggatcgggcacgccagtggcaaaaacgcggac |
| | | gatgcaaccgctgtgatcgttgcgggacccgctgccaacaaagggctttatcaggatgc |
| | | tagcgaagtccgcttgccgcgtctttctaacgatgacggcaccgccgcgtcgattgatg |
| | | ctctggcgaaggcggttgatgctctgagcgccgtgttgaagtgctccacacgcaacccg |
| | | gagcgtcagcaccccgagcacaaggccgcgctcgattcgttggcaccttcgctagaact |
| | | gggttttcgcgaggatactcaagcgttactgatcccgagcttctcaatcgatcacgcga |
| | | cagagcgactcttacccgtagtgaataccgtccttcgcgccacgtccgcaggctcgccg |
| | | ctgcgccggcgcgagggagaggcgcgcgcacgcgaggcgttgaatcgcgttctccactc |
| | | ggtcgctgccgcgagcggttcgcccgcgaaatatcaaaatgagcccagcgcgggcgaac |
| | | aaagggcccgtgaacacaagcgcacgcgcgcgacagagtctaggagaaccaacgcgtga |
| | KOON_ | atgctgatcgaaatccacatgatccagaaccacagcccgtcaaacctcaatcgcgacga |
| | pfam09344 | cttaggggcacccaagacctgcctcttcggcggcgttacccgcgcacgaatctcgagcc |
| | Cas7 | agtgcctcaaacgcagcatccgacgcagcgcggagtttcagcgcgctttggagaaaggc |
| | (SEQ ID | ggcggggtccggacgcggcgcttggtcgcaattctgtcggagcgcgcgcacggctcgcc |
| | NO: 1190) | ctccgcaccccacgacttgatcgagctggtgactaaggcgttcgaaaagggtggggtga |
| | | agaaggatcccacgaaggacgacccgcacgcaacgaacattttgttgttcgtgccagag |
| | | gggacggtagtcgcgatggcgaaagcggtcaaggctgagtacggcaagcccgcggctca |
| | | acggacggccgatggcttggctgagacactgacggaactcttcggtcagaaggcgtcag |
| | | tgccagacattgcgctttgcggacgcatgaccgaacttgactcagacggcctgtttcgc |
| | | aagatcgactttcgcgttgaggcggcgcttgcagcggctcacgccatctcaacgcacga |
| | | ggccatcaacgaggtcgattacttcacggctgtcgatgaccaggcggtcgggaccggtg |
| | | ccgggcatgtcaacgaggccatgttcgcatcggcctgcttctacaaacacttctgcatc |
| | | gactggaaccaacttctcgacaacctcggcggtgacgagccgctggcgagtacgaccgt |
| | | gtgccagttcctgcgcgctgcggccatgaatgtgccgagcgggaagcaaaagagctttg |
| | | cggccttcaatccgccggacggcattctagttgaagtcaagcacgaacaccgcctgccc |
| | | attagctacgcgaacgcgttcgctgatcccgtcccgctcaagactctgcgcggactgat |
| | | tggcgaaagcatcgcgcgcctggggcagcatgttcacgacattacggccgggtacggag |
| | | tcaaagcgaagcggttctggttttctccggccgggcgccaccggctgacgtggattgac |
| | | cgaacggctaaggagggtgaaaaggagaagctggccatagacggcgaagatggcacttt |
| | | tgattcgttcgacaaattcgtcagcgccgtaatgcaggaactgggaaggaccgcctcgt |
| | | ga |
| | KOON_ | gtgactggaagtaccgttttcatacggctggaagggccactacaatcgtggggcgacac |
| | pfam09704 | gtcgaagttcgtgattcgccgaagcatggaggccccgacgaaatccggcgtccttgggc |
| | McrA | tgatctgttgcgccatgggtctttcgcgagaggccgcgcgcgaggtgctcacagacctg |
| | (SEQ ID | aataccttggttatgggcgtccgtatcgatcgggcgggcatgcgttggtgggactttca |
| | NO: 1191) | caccgtcggtgccaaggtcggcattctgaatgcaaagggccacgtgaagaagacggcca |
| | | gtacgggcgagtatgaaacactcatcacccggcgcgagtatctcgccgacgcgagcttt |
| | | ctcgttgcactgcaaggcgacgatgagctgactaagatcgtgcacgctgcgctcgagtc |
| | | gcccaagtggccgattttccttggccgcaagtgctgcgcgccaagcgtgccgctactcg |
| | | ctcctccgtcggacggcgaatcctggacgaacccgcaggtacacggcagcttgagcgct |
| | | gccctcgccgccgtatcctggcgccctcgatacgattccgaatcgccgcccatacctac |
| | | gacgcgcgacggaagggcggagcttgattgcttgatggagtggcgggccctaagcgaca |
| | | gcgacgtcgcgcccgatgcggccgaggtatggtacgatgtaccggtctgtttcgatccc |
| | | cccgtccacgagccgcggatcgtcacgcgaagcactacggtagtcccgatcgcgcgagc |
| | | gctccaacaacacactccgccgccgccgcggccgcgcgctgattacaccagcagagagt |
| | | acaagaagcaacgcgcggcccgtcttgaggctgatggcggtgtgtgcgtcttctgcaaa |
| | | tcgcccgccagcaccgtccagcacgtaagctaccgtcgcgcgggcggcgctgagacgca |
| | | ggacgacctccgggcgctttgccggctgtgtcacgatgccgtcacgatgatcgaatacg |
| | | gcctgggcatgggcctcgaccggatcgacccgtgccaaccccgttggcgccaagacatt |
| | | ctgcgtactcgggccgaaatcgtgcgtttccgcgcgcttcaagtacggcgccgacgcct |
| | | tagccccgacgaggtcgaatga |
| | KOON_ | atgtttctatcgtcgctcctgatcgacaccggcgaaaaccccgaccggccgcgtcccgg |
| | pfam08798 | acgactgtggctgcgcaacatgtaccgcgtacaccagcgactttgcatggcgtttccga |
| | Cas6 | ctgcagcgcgcagcgaaaacgatccgcagttcgtacaaccctaccagcgggacgacttc |
| | (SEQ ID | attcacgtgcacggatgtcgcacgaacgatcaggcttttctctttcgtgttgattctct |
| | NO: 1192) | cgccggcggcagagtagttgttctgatccagtcggcgatcaagccggattgggattacg |
| | | gattccataatgcgcagcaccttctcgccgcgccacccgccatcaagttgtttgatccg |
| | | cagctcgcggccgggcaacgcgctcgatttcggctgcaggccaatcctaccaaacgcct |
| | | gcgccgcgaatcgccaaacgctagcggtgatccgacaccgcaacagtgggtgggcaagc |
| | | gcgtcgccgtgcccgctgacaagctccaggactggctcgcgcgccgcgcagagagctac |
| | | ggattccacttgcgcgaattgacggagttgtgtccgggatacgtgtacgttagtcgcac |
| | | tccagagtccgccggcggtctacggctgcgatctgtcaggtacgagggtctgctggaag |
| | | tcactgactccgagtcgctggagcgtgccatcatccgtggcatcggccccgccaaagcc |
| | | ttcggcttcggcttgctctcgctggcgccggtccggtaa |
| | Cas1 | atggacgatctgcgctcgctgccccgcttcgacgatagcctcagctatctctatctcga |
| | (SEQ ID | gcatgcccgcatcgagcaggacgacaaggccatcgccttctacgacaaggccggcctca |
| | NO: 1193) | cgcccgtgcccatcgcggcgctggcgctgctgatgctgggccccggcaccaccatcacg |
| | | cacgcggccatcaaggctctggccgacaacaactgcaccgtcgcctgggtcggcgagga |
| | | cggcttgcgcttctacgccgccggcaccggcggcacgcgcggcagtgccgccctcctgc |
| | | gccaggcccggctgatgagccatccgcagttgcgcctggcggtcgtgatgcgcatgtac |
| | | cgaaagcgcttccccggcggactcgacccgaacctgacgttgcaacagatccgcggcat |
| | | ggagggcatccgcgtccgcgaggcttacgccgccgccagcaaggctaccggcgtgccct |
| | | ggaccgggcggaactacaagcgtggcgactgggccgctgccgaccccgtgaaccgcgca |
| | | ctgtcgaccggcaacgcttgcctttacggcctggttcaggccgccctcctgtcggccgg |
| | | ctactcgcccgccctcggcttcatccacaccggcaagcagctctcgttcgtctacgaca |
| | | tcgccgacctgtacaaggccgacctggtcgtgccggccgccttcgaaaccgccggctgg |
| | | caatgcccgtccgtcgaacgccagatgcgcatcgcctgccgcgccaagttcaaggacgc |
| | | tcgcctcatgcagcgcattctgcccgacatcgccgagctcctcgcgctcgagggcttgc |
| | | ccagcgtcgccgacgacccggcctgggacgttgaatcggccgcgcccggcgcgctctgg |
| | | gacccggacggccgcctcgaagggggcctcaactatggtactgatgttgcttga |
| | Cas2 | atggtactgatgttgcttgaacgcgtcgccccttctgtgcgcggcgaactcacccgctg |
| | (SEQ ID | gctcatccagcctcgcaccggcgtcttcgtcgggaccgtctccgccctcgtccgcgaca |
| | NO: 1194) | agctttgggacaaggtcgtacactccctacaggctgccaaaccccgaaaaagcggaaag |
| | | cgcgccggcgcgattatggtctataccaccaataccgagcagggcttcgacatccgcgt |
| | | cttcggccaaaccgatcgatccatcgaagacttcgagggcctcatccttgcaaaaacca |
| | | tcgcccaaccctaa |
| c5eH_4- | DR | GTCTTCCCCACGCATGTGGGGGTGAACCG |
| a0073932_ | (SEQ ID | |
| 1000118_ | NO: 1195) | |
| organized | | |
| | KOON_ | atgaacgactttaacctgatagaggagccgtggattcctgttatttaccacaatggcaa |
| | pfam09481 | ctattgccgtgtcggcatcaagcaggctctttccgatgcccatctcatccgcgacatcg |
| | Cas8e | ccacctccaaccccatggaccgcgcgggccttctacgctttctcctctctatagtttat |
| | (SEQ ID | tggtgccatggaatgccagcccctcaagaaacgtctcggctaggtgatcctttaccgga |
| | NO: 1196) | ttgcacaccacatcttggtgcaaagacaaattttttctgccttttcgggcagaaacacc |
| | | gtttttaccaatcaccaacggcaaaccgagaagtaaaaattggtgaactgtttcaagaa |
| | | attccatccggaaacaatttctggcattttcgacatgtcaccgataaagaacatggata |
| | | ttgcccagcctgttgtgctctaggcctgctgcgccttcctcttttttcagtcagtggat |
| | | tgccagacttgaaatcggggattaatggaactccacccatctatgtctttcattatggc |
| | | aaatctttagctcaaattctccgaaaaaactggttgccaatgaagcaaaacttgctggg |
| | | cacgccatgttggatggaccccaccttggttccaccaatcggagaccctatcccgctgt |
| | | taatcggattaaccgtcccagcacgcaaagtttggctcggacaacccattcaccatggc |
| | | cgttgctctttgtgcgggaacccatcaaaacacctggttttcgaggctcacattcaatc |
| | | cgccggtacgttggaaaattcaaattggcaagacccacatgttgtttatttcctaaacc |
| | | aacaacaacgaaagtcatgcaaagctcccaatctcgtcgtaggcggtgaatttcaaatg |
| | | gaccgcccttatgccgatcttatggcatgtctcttggaacgggtccaatttcccgcaac |
| | | tgcgacaagccaacttctaattgtcggttttgccacggacaaagctaaaaatatagatg |
| | | tttgggagagaactgtaactttggtccttaacgaaatgcagacaaccgcagccacagct |
| | | ttttccacctggtggcgaagtgtaagtgcattgtccaacaatgtttacactattattaa |
| | | aacaaccccctacaatcggcctcgtgggtccaaaccctcgtatgttcactgccattttt |
| | | cccacatcagaccccatgtggaacatataatatcatctaacatgcatattctagtaagt |
| | | gaaccaaacgaaggttggcatgaagcacgccgtgagttcagcgcttttttgccgatgtt |
| | | ggctcaatccctctctcccggcgtgacctcccaagccgttcaaaagcgccgtgccatcg |
| | | ctcaggccttgccacctaatccctgcccgaaaccggaaccatccagttcaccctccact |
| | | caaaaccccaacttgtaa |
| | KOON_ | atgagcgccacccttgaatacattacaaaactgtcccatataaaggccggctcccgcac |
| | pfam09485 | tttggttcgcactcatgccaatctctcattgaaccattccgtggatgcctttgatttgt |
| | Cse2 | tcaccggtctttggtggcccttgcgccaacaatcacaatttgcaccccgtcgccgcgtg |
| | (SEQ ID | gcctggctggtcgccaaacttcacgcagtcagtcctctgccacaccaaccaggccagac |
| | NO: 1197) | cctccccatccagctcgcgaagatttggcataggcagccagacaccaatacaaaaaaca |
| | | ggttccagcgcaaattcgatgatctcctttgccgtcccctggaccaaatggaacccgct |
| | | ttgcaatgggccttgagaacaattggctctgcaaatgagccatccttggactgggtgca |
| | | actcaccgacgacctctcccggtgggaacaaccgcaagttcgcgaaaaatgggccgaag |
| | | tctttttaggcaggtaa |
| | KOON_ | atgaacaatcaaaataccacacgcatacaaatccatctgcttcaaaaccacgcaccggc |
| | pfam09344 | caacttgaacagagacgatttgggagcaccaaaaacctgctacttgggcggcgtcctcc |
| | Cas7 | gctcccgcatctccagccagtgcctcaaacgcagcatccgattgagcccctacttcaaa |
| | (SEQ ID | gacctctgcggcggtgttcgcacacgccgcctcgcaaaactcatcactgaccaggttga |
| | NO: 1198) | tggcaacaatgcgacgaagaaaaaagtggccgccatcctgaagaaatgtggtttggagg |
| | | ccaaagagaacgacgaaacaaatatggtcgtttacaccacaaaagaagccatcagggaa |
| | | atggcaacagccttgagaaacggactcgaagaacccgacattatcgccagattcaaaga |
| | | gcttttgagcacgaatactgctgtcccggacatggcactgtgtggacgcatgttggaga |
| | | caggagaaatcaaggacaccaacgtcgaagccgccctgcaagccgcccacgccatttcc |
| | | acacacgaggctcgccccgaagtggattactatgtgacggcggatgacatccccggaac |
| | | tgatgccggcgctggttatgtggacgaagccatattcgtttccgcctgttattacaaat |
| | | acttttccattgattgggcacaattgctccacaacctcaagggctacccgggcaacaga |
| | | atccatctcgcagcccataccgtcggcgcctttatcaaggcagctgccttggtgactcc |
| | | atccggcaaacaaaacagctatgccgcccacaatccacccgatggtatcctcgtggaaa |
| | | tctcccccacacccatcaattatgccaatgcctttgccaaacccgtggacattggccaa |
| | | cgtgatttaatcggccaaagcattgctcaactcgcccagtacatccacgagatggatgc |
| | | cggtttcaaagtcgttgacccgtccaagcgcttctggttttcgccgggcatgcgcaatc |
| | | gcttggagacctcacagcgcgccggtgatacagcaggcgaccgccaaaccatccgagtc |
| | | caggcggtggaggttgatcaactcgaaaacctgatccatcaggtcatcaaggccattga |
| | | cccgatcctcgactggcaggaagtccaaagaaccattctcaataaccatgaagcctga |
| | Cas1 | atgaaactggacgacctccatatcctccccaaattctccgatggttggagctacctcta |
| | (SEQ ID | tgtcgagcattgtcgcgtcgaacgagaacaaaacgccatcgccatctatgacacagatg |
| | NO: 1199) | gcatgatccccgtcccttgcgccaacctggctctcttgatgcttggcccgggcacctcc |
| | | atctcccatgcagccataacagttctggcggaccacggctgtttaatcatctggtgcgg |
| | | agaacaaggcgtccgcttctacgccaccggtatgggtgaaacccgcaatgccgcccgcc |
| | | tcctccatcaagccttcatgtggagccacgaaaacctccgtttcgaagtcgtccgccgt |
| | | ctctacgcaatgcgttttacagaaaccctgccatccaacctgtcattatctcaaatccg |
| | | cggactcgaaggccgccgcgtccgcctggcctatgacaaagcggcccgtgccagcggca |
| | | tcccctggaaaggccgccagtatgaccgccatcattggacccactccgaccccgtcaac |
| | | cgtgccctttccaccgccaattcctgcctctacggcctctgtcactccgctattgtctc |
| | | ctcaggtttctcccccgccataggctttatccatactggcaaaatgctctccttcgtct |
| | | atgatatcgccgacctctacaaaaccgaaatcacagtccccatagctttccaagcggcc |
| | | gcccaaggagacaccaacctcgaacgccgtgtccgcatctcatgccgtgacgcctttgc |
| | | cgaatctcacctcttggcccgtattatccctgacattcaaaaagctcttgcttggcaac |
| | | catcccaaaacgaaaactccccccttgattcagaccccgcccttccctctcacctttgg |
| | | gacccggatttaggggccgtgcaaggcggaatccaacaacctgccacatcccctttgcc |
| | | cccaactataccagccccagccccggaatctcatgatggtgctaatccttga |
| | Cas2 | atgatggtgctaatccttgaatcagtcccaccttcactgcgtggagaactcacccgctg |
| | (SEQ ID | gctcttggaactcaaagcgggtgtcttcgtcggccgcgtctccgccctcgtccgtgagc |
| | NO: 1200) | gcctttggaataaatcctgccaccacgcccgcaatggcggctgcctcctcatctaccac |
| | | accaataacgaacaaggctttaacatcctctcctatggtaatacatccagaactatcgc |
| | | caacttcgatggactcctcctcgtcaaaatcccaaaataa |
| c5eH_5- | DR | GTCTTCCCCACGCATGTGGGGGTGAACCG |
| 0315288_ | (SEQ ID | |
| 10006183_ | NO: 1201) | |
| organized | | |
| | KOON_ | ttgaaatacaacctgcttgaggagcactggattcctgttctcggaaccgatgggaagct |
| | pfam09481 - | tggctacgtgggtatcaaggatacgctgacccatgcagggcgcatccgttgtatctgct |
| | Cas 11 | tagcaagcccactcgacatgttcgccgtgcaccggttcctgcttactttgctttattgg |
| | Fusion | aaagcagacttagcgggtggggtggaagaggttcgggcgtcgttgctgaagagcgaatt |
| | Cas8e | gccgagcgcggtgctcggcggtatcaacaaggaagaccattgttttgacctcttcgata |
| | (SEQ ID | aagaatcgccattcctgcaggacacgtctgtatccatctccaaggaaaaagaaaagaag |
| | NO: 1202) | tcggtcggctctttgtttgctgaattagctgtggctactaacatagcccactttcatca |
| | | cggcgacgatgagagtatgcggctatgcctgccgtgcgcaaccatcggcctgctccgtg |
| | | tggttccgtggagccaatcaggcggccaaggaaagactccctcggtacacaatgcgccg |
| | | ccaattatggcaatggcaactggcgataacttggcggccacgcttggtttgaaccttgt |
| | | accgttggatactaaagcgggcaaagcgcagtggtccggctactttacgccgactgatt |
| | | cgacgagtccaatcccctatctcgaggcgctaacttggaatccccggcgcatccttctc |
| | | ccctcagcccaagaaggcacttgctggtactgcggtgaaagcaatgtacccacggtcgg |
| | | gaaaatcgtgtacatgaaaaacgaaaacacaaaaaagcgtgcagacgagaaattgttcg |
| | | aatggcaggatccggctgccttttatgctctatacgatgtgagtaagaaatatgacaaa |
| | | gtcaagaacgtgccgtataaaacgataaaaagttcccgggagaacttggctaccgatgg |
| | | ccgagacttgcagcgcctggcgcatgacgatccgtttcccgaatctaccgtagtcgtga |
| | | agaaccccaagcatgagggttggctcctggtcgttccatgcacaaatcccgcgaacaac |
| | | aaaacctacgatcatcggcaggttgagctggcacaactttcaccagagacgattcgctc |
| | | cttaccgcctgccgtccccccgtccaggagacagggcatcgacggttggaaagaacccg |
| | | aaagagtcgagcgcaaggacgttgagcattttgtgccggctgcggtgaggcttcttacg |
| | | cataccgattgggttacgctatcgaacgctgcctacatggatatgcacgattcaccagc |
| | | ggcgttcgatgtttttagcggcttgtattggggacttcgtgacaagaagaccaaaggac |
| | | ttccgtcgcggaatgtggcgtggttgatgctcaaactgatggcatcagtccccgcacgt |
| | | gcccgcactcttcatcccaacgccgaattctgcccgctgcagagactgccgaaacgaca |
| | | gagcaatgagcgcgacatggcgtccccctaccctgtttctttcccacgcggtcgtcggc |
| | | ttgaggccgcacttagcgccgcacttgttgacaatctgcgcaagagaaatcccgaacct |
| | | gttgactggacacgtctatgttacggactagaccaattactcgactaa |
| | KOON_ | atgtttgtacagattcatatcctccagagcatgccaccaggaaacttaaaccgagatga |
| | pfam09344 | cgaagggcagccgaaaaagtgtatttttggcggcgtcacgcgcggccgcatcagcagtc |
| | Cas7 | agtgcctcaagcgaaatatccgccattctatacaattcaaagaagtgttcggcgatgac |
| | (SEQ ID | ctcgcaaccagaacgacatacctgccacgtatggtggccgacgaattgaggaagagcga |
| | NO: 1203) | cccaagcattaccgatgacgaattgaacaaagtcaaggccgcgcttgccagcaaattca |
| | | aggctgaaaagcgcggaggcaattcagacgaagcagcagagggtgaggaggcacaagcg |
| | | cagcccgaaagctcttctgctgtgagcgatggagcagaccggacgggtcaactggtctt |
| | | tttcccaccaccctttgctaaagaaattgctgagcttgtcgtagaactgcgtgggcgca |
| | | cccctccggcatacaaccggttcattgggaccaaagcaaagctctctaaagctgaagag |
| | | aaggctctagacaaaacggttgatgagtttgtccagcgagcttccgcggcgagcaagaa |
| | | gctcacggttgacatcggccttttcggcagaatgactaccagtgacctggtcgtgaacg |
| | | tggaagcagcctgtcaggtggcgcatgccattagcacgcatgagacgctaatcgagagc |
| | | gactacttcaccgcgatggatgaaaagaagcaggaattcgcatcaactcagaccgagaa |
| | | aacaggcgctgcctttctcggctctggcgataccgaaacgtttttcaattcagccgtct |
| | | actacaagtatctcaatctcgacatcgatgccttgaagaagcacctttcctggcaaagc |
| | | gataaggcagctcttgcagccggggtgcttgtccgcgccgcggcgctatccaatcccac |
| | | aggcaaacagaacagctttgccgcgcacggcgttcctgaacttatcctcgtcgaagtat |
| | | cggaagcaaagtgtccaatcagctatgcaaatgccttcctagaacccgttgacggtatt |
| | | aacctcatgcgtgaatcagcggcggcaatgagtaattacatcgacaccgtagtagcagc |
| | | cttctcgccgacagacatgagccgagcgctcctggcagtggggtctgcttcggtagata |
| | | tcgcaaaagctaaaagagttaacacactcgaagaccttatcaaatccgtggttaaactc |
| | | gtggagggtaccgcatga |
| | KOON_ | atgagcagtgaccacaatactttgtttctgcgcttggccggtcccatgcaggcgtgggg |
| | pfam09704 | cacctcatcccgttttcagttgcgccgcactgacctttacccgagcaagtccggcatac |
| | (SEQ ID | tgggaatgttgctctgtgccatgggtgttaatcgtgaagattcacggcagccgctcaag |
| | NO: 1204) | ctgctgacaccactactcatgggagtacgcgtcgaccggactggaaatcttgattggga |
| | Cas5 | ttaccagacagcgggagccaagttaggcattcgaagcgccgacggcaaaatcaagataa |
| | | ccgcatcgaccggcgaatacgaaaccttgctttcgcgccgtcaatatctttttgatgcc |
| | | tcatttctggttgcgttacatggcgattcaaccataatcgcctcttgcgccaacgccct |
| | | gagaaatccgacctggcctttgttccttggaagaaagtgctgcgtcccggccgagcctg |
| | | tttacgccggcaccgaaagttttgacacgctgacccaagcgctttcgtcggtcccctgg |
| | | cgccccagaatcaacgccattgaccgcgagggtagcggggcgtctgtaacactcgatac |
| | | atatttggagcagccgccagagagacttgtgcccatgggtgcccggctcgtttccgatg |
| | | tgcccgtagccttcggtttctataattatgctccgcgtttggttatcaagaatcaggtt |
| | | acggtgccaatgggacaggcaacccaaacacagcgactgagcgcacgtcatggcaaccc |
| | | ttacagtgaacacttctatacagtcgcgaggccgagtcgtctgaaacttgataacggcc |
| | | tttgcgtcttctgcaagtcccctgctgtggaagtgcatcatgtgtcctacgaaaatgcc |
| | | ggacacgagaccgactctgatctccggtcgttatgcaagacctgtcacgatgcgtgtac |
| | | gatgctggaatacggtcatggccgaaaagaaagagttgacccttgcaacccggctcaac |
| | | gcacgaccattctcgaacaaatcaatcgtaatctcaaagagcaacatcctggccggcgg |
| | | cgcgaattgcttaaagctgtgcggtcgacctga |
| | KOON_ | atgtttctttctcttcttaaagttgacttggacattgcccccggacggctctggctccg |
| | pfam08798 | taacctttaccgcgttcatcagcgcctgtgcatggcgtttccatcctccgcgcgcaaag |
| | Cas6 | agggcgaccctccgttcttggaaccctttcgtcctgatgacttccagcatgttcacggc |
| | (SEQ ID | ccgcgcacggaggaacaagcatttcttttccgcattgaccctctacccggcgggaatgc |
| | NO: 1205) | tgcgattgtgatgcaatctggaatgaagccggactgggactatgcctttaacaacgctg |
| | | gctatcttcttgccgcgccaccccagttgaagacttatgaaccacaattccagaaccag |
| | | cagcttctcaggttccgtctgctggcaaaccccacacggaagatagatacgaagacccg |
| | | ccaggatggcaccaaaagcaacggtaagcgagtccccgtggacaaggctaacctcgatg |
| | | aatggctcatccgccatgccgaaaagtccgggttcaccgtcgagcagttgctcaacgtg |
| | | caaacgggctacgtcggcgcttccaatggcaaagatgacgaactcaagcggttcttcta |
| | | cgcccgctacgacggcatactccgtgtggcggatgctgagcatctgcacgattccgtca |
| | | ttcagggcattggctccgccaaaggcttcggcttcgggctgctttctctagcgcgtatc |
| | | aaggagtag |
| | Cas1 | atgcgtacattacatgaattgccgcgtttccgtgatagatggagccacctctacatgga |
| | (SEQ ID | aatggggcggctggatgttgatgcgaatgggttggtattccagcagggtgagagcttcg |
| | NO: 1206) | tgcgggtgccaattgaccagttaagcatcattatgctgggacccggctccacggttact |
| | | catgcggcggtgaaatccctttcccagaataactgcttattatcatggacagggcagga |
| | | tggtattcggctctatgcggcaagcattggtggcacctacagcgcacggaggatgattc |
| | | gccaggcgaaactggttagtgacgaggagaaacgtctggaagttgcctggcgtatgtac |
| | | cgtttccgctttaaagaagcggttcctcaggtggttagtctggagcaaatccggggtat |
| | | ggaaggcatacgcgtgcgtcgcacctatgccgaggcttcagctaaatacggggtggaat |
| | | ggaaaggtcgccagtatgaccaggatgattggaacaaaggtgacccaatcaaccgcgct |
| | | ctatccgcggcgaacgcttgtctctatggagtttgtcacgcaggtattctttcagctgg |
| | | ctattcatccgctctgggatttgttcacacgggtaaaatgctaagcttcgtttatgaca |
| | | tcggagacctctacaaaaccgaggttacaatccctactgctttcaggatagctgctcaa |
| | | aatccaccggaattagaaagagtagtacgcatggagtgccgaaaggtgttccacgaatt |
| | | cagactgatggataggctcttgcctgacatcgcggaggtgctgggtgttagtgatgata |
| | | ctggagaaaacgccgacgagcttgaagggcgcattgtcacgctggctgttggaaccgaa |
| | | gacgggggtttttcttgggaacccgagcgcgagagttag |
| | Cas2 | gtgaaaaaggcaaaggataccggcgtggtaatgcaaatctggacagaccagaacccgca |
| | (SEQ ID | aggtttttcttaccggcaaactggtgaaagggatcggagatttattgacctggatggtc |
| | NO: 1207) | tggcattggttgagttcaaacgcgctcaagagattgtcaaaagcaatttttctgacact |
| | | agaacaccctag |
| c5eH_6- | KOON_ | gtgaaatacaacttgcttcaagaaccatggattccggtgcttcgtatggatggctccca |
| Draft_ | pfam09481 | gactcatgtcggcatacgtgatgccctggcaagatcggggctgctcttgagtctcggcg |
| 10005650_ | Cas8e | agcccagtgcgacggacaatctggctctgcttcgattgctgattgccgtcactctgtgg |
| organized | (SEQ ID | tgcaggtctgaacctggctcctcggagattgaagctctgcgggagtcgcgcggaatccc |
| | NO: 1208) | tgaaggctggcttgcacgtctggatgaagactcgggcgcatttgaactctttggagatg |
| | | gcccacggttctatcaagacgggagggtgaagtccgaggtgccgggcagaccggcgtcc |
| | | gaccttctctcatacttcccggcggcaactgaaatcaaccacttcagacacatccacga |
| | | cgacgatgtcgccatctgcccagcgtgttgtgccttggggctcatacgcctcccggtgc |
| | | ttgccattcagggcggcgctgggaagtcgccgtccatcaataatgcgcctcctgtctac |
| | | ttcatacggcgcggtagaacgctgttagacacactcatgttgaatatgcctcgtggcgg |
| | | gccggctgcggatgacagtcccgtgtggaagcccggcccaaggtcgagcagcgagatcg |
| | | gtacactcgaaggattcacgtggcaaccacgagctgtgtggttgggtccgacgagggcg |
| | | acctcagatagtcggtgcagcaactgtggaagaagcggccccgtcgtatcaagcctggt |
| | | attcgccaagggtcaggcaagaaaggatgacacacgctcatggagagacccgcacgttc |
| | | actacacgaaggagcgcacgggcaacgataacgcagatccagacgcccgcgataacgtt |
| | | ctgcgcgcatcgcatccgctcaagtacgcggccttggaggcgtccctctggaggaggac |
| | | agcctcagcgattatgttgtccgtcgaaccacatgagtgcggcacgttgccagccggcg |
| | | atagctacgacggaacaggaagcgacgcagtcgttgtcgagtgtattgcgccattcaca |
| | | tcccagggaaaggtcttcgatgagcaccggattgagtggcggataccacgcaaggttct |
| | | ccacgacgatgtcctgcgtcgctctgccttcgaggaactcgattggcttggccggttca |
| | | acttgaggaagctcctgggaagggcaagaggtgacggccgcatcaggaagcttgcggct |
| | | aggtgcctagtcaatcccctcatctgcgagacagagcgccgactgttcggttcattcgt |
| | | gactctgttgtggtcactggcgcaggagacttcgtcagagcagcgaggctcggtggaac |
| | | gctggcgacgagaagtacttgacgtgctcgcctcgatgattcagcttgcccttacaacc |
| | | tgtgaccccggatcggctctgaaacgcaggcagatgcaacttcgggcggtggaagcgct |
| | | ccggcatgacgccgggatgactgtcacatcgcgtgggcgcgcttccgtcagacacgagc |
| | | aagggcaattggagggagcgacaagatga |
| | KOON_ | atgaatccaaccgaggtctacgtgcggcgtcttctggctctaggggacggcgaacgagc |
| | pfam09485 | agaactccgtcacaaacagggtgcctctctcagtgagtccctggagggatttgatttgt |
| | Cse2 | tcaccggcctctggtggccattgcgacagcgcagtccggcagcaccgcagagagaaaca |
| | (SEQ ID | agttggctggcggcaaagctgatctgtcagtggccgattccgctcgcttcgtccgatga |
| | NO: 1209) | cagcgtgctacctcggttgctcggcagcgccgagcggcgactgtccgctcgctacgcac |
| | | ttcgtttcctgctgcggttcgataggctcttgcaatccccaatggctttgctggaaccg |
| | | cagcttcaatgggcattgaaggtggtggcacaggcggtagttgccggttcagccaaagg |
| | | gttgaactgggtgcagcttcttgatgacctcgcggtatgggacggaagacccggcaggg |
| | | aatcaaagcacaatgtgcgcgacgcatgggctcgcgcctatctggcgtctagaaacagg |
| | | gagggaaagcgatgttag |
| | KOON_ | atgttagtcgagattcacatgattcagaaccacagtccgtcgaacctgaaccgagatga |
| | pfam09344 | ccttggtgcccccaagagctgcacatttggtggcgtaactcgcgcgagaatttcaagcc |
| | Cas7 | agtgtctgaagcgcagtatccgcaacccaggaaattctaacgacgtacacaacaaaggg |
| | (SEQ ID | gcaagccttttcgtcgaagcgatgcgcgaacacacgggaatcaggacgaagtactttcc |
| | NO: 1210) | tgaaatggtgcggcaggcgctgaacgactcaagcgtaccagacgaggaatgggacagag |
| | | tcgtgcaggcttgcacgagtatcgccaagaaggaggtccagataggcgacgaggatgta |
| | | caggagcccggcgacagcgatgagcggcacaaactgccgcagctagtcctgttggagcg |
| | | tactgaggcaaatgcgtttgttcatgtgttggaggcgatgcgtaccagtgacgagtgga |
| | | gcgccagctaccgccagtggatcgcaggcaaactgcagaagcggcctctcgcagctttc |
| | | ctgcgtgaactctcgcgcgcctattcgagacgatcagtggacatcgccatgttcggacg |
| | | catgactacttccgatgcgttcgaggacgtcgaagccgcaatgcaggtagctcacgcca |
| | | tatcaacccatcaggcggtttcggatgtggactacttcacggctgtggacgacctgggc |
| | | gagttgggcggtggtgcaggccacgttgacgaggccatgttcaattccgcctgcttcta |
| | | caagtacttcgctctagactgggaccaactcatcagtaacctcggtggctcttcctctt |
| | | ccgcactcgcagcgtccgcactgggccatttcattcgtgcggctgccatgacgacacca |
| | | accggcaagcagaactcattcgcagcccacaaccttccagacgggattctcgtagaagt |
| | | caagcggaccggcaaaatccctgtcaactacgccaacgcgtttgtcgagcctgtcgcaa |
| | | tgaatgctccgcggggagtcgtgggtatgagcatcgctcaactgggccaatacgttcat |
| | | cagattgcagagggttacggcattgactctcgtcgcttctggttctcaccgggggggcg |
| | | ctatcaattgacatggattgagcgctgtcagaaaggagagccgaccgagcgggaagttg |
| | | ttgcaggtgaagattcgcacgcgagattcgacgacttcgtgagtgtggttgtgcaagag |
| | | gtttctggcctcgaatggaacagggtgaaggatccggacggtttcttgccggaggcgac |
| | | atag |
| | Cas1 | atgcgcacgctcttcgaccttccacggttccaggatcgctggagctacgtgtacctcga |
| | (SEQ ID | gacggggcgactcgatgtagatgatctcggcctgtgcttccgccaggacacccgaacaa |
| | NO: 1211) | cgcgagtgcccatcgaccagctctcggtgttgatgctcggacccggcactacggtgaca |
| | | cacgctgcggtagcggcgctctcgcggaacaactgtctcctggcgtggacagggcagga |
| | | tggcacgcgactgtatgccgccagtacaggtggaacacacagcgccaaaaggctcatca |
| | | ggcaggcgtcgctggtgagcgacgatgaatcccgcctgcatattgcctggcgcatgtac |
| | | cgtttcagattcgcggaatccgtaccagacgtcgtgagtctggagagcataagagggat |
| | | ggagggcctacgtgtgcgcaaagcatacgccgacgccgcccgcgcatatggcatcgact |
| | | ggaagggcaggcgatacaaccagggcaactgggaagctgcggacccggtcaatcgtgcg |
| | | ctatctgctgcaaacgcctgcttgtacggtgtgtgtcacgccgcgatcctctcggccgg |
| | | atactctccgggactcggtttcatccacacgggcaagatgctcagcttcgtctacgaca |
| | | tagcagacctgtacaagacaactctcacgattccgctggcctttcaaaccgcggccgag |
| | | atgcccgagagtatcgaacgcggcacgcgaatgcgttgccgtacggcgttccacgaatt |
| | | cagactcatggagagacttctgccagatatcgcggaggtgcttggtgttggtaatgatg |
| | | ctggggagagtgccgacgaacttgaggggcgcattgtcgcgatggctcctggagccggc |
| | | gactggaacctttcttgggaacccgagtgggcgagtgagggacgagttgtggatgaagg |
| | | ccgtcaagacaacgaaggagaccgggtgggtgctgcagatatggtcagacaggaatcca |
| | | caggggttctcctatcgtcagcacggcatccaaacgaggcaactggtggacttcgaggg |
| | | tctggcgctggtgacagtctctcctcaaccgcggactgttcaggatag |
| | Cas2 | atgatgctggggagagtgccgacgaacttgaggggcgcattgtcgcgatggctcctgga |
| | (SEQ ID | gccggcgactggaacctttcttgggaacccgagtgggcgagtgagggacgagttgtgga |
| | NO: 1212) | tgaaggccgtcaagacaacgaaggagaccgggtgggtgctgcagatatggtcagacagg |
| | | aatccacaggggttctcctatcgtcagcacggcatccaaacgaggcaactggtggactt |
| | | cgagggtctggcgctggtgacagtctctcctcaaccgcggactgttcaggatagcgaca |
| | | ctgaaacccgttga |

### Crispr-Cas Systems in General

[0070] In general, a Cas protein (used interchangeably herein with CRISPR protein, CRISPR enzyme, CRISPR-Cas protein, CRISPR-Cas enzyme, Cas, or CRISPR effector) and/or a guide sequence is a component of a CRISPR-Cas system. A CRISPR-Cas system or CRISPR system refers collectively to transcripts and other elements involved in the expression of or directing the activity of CRISPR-associated (“Cas”) genes, including sequences encoding a Cas gene, a tracr (trans-activating CRISPR) sequence (e.g. tracrRNA or an active partial tracrRNA), a tracr-mate sequence (encompassing a “direct repeat” and a tracrRNA-processed partial direct repeat in the context of an endogenous CRISPR system), a guide sequence (also referred to as a “spacer” in the context of an endogenous CRISPR system), or “RNA(s)” as that term is herein used (e.g., RNA(s) to guide Cas, e.g. CRISPR RNA and transactivating (tracr) RNA or a single guide RNA (sgRNA) (chimeric RNA)) or other sequences and transcripts from a CRISPR locus. In general, a CRISPR system is characterized by elements that promote the formation of a CRISPR complex at the site of a target sequence (also referred to as a protospacer in the context of an endogenous CRISPR system). In an engineered system of the invention, the direct repeat may encompass naturally occurring sequences or non-naturally occurring sequences. The direct repeat of the invention is not limited to naturally occurring lengths and sequences. A direct repeat can be 36 nucleotides (nt) in length, but a longer or shorter direct repeat can vary. For example, a direct repeat can be 20nt or longer, such as 30-100 nt or longer. For example, a direct repeat can be, 20nt, 30 nt, 40nt, 50nt, 60nt, 70nt, 70nt, 80nt, 90nt, 100nt or longer in length. In some embodiments, a direct repeat of the invention can include synthetic nucleotide sequences inserted between the 5′ and 3′ ends of naturally occurring direct repeats. In certain embodiments, the inserted sequence may be self-complementary, for example, 20%, 30%, 40%, 50%, 60%, 70%, 80%, 90%, or 100% self-complementary. Furthermore, a direct repeat of the invention may include insertions of nucleotides such as an aptamer or sequences that bind to an adapter protein (for association with functional domains). In certain embodiments, one end of a direct repeat containing such an insertion is roughly the first half of a short DR and the end is roughly the second half of the short DR.

[0071] In the context of formation of a CRISPR complex, “target sequence” refers to a sequence to which a guide sequence is designed to have complementarity, where hybridization between a target sequence and a guide sequence promotes the formation of a CRISPR complex. A target sequence may comprise any polynucleotide, such as DNA or RNA polynucleotides. In some embodiments, a target sequence is located in the nucleus or cytoplasm of a cell. In some embodiments, direct repeats may be identified in silico by searching for repetitive motifs that fulfill any or all of the following criteria: 1. found in a 2Kb window of genomic sequence flanking the type II CRISPR locus; 2. span from 20 to 50 bp; and 3. interspaced by 20 to 50 bp. In some embodiments, 2 of these criteria may be used, for instance 1 and 2, 2 and 3, or 1 and 3. In some embodiments, all 3 criteria may be used.

[0072] In general, a guide sequence (or spacer sequence) may be any polynucleotide sequence having sufficient complementarity with a target polynucleotide sequence to hybridize with the target sequence and direct sequence-specific binding of a CRISPR complex to the target sequence. In some embodiments, the degree of complementarity between a guide sequence and its corresponding target sequence, when optimally aligned using a suitable alignment algorithm, is about or more than about 50%, 60%, 75%, 80%, 85%, 90%, 95%, 97.5%, 99%, or more. Optimal alignment may be determined with the use of any suitable algorithm for aligning sequences, non-limiting example of which include the Smith-Waterman algorithm, the Needleman-Wunsch algorithm, algorithms based on the Burrows-Wheeler Transform (e.g. the Burrows Wheeler Aligner), ClustalW, Clustal X, BLAT, Novoalign (Novocraft Technologies; available at www.novocraft.com), ELAND (Illumina, San Diego, Calif.), SOAP (available at soap.genomics.org.cn), and Maq (available at maq.sourceforge.net). In some embodiments, a guide sequence (or spacer sequence) is about or more than about 5, 10, 11, 12, 13, 14, 15, 16, 17, 18, 19, 20, 21, 22, 23, 24, 25, 26, 27, 28, 29, 30, 35, 40, 45, 50, 75, or more nucleotides in length. In some embodiments, a guide sequence is less than about 75, 50, 45, 40, 35, 30, 25, 20, 15, 12, or fewer nucleotides in length. Preferably the guide sequence is 10-40 nucleotides long, such as 20-30 or 20-40 nucleotides long or longer, such as 30 nucleotides long or about 30 nucleotides long.

[0073] In certain embodiments, the guide sequence is 10-30 nucleotides long, such as 20-30 nucleotides long, such as 30 nucleotides long. The ability of a guide sequence to direct sequence-specific binding of a CRISPR complex to a target sequence may be assessed by any suitable assay. For example, the components of a CRISPR system sufficient to form a CRISPR complex, including the guide sequence to be tested, may be provided to a host cell having the corresponding target sequence, such as by transfection with vectors encoding the components of the CRISPR sequence, followed by an assessment of preferential cleavage within the target sequence, such as by Surveyor assay as described herein. Similarly, cleavage of a target polynucleotide sequence may be evaluated in a test tube by providing the target sequence, components of a CRISPR complex, including the guide sequence to be tested and a control guide sequence different from the test guide sequence, and comparing binding or rate of cleavage at the target sequence between the test and control guide sequence reactions. Other assays are possible, and will occur to those skilled in the art.

[0074] In some CRISPR-Cas systems, the degree of complementarity between a guide sequence and its corresponding target sequence can be about or more than about 50%, 60%, 75%, 80%, 85%, 90%, 95%, 97.5%, 99%, or 100%; a guide or RNA or crRNA can be about or more than about 5, 10, 11, 12, 13, 14, 15, 16, 17, 18, 19, 20, 21, 22, 23, 24, 25, 26, 27, 28, 29, 30, 35, 40, 45, 50, 75, or more nucleotides in length; or guide or RNA or crRNA can be less than about 75, 50, 45, 40, 35, 30, 25, 20, 15, 12, or fewer nucleotides in length; and advantageously tracr RNA is 30 or 50 nucleotides in length. However, an aspect of the invention is to reduce off-target interactions, e.g., reduce the guide interacting with a target sequence having low complementarity. Indeed, in the examples, it is shown that the invention involves mutations that result in the CRISPR-Cas system being able to distinguish between target and off-target sequences that have greater than 80% to about 95% complementarity, e.g., 83%-84% or 88-89% or 94-95% complementarity (for instance, distinguishing between a target having 18 nucleotides from an off-target of 18 nucleotides having 1, 2 or 3 mismatches). Accordingly, in the context of the present invention the degree of complementarity between a guide sequence and its corresponding target sequence is greater than 94.5% or 95% or 95.5% or 96% or 96.5% or 97% or 97.5% or 98% or 98.5% or 99% or 99.5% or 99.9%, or 100%. Off target is less than 100% or 99.9% or 99.5% or 99% or 99% or 98.5% or 98% or 97.5% or 97% or 96.5% or 96% or 95.5% or 95% or 94.5% or 94% or 93% or 92% or 91% or 90% or 89% or 88% or 87% or 86% or 85% or 84% or 83% or 82% or 81% or 80% complementarity between the sequence and the guide, with it advantageous that off target is 100% or 99.9% or 99.5% or 99% or 99% or 98.5% or 98% or 97.5% or 97% or 96.5% or 96% or 95.5% or 95% or 94.5% complementarity between the sequence and the guide.

[0075] In certain embodiments, modulations of cleavage efficiency can be exploited by introduction of mismatches, e.g., 1 or more mismatches, such as 1 or 2 mismatches between spacer sequence and target sequence, including the position of the mismatch along the spacer/target. The more central (i.e., not 3′ or 5′) for instance a double mismatch is, the more cleavage efficiency is affected. Accordingly, by choosing mismatch position along the spacer, cleavage efficiency can be modulated. By means of example, if less than 100% cleavage of targets is desired (e.g., in a cell population), 1 or more, such as preferably 2 mismatches between spacer and target sequence may be introduced in the spacer sequences. The more central along the spacer of the mismatch position, the lower the cleavage percentage.

[0076] A CRISPR-Cas system or components thereof may be used for introducing one or more mutations in a target locus or nucleic acid sequence. The mutation(s) can include the introduction, deletion, or substitution of one or more nucleotides at each target sequence of cell(s) via the guide(s) RNA(s) or sgRNA(s). The mutations can include the introduction, deletion, or substitution of 1-75 nucleotides at each target sequence of said cell(s) via the guide(s) RNA(s). The mutations can include the introduction, deletion, or substitution of 1, 5, 10, 11, 12, 13, 14, 15, 16, 17, 18, 19, 20, 21, 22, 23, 24, 25, 26, 27, 28, 29, 30, 35, 40, 45, 50, or 75 nucleotides at each target sequence of said cell(s) via the guide(s) RNA(s). The mutations can include the introduction, deletion, or substitution of 5, 10, 11, 12, 13, 14, 15, 16, 17, 18, 19, 20, 21, 22, 23, 24, 25, 26, 27, 28, 29, 30, 35, 40, 45, 50, or 75 nucleotides at each target sequence of said cell(s) via the guide(s) RNA(s). The mutations include the introduction, deletion, or substitution of 10, 11, 12, 13, 14, 15, 16, 17, 18, 19, 20, 21, 22, 23, 24, 25, 26, 27, 28, 29, 30, 35, 40, 45, 50, or 75 nucleotides at each target sequence of said cell(s) via the guide(s) RNA(s). The mutations can include the introduction, deletion, or substitution of 20, 21, 22, 23, 24, 25, 26, 27, 28, 29, 30, 35, 40, 45, 50, or 75 nucleotides at each target sequence of said cell(s) via the guide(s) RNA(s). The mutations can include the introduction, deletion, or substitution of 40, 45, 50, 75, 100, 200, 300, 400 or 500 nucleotides at each target sequence of said cell(s) via the guide(s) RNA(s).

[0077] Typically, in the context of an endogenous CRISPR-Cas system, formation of a CRISPR complex (comprising a guide sequence hybridized to a target sequence and complexed with one or more Cas proteins) results in cleavage in or near (e.g. within 1, 2, 3, 4, 5, 6, 7, 8, 9, 10, 20, 50, or more base pairs from) the target sequence, but may depend on for instance secondary structure, in particular in the case of RNA targets. In some cases, in the context of an endogenous CRISPR system, formation of a CRISPR complex (comprising a guide sequence hybridized to a target sequence and complexed with one or more Cas proteins) results in cleavage of one or both strands (if applicable) in or near (e.g., within 1, 2, 3, 4, 5, 6, 7, 8, 9, 10, 20, 50, or more base pairs from) the target sequence.

[0078] In particularly preferred embodiments according to the invention, the guide RNA (capable of guiding Cas to a target locus) may comprise (1) a guide sequence capable of hybridizing to a target locus (a polynucleotide target locus, such as an RNA target locus) in the eukaryotic cell; (2) a direct repeat (DR) sequence) which reside in a single RNA, i.e., an sgRNA (arranged in a 5′ to 3′ orientation) or crRNA.

[0079] With respect to general information on CRISPR-Cas Systems, components thereof, and delivery of such components, including methods, materials, delivery vehicles, vectors, particles, AAV, and making and using thereof, including as to amounts and formulations, all useful in the practice of the instant invention, reference is made to: U.S. Pat. Nos. 8,999,641, 8,993,233, 8,945,839, 8,932,814, 8,906,616, 8,895,308, 8,889,418, 8,889,356, 8,871,445, 8,865,406, 8,795,965, 8,771,945 and 8,697,359; US Patent Publications US 2014-0310830 (U.S. application Ser. No. 14/105,031), US 2014-0287938 A1 (U.S. application Ser. No. 14/213,991), US 2014-0273234 A1 (U.S. application Ser. No. 14/293,674), US2014-0273232 A1 (U.S. application Ser. No. 14/290,575), US 2014-0273231 (U.S. application Ser. No. 14/259,420), US 2014-0256046 A1 (U.S. application Ser. No. 14/226,274), US 2014-0248702 A1 (U.S. application Ser. No. 14/258,458), US 2014-0242700 A1 (U.S. application Ser. No. 14/222,930), US 2014-0242699 A1 (U.S. application Ser. No. 14/183,512), US 2014-0242664 A1 (U.S. application Ser. No. 14/104,990), US 2014-0234972 A1 (U.S. application Ser. No. 14/183,471), US 2014-0227787 A1 (U.S. application Ser. No. 14/256,912), US 2014-0189896 A1 (U.S. application Ser. No. 14/105,035), US 2014-0186958 (U.S. application Ser. No. 14/105,017), US 2014-0186919 A1 (U.S. application Ser. No. 14/104,977), US 2014-0186843 A1 (U.S. application Ser. No. 14/104,900), US 2014-0179770 A1 (U.S. application Ser. No. 14/104,837) and US 2014-0179006 A1 (U.S. application Ser. No. 14/183,486), US 2014-0170753 (U.S. application Ser. No. 14/183,429); European Patents EP 2 784 162 B1 and EP 2 771 468 B1; European Patent Applications EP 2 771 468 (EP13818570.7), EP 2 764 103 (EP13824232.6), and EP 2 784 162 (EP14170383.5); and PCT Patent Publications PCT Patent Publications WO 2014/093661 (PCT/US2013/074743), WO 2014/093694 (PCT/US2013/074790), WO 2014/093595 (PCT/US2013/074611), WO 2014/093718 (PCT/US2013/074825), WO 2014/093709 (PCT/US2013/074812), WO 2014/093622 (PCT/US2013/074667), WO 2014/093635 (PCT/US2013/074691), WO 2014/093655 (PCT/US2013/074736), WO 2014/093712 (PCT/US2013/074819), WO 2014/093701 (PCT/US2013/074800), WO 2014/018423 (PCT/US2013/051418), WO 2014/204723 (PCT/US2014/041790), WO 2014/204724 (PCT/US2014/041800), WO 2014/204725 (PCT/US2014/041803), WO 2014/204726 (PCT/US2014/041804), WO 2014/204727 (PCT/US2014/041806), WO 2014/204728 (PCT/US2014/041808), WO 2014/204729 (PCT/US2014/041809). Reference is also made to U.S. provisional patent applications 61/758,468; 61/802,174; 61/806,375; 61/814,263; 61/819,803 and 61/828,130, filed on Jan. 30, 2013; Mar. 15, 2013; Mar. 28, 2013; Apr. 20, 2013; May 6, 2013 and May 28, 2013 respectively. Reference is also made to U.S. provisional patent application 61/836,123, filed on Jun. 17, 2013. Reference is additionally made to U.S. provisional patent applications 61/835,931, 61/835,936, 61/836,127, 61/836,101, 61/836,080 and 61/835,973, each filed Jun. 17, 2013. Further reference is made to U.S. provisional patent applications 61/862,468 and 61/862,355 filed on Aug. 5, 2013; 61/871,301 filed on Aug. 28, 2013; 61/960,777 filed on Sep. 25, 2013 and 61/961,980 filed on Oct. 28, 2013. Reference is yet further made to: PCT Patent applications Nos: PCT/US2014/041803, PCT/US2014/041800, PCT/US2014/041809, PCT/US2014/041804 and PCT/US2014/041806, each filed Jun. 10, 2014 Jun. 10, 2014; PCT/US2014/041808 filed Jun. 11, 2014; and PCT/US2014/62558 filed Oct. 28, 2014, and U.S. Provisional Patent Applications Ser. Nos. 61/915,150, 61/915,301, 61/915,267 and 61/915,260, each filed Dec. 12, 2013; 61/757,972 and 61/768,959, filed on Jan. 29, 2013 and Feb. 25, 2013; 61/835,936, 61/836,127, 61/836,101, 61/836,080, 61/835,973, and 61/835,931, filed Jun. 17, 2013; 62/010,888 and 62/010,879, both filed Jun. 11, 2014; 62/010,329 and 62/010,441, each filed Jun. 10, 2014; 61/939,228 and 61/939,242, each filed Feb. 12, 2014; 61/980,012, filed Apr. 15, 2014; 62/038,358, filed Aug. 17, 2014; 62/054,490, 62/055,484, 62/055,460 and 62/055,487, each filed Sep. 25, 2014; and 62/069,243, filed Oct. 27, 2014. Reference is also made to U.S. provisional patent applications Nos. 62/055,484, 62/055,460, and 62/055,487, filed Sep. 25, 2014; U.S. provisional patent application 61/980,012, filed Apr. 15, 2014; and U.S. provisional patent application 61/939,242 filed Feb. 12, 2014. Reference is made to PCT application designating, inter alia, the United States, application No. PCT/US14/41806, filed Jun. 10, 2014. Reference is made to U.S. provisional patent application 61/930,214 filed on Jan. 22, 2014. Reference is made to U.S. provisional patent applications 61/915,251; 61/915,260 and 61/915,267, each filed on Dec. 12, 2013. Reference is made to US provisional patent application U.S. Ser. No. 61/980,012 filed Apr. 15, 2014. Reference is made to PCT application designating, inter alia, the United States, application No. PCT/US14/41806, filed Jun. 10, 2014. Reference is made to U.S. provisional patent application 61/930,214 filed on Jan. 22, 2014. Reference is made to U.S. provisional patent applications 61/915,251; 61/915,260 and 61/915,267, each filed on Dec. 12, 2013.

[0080] Mention is also made of U.S. application 62/091,455, filed, 12 Dec. 14, PROTECTED GUIDE RNAS (PGRNAS); U.S. application 62/096,708, 24 Dec. 14, PROTECTED GUIDE RNAS (PGRNAS); U.S. application 62/091,462, 12 Dec. 14, DEAD GUIDES FOR CRISPR TRANSCRIPTION FACTORS; U.S. application 62/096,324, 23-Dec-14, DEAD GUIDES FOR CRISPR TRANSCRIPTION FACTORS; U.S. application 62/091,456, 12 Dec. 14, ESCORTED AND FUNCTIONALIZED GUIDES FOR CRISPR-CAS SYSTEMS; U.S. application 62/091,461, 12 Dec. 14, DELIVERY, USE AND THERAPEUTIC APPLICATIONS OF THE CRISPR-CAS SYSTEMS AND COMPOSITIONS FOR GENOME EDITING AS TO HEMATOPOIETIC STEM CELLS (HSCs); U.S. application 62/094,903, 19 Dec. 14, UNBIASED IDENTIFICATION OF DOUBLE-STRAND BREAKS AND GENOMIC REARRANGEMENT BY GENOME-WISE INSERT CAPTURE SEQUENCING; U.S. application 62/096,761, 24 Dec. 14, ENGINEERING OF SYSTEMS, METHODS AND OPTIMIZED ENZYME AND GUIDE SCAFFOLDS FOR SEQUENCE MANIPULATION; U.S. application 62/098,059, 30 Dec. 14, RNA-TARGETING SYSTEM; U.S. application 62/096,656, 24 Dec. 14, CRISPR HAVING OR ASSOCIATED WITH DESTABILIZATION DOMAINS; U.S. application 62/096,697, 24 Dec. 14, CRISPR HAVING OR ASSOCIATED WITH AAV; U.S. application 62/098,158, 30 Dec. 14, ENGINEERED CRISPR COMPLEX INSERTIONAL TARGETING SYSTEMS; U.S. application 62/151,052, 22 Apr. 15, CELLULAR TARGETING FOR EXTRACELLULAR EXOSOMAL REPORTING; U.S. application 62/054,490, 24 Sep. 14, DELIVERY, USE AND THERAPEUTIC APPLICATIONS OF THE CRISPR-CAS SYSTEMS AND COMPOSITIONS FOR TARGETING DISORDERS AND DISEASES USING PARTICLE DELIVERY COMPONENTS; U.S. application 62/055,484, 25 Sep. 14, SYSTEMS, METHODS AND COMPOSITIONS FOR SEQUENCE MANIPULATION WITH OPTIMIZED FUNCTIONAL CRISPR-CAS SYSTEMS; U.S. application 62/087,537, 4 Dec. 14, SYSTEMS, METHODS AND COMPOSITIONS FOR SEQUENCE MANIPULATION WITH OPTIMIZED FUNCTIONAL CRISPR-CAS SYSTEMS; U.S. application 62/054,651, 24 Sep. 14, DELIVERY, USE AND THERAPEUTIC APPLICATIONS OF THE CRISPR-CAS SYSTEMS AND COMPOSITIONS FOR MODELING COMPETITION OF MULTIPLE CANCER MUTATIONS IN VIVO; U.S. application 62/067,886, 23-Oct-14, DELIVERY, USE AND THERAPEUTIC APPLICATIONS OF THE CRISPR-CAS SYSTEMS AND COMPOSITIONS FOR MODELING COMPETITION OF MULTIPLE CANCER MUTATIONS IN VIVO; U.S. application 62/054,675, 24 Sep. 14, DELIVERY, USE AND THERAPEUTIC APPLICATIONS OF THE CRISPR-CAS SYSTEMS AND COMPOSITIONS IN NEURONAL CELLS/TISSUES; U.S. application 62/054,528, 24 Sep. 14, DELIVERY, USE AND THERAPEUTIC APPLICATIONS OF THE CRISPR-CAS SYSTEMS AND COMPOSITIONS IN IMMUNE DISEASES OR DISORDERS; U.S. application 62/055,454, 25 Sep. 14, DELIVERY, USE AND THERAPEUTIC APPLICATIONS OF THE CRISPR-CAS SYSTEMS AND COMPOSITIONS FOR TARGETING DISORDERS AND DISEASES USING CELL PENETRATION PEPTIDES (CPP); U.S. application 62/055,460, 25 Sep. 14, MULTIFUNCTIONAL-CRISPR COMPLEXES AND/OR OPTIMIZED ENZYME LINKED FUNCTIONAL-CRISPR COMPLEXES; U.S. application 62/087,475, 4 Dec. 14, FUNCTIONAL SCREENING WITH OPTIMIZED FUNCTIONAL CRISPR-CAS SYSTEMS; U.S. application 62/055,487, 25 Sep. 14, FUNCTIONAL SCREENING WITH OPTIMIZED FUNCTIONAL CRISPR-CAS SYSTEMS; U.S. application 62/087,546, 4 Dec. 14, MULTIFUNCTIONAL CRISPR COMPLEXES AND/OR OPTIMIZED ENZYME LINKED FUNCTIONAL-CRISPR COMPLEXES; and U.S. application 62/098,285, 30 Dec. 14, CRISPR MEDIATED IN VIVO MODELING AND GENETIC SCREENING OF TUMOR GROWTH AND METASTASIS.

[0081] The systems may comprise templates. Delivery of templates may be via the cotemporaneous or separate from delivery of any or all the Cas protein or guide or crRNA and via the same delivery mechanism or different.

[0082] In certain embodiments, the methods as described herein may comprise providing a Cas transgenic cell in which one or more nucleic acids encoding one or more guide RNAs are provided or introduced operably connected in the cell with a regulatory element comprising a promoter of one or more gene of interest. As used herein, the term “Cas transgenic cell” refers to a cell, such as a eukaryotic cell, in which a Cas gene has been genomically integrated. The nature, type, or origin of the cell are not particularly limiting according to the present invention. Also, the way how the Cas transgene is introduced in the cell is may vary and can be any method as is known in the art. In certain embodiments, the Cas transgenic cell is obtained by introducing the Cas transgene in an isolated cell. In certain other embodiments, the Cas transgenic cell is obtained by isolating cells from a Cas transgenic organism. By means of example, and without limitation, the Cas transgenic cell as referred to herein may be derived from a Cas transgenic eukaryote, such as a Cas knock-in eukaryote. Reference is made to WO 2014/093622 (PCT/US13/74667), incorporated herein by reference. Methods of US Patent Publication Nos. 20120017290 and 20110265198 assigned to Sangamo BioSciences, Inc. directed to targeting the Rosa locus may be modified to utilize the CRISPR Cas system of the present invention. Methods of US Patent Publication No. 20130236946 assigned to Cellectis directed to targeting the Rosa locus may also be modified to utilize the CRISPR Cas system of the present invention. By means of further example reference is made to Platt et. al. (Cell; 159(2):440-455 (2014)), describing a Cas9 knock-in mouse, which is incorporated herein by reference. The Cas transgene can further comprise a Lox-Stop-polyA-Lox(LSL) cassette thereby rendering Cas expression inducible by Cre recombinase. Alternatively, the Cas transgenic cell may be obtained by introducing the Cas transgene in an isolated cell. Delivery systems for transgenes are well known in the art. By means of example, the Cas transgene may be delivered in for instance eukaryotic cell by means of vector (e.g., AAV, adenovirus, lentivirus) and/or particle and/or particle delivery, as also described herein elsewhere.

[0083] It will be understood by the skilled person that the cell, such as the Cas transgenic cell, as referred to herein may comprise further genomic alterations besides having an integrated Cas gene or the mutations arising from the sequence specific action of Cas when complexed with RNA capable of guiding Cas to a target locus, such as for instance one or more oncogenic mutations, as for instance and without limitation described in Platt et al. (2014), Chen et al., (2014) or Kumar et al. (2009).

[0084] The nucleic acid molecule encoding a Cas may be codon optimized. An example of a codon-optimized sequence, is in this instance a sequence optimized for expression in a eukaryote, e.g., humans (i.e. being optimized for expression in humans), or for another eukaryote, animal or mammal as herein discussed; see, e.g., SaCas9 human codon optimized sequence in WO 2014/093622 (PCT/US2013/074667). Whilst this is preferred, it will be appreciated that other examples are possible and codon optimization for a host species other than human, or for codon optimization for specific organs is known. In some embodiments, an enzyme coding sequence encoding a Cas is codon optimized for expression in particular cells, such as eukaryotic cells. The eukaryotic cells may be those of or derived from a particular organism, such as a mammal, including but not limited to human, or non-human eukaryote or animal or mammal as herein discussed, e.g., mouse, rat, rabbit, dog, livestock, or non-human mammal or primate. In some embodiments, processes for modifying the germ line genetic identity of human beings and/or processes for modifying the genetic identity of animals which are likely to cause them suffering without any substantial medical benefit to man or animal, and also animals resulting from such processes, may be excluded. In general, codon optimization refers to a process of modifying a nucleic acid sequence for enhanced expression in the host cells of interest by replacing at least one codon (e.g. about or more than about 1, 2, 3, 4, 5, 10, 15, 20, 25, 50, or more codons) of the native sequence with codons that are more frequently or most frequently used in the genes of that host cell while maintaining the native amino acid sequence. Various species exhibit particular bias for certain codons of a particular amino acid. Codon bias (differences in codon usage between organisms) often correlates with the efficiency of translation of messenger RNA (mRNA), which is in turn believed to be dependent on, among other things, the properties of the codons being translated and the availability of particular transfer RNA (tRNA) molecules. The predominance of selected tRNAs in a cell is generally a reflection of the codons used most frequently in peptide synthesis. Accordingly, genes can be tailored for optimal gene expression in a given organism based on codon optimization. Codon usage tables are readily available, for example, at the “Codon Usage Database” available at kazusa.orjp/codon/and these tables can be adapted in a number of ways. See Nakamura, Y., et al. “Codon usage tabulated from the international DNA sequence databases: status for the year 2000” Nucl. Acids Res. 28:292 (2000). Computer algorithms for codon optimizing a particular sequence for expression in a particular host cell are also available, such as Gene Forge (Aptagen; Jacobus, P A), are also available. In some embodiments, one or more codons (e.g., 1, 2, 3, 4, 5, 10, 15, 20, 25, 50, or more, or all codons) in a sequence encoding a Cas correspond to the most frequently used codon for a particular amino acid.

[0085] In some embodiments, the Cas proteins may have nucleic acid cleavage activity. The Cas proteins may have RNA binding and DNA cleaving function. In some embodiments, Cas may direct cleavage of one or two nucleic acid strands at the location of or near a target sequence, such as within the target sequence and/or within the complement of the target sequence or at sequences associated with the target sequence, e.g., within about 1, 2, 3, 4, 5, 6, 7, 8, 9, 10, 15, 20, 25, 50, 100, 200, 500, or more base pairs from the first or last nucleotide of a target sequence. In some embodiments, the Cas protein may direct more than one cleavage (such as one, two three, four, five, or more cleavages) of one or two strands within the target sequence and/or within the complement of the target sequence or at sequences associated with the target sequence and/or within about 1, 2, 3, 4, 5, 6, 7, 8, 9, 10, 15, 20, 25, 50, 100, 200, 500, or more base pairs from the first or last nucleotide of a target sequence. In some embodiments, the cleavage may be blunt, i.e., generating blunt ends. In some embodiments, the cleavage may be staggered, i.e., generating sticky ends. In some embodiments, a vector encodes a nucleic acid-targeting Cas protein that may be mutated with respect to a corresponding wild-type enzyme such that the mutated nucleic acid-targeting Cas protein lacks the ability to cleave one or two strands of a target polynucleotide containing a target sequence, e.g., alteration or mutation in a HNH domain to produce a mutated Cas substantially lacking all DNA cleavage activity, e.g., the DNA cleavage activity of the mutated enzyme is about no more than 25%, 10%, 5%, 1%, 0.1%, 0.01%, or less of the nucleic acid cleavage activity of the non-mutated form of the enzyme; an example can be when the nucleic acid cleavage activity of the mutated form is nil or negligible as compared with the non-mutated form. By derived, Applicants mean that the derived enzyme is largely based, in the sense of having a high degree of sequence homology with, a wildtype enzyme, but that it has been mutated (modified) in some way as known in the art or as described herein.

[0086] Typically, in the context of an endogenous nucleic acid-targeting system, formation of a nucleic acid-targeting complex (comprising a guide RNA or crRNA hybridized to a target sequence and complexed with one or more nucleic acid-targeting effector proteins) results in cleavage of DNA strand(s) in or near (e.g., within 1, 2, 3, 4, 5, 6, 7, 8, 9, 10, 20, 50, or more base pairs from) the target sequence. As used herein the term “sequence(s) associated with a target locus of interest” refers to sequences near the vicinity of the target sequence (e.g., within 1, 2, 3, 4, 5, 6, 7, 8, 9, 10, 20, 50, or more base pairs from the target sequence, wherein the target sequence is comprised within a target locus of interest).

[0087] It will be appreciated that the effector protein is based on or derived from an enzyme, so the term ‘effector protein’ certainly includes ‘enzyme’ in some embodiments. However, it will also be appreciated that the effector protein may, as required in some embodiments, have DNA or RNA binding, but not necessarily cutting or nicking, activity, including a dead-Cas protein function.

[0088] In some embodiments, a Cas protein may form a component of an inducible system. The inducible nature of the system would allow for spatiotemporal control of gene editing or gene expression using a form of energy. The form of energy may include but is not limited to electromagnetic radiation, sound energy, chemical energy and thermal energy. Examples of inducible system include tetracycline inducible promoters (Tet-On or Tet-Off), small molecule two-hybrid transcription activations systems (FKBP, ABA, etc.), or light inducible systems (Phytochrome, LOV domains, or cryptochrome). In one embodiment, the CRISPR effector protein may be a part of a Light Inducible Transcriptional Effector (LITE) to direct changes in transcriptional activity in a sequence-specific manner. The components of a light may include a CRISPR effector protein, a light-responsive cytochrome heterodimer (e.g. from Arabidopsis thaliana), and a transcriptional activation/repression domain. Further examples of inducible DNA binding proteins and methods for their use are provided in U.S. 61/736,465 and U.S. 61/721,283, and WO 2014018423 A2 which is hereby incorporated by reference in its entirety.

[0089] In one aspect, the invention provides a mutated Cas as described herein elsewhere, having one or more mutations resulting in reduced off-target effects, e.g., improved CRISPR enzymes for use in effecting modifications to target loci but which reduce or eliminate activity towards off-targets, such as when complexed to guide RNAs, as well as improved CRISPR enzymes for increasing the activity of CRISPR enzymes, such as when complexed with guide RNAs. It is to be understood that mutated enzymes as described herein below may be used in any of the methods according to the invention as described herein elsewhere. Any of the methods, products, compositions and uses as described herein elsewhere are equally applicable with the mutated CRISPR enzymes as further detailed below.

[0090] Slaymaker et al. recently described a method for the generation of Cas orthologues with enhanced specificity (Slaymaker et al. 2015 “Rationally engineered Cas nucleases with improved specificity”). This strategy can be used to enhance the specificity of the Cas protein. Primary residues for mutagenesis are preferably all positive charges residues within the HNH domain and/or DinG domain. Additional residues are positive charged residues that are conserved between different orthologues.

[0091] In an aspect, the invention also provides methods and mutations for modulating Cas binding activity and/or binding specificity. In certain embodiments Cas proteins lacking nuclease activity are used. In certain embodiments, modified guide RNAs are employed that promote binding but not nuclease activity of a Cas nuclease. In such embodiments, on-target binding can be increased or decreased. Also, in such embodiments off-target binding can be increased or decreased. Moreover, there can be increased or decreased specificity as to on-target binding vs. off-target binding.

[0092] The methods and mutations which can be employed in various combinations to increase or decrease activity and/or specificity of on-target vs. off-target activity, or increase or decrease binding and/or specificity of on-target vs. off-target binding, can be used to compensate or enhance mutations or modifications made to promote other effects. Such mutations or modifications made to promote other effects in include mutations or modification to the Cas and or mutation or modification made to a guide RNA. The methods and mutations of the invention are used to modulate Cas nuclease activity and/or binding with chemically modified guide RNAs.

[0093] In an aspect, the invention provides methods and mutations for modulating binding and/or binding specificity of Cas proteins according to the invention as defined herein comprising functional domains such as nucleases, transcriptional activators, transcriptional repressors, and the like. For example, a Cas protein can be made nuclease-null, or having altered or reduced nuclease activity by introducing mutations such as for instance Cas mutations described herein elsewhere. Nuclease deficient Cas proteins are useful for RNA-guided target sequence dependent delivery of functional domains. The invention provides methods and mutations for modulating binding of Cas proteins. In one embodiment, the functional domain comprises VP64, providing an RNA-guided transcription factor. In another embodiment, the functional domain comprises Fok I, providing an RNA-guided nuclease activity. Mention is made of U.S. Pat. Pub. 2014/0356959, U.S. Pat. Pub. 2014/0342456, U.S. Pat. Pub. 2015/0031132, and Mali, P. et al., 2013, Science 339(6121):823-6, doi: 10.1126/science.1232033, published online 3 Jan. 2013 and through the teachings herein the invention comprehends methods and materials of these documents applied in conjunction with the teachings herein. In certain embodiments, on-target binding is increased. In certain embodiments, off-target binding is decreased. In certain embodiments, on-target binding is decreased. In certain embodiments, off-target binding is increased. Accordingly, the invention also provides for increasing or decreasing specificity of on-target binding vs. off-target binding of functionalized Cas binding proteins.

[0094] The use of Cas as an RNA-guided binding protein is not limited to nuclease-null Cas. Cas enzymes comprising nuclease activity can also function as RNA-guided binding proteins when used with certain guide RNAs. For example, short guide RNAs and guide RNAs comprising nucleotides mismatched to the target can promote RNA directed Cas binding to a target sequence with little or no target cleavage. (See, e.g., Dahlman, 2015, Nat Biotechnol. 33(11):1159-1161, doi: 10.1038/nbt.3390, published online 5 Oct. 2015). In an aspect, the invention provides methods and mutations for modulating binding of Cas proteins that comprise nuclease activity. In certain embodiments, on-target binding is increased. In certain embodiments, off-target binding is decreased. In certain embodiments, on-target binding is decreased. In certain embodiments, off-target binding is increased. In certain embodiments, there is increased or decreased specificity of on-target binding vs. off-target binding. In certain embodiments, nuclease activity of guide RNA-Cas enzyme is also modulated.

[0095] RNA-RNA duplex formation is important for cleavage activity and specificity throughout the target region, not only the seed region sequence closest to the PAM. Thus, truncated guide RNAs show reduced cleavage activity and specificity. In an aspect, the invention provides method and mutations for increasing activity and specificity of cleavage using altered guide RNAs.

[0096] In certain embodiments, the catalytic activity of the Cas protein of the invention is altered or modified. It is to be understood that mutated Cas has an altered or modified catalytic activity if the catalytic activity is different than the catalytic activity of the corresponding wild type Cas protein (e.g., unmutated Cas protein). Catalytic activity can be determined by means known in the art. By means of example, and without limitation, catalytic activity can be determined in vitro or in vivo by determination of indel percentage (for instance after a given time, or at a given dose). In certain embodiments, catalytic activity is increased. In certain embodiments, catalytic activity is increased by at least 5%, preferably at least 10%, more preferably at least 20%, such as at least 30%, at least 40%, at least 50%, at least 60%, at least 70%, at least 80%, at least 90%, or at least 100%. In certain embodiments, catalytic activity is decreased. In certain embodiments, catalytic activity is decreased by at least 5%, preferably at least 10%, more preferably at least 20%, such as at least 30%, at least 40%, at least 50%, at least 60%, at least 70%, at least 80%, at least 90%, or (substantially) 100%. The one or more mutations herein may inactivate the catalytic activity, which may substantially all catalytic activity, below detectable levels, or no measurable catalytic activity.

[0097] One or more characteristics of the engineered Cas protein may be different from a corresponding wiled type Cas protein. Examples of such characteristics include catalytic activity, gRNA binding, specificity of the Cas protein (e.g., specificity of editing a defined target), stability of the Cas protein, off-target binding, target binding, protease activity, nickase activity, PFS recognition. In some examples, a engineered Cas protein may comprise one or more mutations of the corresponding wild type Cas protein. In some embodiments, the catalytic activity of the engineered Cas protein is increased as compared to a corresponding wildtype Cas protein. In some embodiments, the catalytic activity of the engineered Cas protein is decreased as compared to a corresponding wildtype Cas protein. In some embodiments, the gRNA binding of the engineered Cas protein is increased as compared to a corresponding wildtype Cas protein. In some embodiments, the gRNA binding of the engineered Cas protein is decreased as compared to a corresponding wildtype Cas protein. In some embodiments, the specificity of the Cas protein is increased as compared to a corresponding wildtype Cas protein. In some embodiments, the specificity of the Cas protein is decreased as compared to a corresponding wildtype Cas protein. In some embodiments, the stability of the Cas protein is increased as compared to a corresponding wildtype Cas protein. In some embodiments, the stability of the Cas protein is decreased as compared to a corresponding wildtype Cas protein. In some embodiments, the engineered Cas protein further comprises one or more mutations which inactivate catalytic activity. In some embodiments, the off-target binding of the Cas protein is increased as compared to a corresponding wildtype Cas protein. In some embodiments, the off-target binding of the Cas protein is decreased as compared to a corresponding wildtype Cas protein. In some embodiments, the target binding of the Cas protein is increased as compared to a corresponding wildtype Cas protein. In some embodiments, the target binding of the Cas protein is decreased as compared to a corresponding wildtype Cas protein. In some embodiments, the engineered Cas protein has a higher protease activity or polynucleotide-binding capability compared with a corresponding wildtype Cas protein. In some embodiments, the PFS recognition is altered as compared to a corresponding wildtype Cas protein.

[0098] In some embodiments, such as for Cas, a non-naturally occurring or engineered composition of the invention may comprise an accessory protein that enhances the Cas protein activity. In such embodiments, the Cas protein and the accessory protein may be from the same source or from a different source. In some embodiments, a non-naturally occurring or engineered composition of the invention comprises an accessory protein that represses Cas protein activity. In some embodiments, a non-naturally occurring or engineered composition of the invention comprises two or more crRNAs. In some embodiments, a non-naturally occurring or engineered composition of the invention comprises a guide sequence that hybridizes to a target RNA sequence in a prokaryotic cell. In some embodiments, a non-naturally occurring or engineered composition of the invention comprises a guide sequence that hybridizes to a target RNA sequence in a eukaryotic cell. In some embodiment, the Cas protein comprises one or more nuclear localization signals (NLSs).

[0099] In some embodiment of the non-naturally occurring or engineered composition of the invention, the Cas protein and the accessory protein are from the same organism.

[0100] In some embodiment of the non-naturally occurring or engineered composition of the invention, the Cas protein and the accessory protein are from different organisms.

[0101] In certain embodiments, the Cas proteins herein may be associated with a locus comprising short CRISPR repeats between 30 and 40 bp long, more typically between 34 and 38 bp long, even more typically between 36 and 37 bp long, e.g., 30, 31, 32, 33, 34, 35, 36, 37, 38, 39, or 40 bp long. In certain embodiments the CRISPR repeats are long or dual repeats between 80 and 350 bp long such as between 80 and 200 bp long, even more typically between 86 and 88 bp long, e.g., 80, 81, 82, 83, 84, 85, 86, 87, 88, 89, or 90 bp long

[0102] In certain embodiments, the guide RNA or mature crRNA comprises, consists essentially of, or consists of a direct repeat sequence and a guide sequence or spacer sequence. In certain embodiments, the guide RNA or mature crRNA comprises, consists essentially of, or consists of a direct repeat sequence linked to a guide sequence or spacer sequence. In preferred embodiments of the invention, the mature crRNA comprises a stem loop or an optimized stem loop structure or an optimized secondary structure. In preferred embodiments the mature crRNA comprises a stem loop or an optimized stem loop structure in the direct repeat sequence, wherein the stem loop or optimized stem loop structure is important for cleavage activity. In certain embodiments, the mature crRNA preferably comprises a single stem loop. In certain embodiments, the direct repeat sequence preferably comprises a single stem loop. In certain embodiments, the cleavage activity of the effector protein complex is modified by introducing mutations that affect the stem loop RNA duplex structure. In preferred embodiments, mutations which maintain the RNA duplex of the stem loop may be introduced, whereby the cleavage activity of the effector protein complex is maintained. In other preferred embodiments, mutations which disrupt the RNA duplex structure of the stem loop may be introduced, whereby the cleavage activity of the effector protein complex is completely abolished.

[0103] The CRISPR system as provided herein can make use of a crRNA or analogous polynucleotide comprising a guide sequence, wherein the polynucleotide is an RNA, a DNA or a mixture of RNA and DNA, and/or wherein the polynucleotide comprises one or more nucleotide analogs. The sequence can comprise any structure, including but not limited to a structure of a native crRNA, such as a bulge, a hairpin or a stem loop structure. In certain embodiments, the polynucleotide comprising the guide sequence forms a duplex with a second polynucleotide sequence which can be an RNA or a DNA sequence.

### Exemplary Cas Proteins

[0104] The Cas proteins herein, e.g. a Type IV protein, may comprise an HNH domain. In some examples, the Cas proteins further comprise a helicase domain. The helicase domain may be a DinG domain. In some embodiments, the Cas gene is found in several diverse bacterial genomes, typically in the same locus with Cas5, Cas6, and Cas7, and/or Cas8 genes and a CRISPR cassette. In some examples, the Cas protein contains an HNH domain and a helicase domain (e.g., a DinG domain). Nucleic acid sequences of exemplary Type IV Cas proteins include those in Table 1 and SEQ ID NOs 1-405.

[0105] In some embodiments, the HNH domain in the Cas protein may be less than 1000 amino acids, less than 900 amino acids, less than 800 amino acids, less than 700 amino acids, less than 600 amino acids, less than 500 amino acids, less than 400 amino acids, less than 300 amino acids, less than 200 amino acids, or less than 100 amino acids. In some examples, the HNH domain is less than 600 amino acids. In a particular example, the Cas protein comprises an HNH domain that is less than 600 amino acids in size in length, and at least one guide sequence capable of complexing with the Cas protein and directing binding of the guide-Cas protein complex to a target polynucleotide.

[0106] In some embodiments, the Cas proteins are a class 1, Type IV Cas, an ortholog thereof, or a homolog thereof. The systems and compositions may comprise orthologs and homologs of the Cas proteins. The terms “ortholog” and “homolog” are well known in the art. By means of further guidance, a “homologue” of a protein as used herein is a protein of the same species which performs the same or a similar function as the protein it is a homologue of. Homologous proteins may but need not be structurally related, or are only partially structurally related. An “ortholog” of a protein as used herein is a protein of a different species which performs the same or a similar function as the protein it is an orthologue of. Orthologous proteins may but need not be structurally related, or are only partially structurally related. Homologs and orthologs may be identified by homology modelling (see, e.g., Greer, Science vol. 228 (1985) 1055, and Blundell et al. Eur J Biochem vol 172 (1988), 513) or “structural BLAST” (Dey F, Cliff Zhang Q, Petrey D, Honig B. Toward a “structural BLAST”: using structural relationships to infer function. Protein Sci. 2013 April; 22(4):359-66. doi: 10.1002/pro.2225.). See also Shmakov et al. (2015) for application in the field of CRISPR-Cas loci. Homologous proteins may but need not be structurally related or are only partially structurally related. As used herein, when a Cas protein originates form a species, it may be the wild type Cas protein in the species, or a homolog of the wild type Cas protein in the species. The Cas protein that is a homolog of the wild type Cas protein in the species may comprise one or more variations (e.g., mutations, truncations, etc.) of the wild type Cas protein.

[0107] It will be appreciated that any of the functionalities described herein may be engineered into Cas proteins from other orthologs, including chimeric enzymes comprising fragments from multiple orthologs. A chimeric enzyme can comprise a first fragment and a second fragment, and the fragments can be of CRISPR enzyme orthologs of organisms of genera herein mentioned or of species herein mentioned; advantageously, the fragments are from CRISPR enzyme orthologs of different species.

[0108] Orthologous proteins may but need not be structurally related, or are only partially structurally related. In particular embodiments, the homolog or ortholog of a Cas protein as referred to herein has a sequence homology or identity of at least 60%, preferably at least 70%, preferably at least 80%, more preferably at least 85%, even more preferably at least 90%, such as for instance at least 95% with a Cas proteins encoded by the nucleic acid sequences in Table 1 and SEQ ID NOs: 1-405.

### Cas Variants

[0109] The Cas proteins herein include variants and mutated forms of Cas proteins (comparing to wildtype or naturally occurring Cas proteins). In some examples, the present disclosure includes variants and mutated forms of the Cas proteins. The variants or mutated forms of Cas protein may be catalytically inactive, e.g., have no or reduced nuclease activity compared to a corresponding wildtype. In certain examples, the variants or mutated forms of Cas protein have nickase activity.

[0110] In some cases, the present disclosure provides for mutated Cas proteins comprising one or more modified of amino acids. The amino acids: (a) interact with a guide RNA that forms a complex with the mutated Cas protein; (b) are in an active site, an inter-domain linker domain, or a bridge helix domain of the mutated Cas protein; or (c) a combination thereof.

[0111] The term “corresponding amino acid” or “residue which corresponds to” refers to a particular amino acid or analogue thereof in a Cas homolog or ortholog that is identical or functionally equivalent to an amino acid in reference Cas protein. Accordingly, as used herein, referral to an “amino acid position corresponding to amino acid position [X]” of a specified Cas protein represents referral to a collection of equivalent positions in other recognized Cas and structural homologues and families.

[0112] In certain embodiments, the specificity of the Cas protein of the invention is altered or modified. It is to be understood that mutated Cas has an altered or modified specificity if the specificity is different than the specificity of the corresponding wild type Cas (i.e., unmutated Cas). Specificity can be determined by means known in the art. By means of example, and without limitation, specificity can be determined by comparison of on-target activity and off-target activity. In certain embodiments, specificity is increased. In certain embodiments, specificity is increased by at least 5%, preferably at least 10%, more preferably at least 20%, such as at least 30%, at least 40%, at least 50%, at least 60%, at least 70%, at least 80%, at least 90%, or at least 100%. In certain embodiments, specificity is decreased. In certain embodiments, specificity is decreased by at least 5%, preferably at least 10%, more preferably at least 20%, such as at least 30%, at least 40%, at least 50%, at least 60%, at least 70%, at least 80%, at least 90%, or (substantially) 100%.

[0113] In certain embodiments, the stability of the Cas protein of the invention is altered or modified. It is to be understood that mutated Cas has an altered or modified stability if the stability is different than the stability of the corresponding wild type Cas (i.e., unmutated Cas). Stability can be determined by means known in the art. By means of example, and without limitation, stability can be determined by determining the half-life of the Cas protein. In certain embodiments, stability is increased. In certain embodiments, stability is increased by at least 5%, preferably at least 10%, more preferably at least 20%, such as at least 30%, at least 40%, at least 50%, at least 60%, at least 70%, at least 80%, at least 90%, or at least 100%. In certain embodiments, stability is decreased. In certain embodiments, stability is decreased by at least 5%, preferably at least 10%, more preferably at least 20%, such as at least 30%, at least 40%, at least 50%, at least 60%, at least 70%, at least 80%, at least 90%, or (substantially) 100%.

[0114] In certain embodiments, the target binding of the Cas protein of the invention is altered or modified. It is to be understood that mutated Cas has an altered or modified target binding if the target binding is different than the target binding of the corresponding wild type Cas (i.e. unmutated Cas). target binding can be determined by means known in the art. By means of example, and without limitation, target binding can be determined by calculating binding strength or affinity (such as based on equilibrium constants, Ka, Kd, etc.). In certain embodiments, target bindings increased. In certain embodiments, target binding is increased by at least 5%, preferably at least 10%, more preferably at least 20%, such as at least 30%, at least 40%, at least 50%, at least 60%, at least 70%, at least 80%, at least 90%, or at least 100%. In certain embodiments, target binding is decreased. In certain embodiments, target binding is decreased by at least 5%, preferably at least 10%, more preferably at least 20%, such as at least 30%, at least 40%, at least 50%, at least 60%, at least 70%, at least 80%, at least 90%, or (substantially) 100%.

[0115] In certain embodiments, the off-target binding of the Cas protein of the invention is altered or modified. It is to be understood that mutated Cas has an altered or modified off-target binding if the off-target binding is different than the off-target binding of the corresponding wild type Cas (i.e. unmutated Cas). Off-target binding can be determined by means known in the art. By means of example, and without limitation, off-target binding can be determined by calculating binding strength or affinity (such as based on equilibrium constants, Ka, Kd, etc.). In certain embodiments, off-target bindings increased. In certain embodiments, off-target binding is increased by at least 5%, preferably at least 10%, more preferably at least 20%, such as at least 30%, at least 40%, at least 50%, at least 60%, at least 70%, at least 80%, at least 90%, or at least 100%. In certain embodiments, off-target binding is decreased. In certain embodiments, off-target binding is decreased by at least 5%, preferably at least 10%, more preferably at least 20%, such as at least 30%, at least 40%, at least 50%, at least 60%, at least 70%, at least 80%, at least 90%, or (substantially) 100%.

[0116] The types of mutations in the Cas proteins can be conservative mutations or non-conservative mutations. In certain preferred embodiments, the amino acid which is mutated is mutated into alanine (A). In certain preferred embodiments, if the amino acid to be mutated is an aromatic amino acid, it is mutated into alanine or another aromatic amino acid (e.g., H, Y, W, or F). In certain preferred embodiments, if the amino acid to be mutated is a charged amino acid, it is mutated into alanine or another charged amino acid (e.g., H, K, R, D, or E). In certain preferred embodiments, if the amino acid to be mutated is a charged amino acid, it is mutated into alanine or another charged amino acid having the same charge. In certain preferred embodiments, if the amino acid to be mutated is a charged amino acid, it is mutated into alanine or another charged amino acid having the opposite charge.

[0117] The invention also provides for methods and compositions wherein one or more amino acid residues of the effector protein may be modified e.g., an engineered or non-naturally-occurring effector protein or Cas. In an embodiment, the modification may comprise mutation of one or more amino acid residues of the effector protein. The one or more mutations may be in one or more catalytically active domains of the effector protein, or a domain interacting with the crRNA (such as the guide sequence or direct repeat sequence). The effector protein may have reduced or abolished nuclease activity or alternatively increased nuclease activity compared with an effector protein lacking said one or more mutations. The effector protein may not direct cleavage of the RNA strand at the target locus of interest. In a preferred embodiment, the one or more mutations may comprise two mutations.

[0118] The Cas proteins herein may comprise one or more amino acids mutated. In some embodiments, the amino acid is mutated to A, P, or V, preferably A. In some embodiments, the amino acid is mutated to a hydrophobic amino acid. In some embodiments, the amino acid is mutated to an aromatic amino acid. In some embodiments, the amino acid is mutated to a charged amino acid. In some embodiments, the amino acid is mutated to a positively charged amino acid. In some embodiments, the amino acid is mutated to a negatively charged amino acid. In some embodiments, the amino acid is mutated to a polar amino acid. In some embodiments, the amino acid is mutated to an aliphatic amino acid.

### Structural (Sub)Domains

[0119] In another aspect, the disclosure provides a mutated Cas protein comprising one or more mutations of amino acids, wherein the amino acids: interact with a guide RNA that forms a complex with the engineered Cas protein; or are in an active site, e.g., in HNH domain(s) and/or helicase domains(s), e.g., DinG domains.

[0120] In another aspect, the disclosure provides a mutated Cas protein comprising one or more mutations of amino acids, wherein the amino acids: interact with a guide RNA that forms a complex with the engineered Cas protein; or are in an active site, e.g., in HNH domain(s).

### Destabilized Cas and Fusion Proteins

[0121] In certain embodiments, the Cas protein according to the invention as described herein is associated with or fused to a destabilization domain (DD). In some embodiments, the DD is ER50. A corresponding stabilizing ligand for this DD is, in some embodiments, 4HT. As such, in some embodiments, one of the at least one DDs is ER50 and a stabilizing ligand therefor is 4HT or CMP8. In some embodiments, the DD is DHFR50. A corresponding stabilizing ligand for this DD is, in some embodiments, TMP. As such, in some embodiments, one of the at least one DDs is DHFR50 and a stabilizing ligand therefor is TMP. In some embodiments, the DD is ER50. A corresponding stabilizing ligand for this DD is, in some embodiments, CMP8. CMP8 may therefore be an alternative stabilizing ligand to 4HT in the ER50 system. While it may be possible that CMP8 and 4HT can/should be used in a competitive matter, some cell types may be more susceptible to one or the other of these two ligands, and from this disclosure and the knowledge in the art the skilled person can use CMP8 and/or 4HT.

[0122] In some embodiments, one or two DDs may be fused to the N-terminal end of the Cas with one or two DDs fused to the C-terminal of the Cas. In some embodiments, the at least two DDs are associated with the Cas and the DDs are the same DD, i.e. the DDs are homologous. Thus, both (or two or more) of the DDs could be ER50 DDs. This is preferred in some embodiments. Alternatively, both (or two or more) of the DDs could be DHFR50 DDs. This is also preferred in some embodiments. In some embodiments, the at least two DDs are associated with the Cas and the DDs are different DDs, i.e. the DDs are heterologous. Thus, one of the DDS could be ER50 while one or more of the DDs or any other DDs could be DHFR50. Having two or more DDs which are heterologous may be advantageous as it would provide a greater level of degradation control. A tandem fusion of more than one DD at the N or C-term may enhance degradation; and such a tandem fusion can be, for example ER50-ER50-Cas or DHFR-DHFR-Cas It is envisaged that high levels of degradation would occur in the absence of either stabilizing ligand, intermediate levels of degradation would occur in the absence of one stabilizing ligand and the presence of the other (or another) stabilizing ligand, while low levels of degradation would occur in the presence of both (or two of more) of the stabilizing ligands. Control may also be imparted by having an N-terminal ER50 DD and a C-terminal DHFR50 DD.

[0123] In some embodiments, the fusion of the Cas with the DD comprises a linker between the DD and the Cas. In some embodiments, the linker is a GlySer linker. In some embodiments, the DD-Cas further comprises at least one Nuclear Export Signal (NES). In some embodiments, the DD-Cas comprises two or more NESs. In some embodiments, the DD-Cas comprises at least one Nuclear Localization Signal (NLS). This may be in addition to an NES. In some embodiments, the Cas comprises or consists essentially of or consists of a localization (nuclear import or export) signal as, or as part of, the linker between the Cas and the DD. HA or Flag tags are also within the ambit of the invention as linkers. Applicants use NLS and/or NES as linker and also use Glycine Serine linkers as short as GS up to (GGGGS)₃.

[0124] Destabilizing domains have general utility to confer instability to a wide range of proteins; see, e.g., Miyazaki, J Am Chem Soc. Mar. 7, 2012; 134(9): 3942-3945, incorporated herein by reference. CMP8 or 4-hydroxytamoxifen can be destabilizing domains. More generally, A temperature-sensitive mutant of mammalian DHFR (DHFRts), a destabilizing residue by the N-end rule, was found to be stable at a permissive temperature but unstable at 37° C. The addition of methotrexate, a high-affinity ligand for mammalian DHFR, to cells expressing DHFRts inhibited degradation of the protein partially. This was an important demonstration that a small molecule ligand can stabilize a protein otherwise targeted for degradation in cells. A rapamycin derivative was used to stabilize an unstable mutant of the FRB domain of mTOR (FRB*) and restore the function of the fused kinase, GSK-3β.6,7 This system demonstrated that ligand-dependent stability represented an attractive strategy to regulate the function of a specific protein in a complex biological environment. A system to control protein activity can involve the DD becoming functional when the ubiquitin complementation occurs by rapamycin induced dimerization of FK506-binding protein and FKBP12. Mutants of human FKBP12 or ecDHFR protein can be engineered to be metabolically unstable in the absence of their high-affinity ligands, Shield-1 or trimethoprim (TMP), respectively. These mutants are some of the possible destabilizing domains (DDs) useful in the practice of the invention and instability of a DD as a fusion with a Cas confers to the Cas degradation of the entire fusion protein by the proteasome. Shield-1 and TMP bind to and stabilize the DD in a dose-dependent manner. The estrogen receptor ligand binding domain (ERLBD, residues 305-549 of ERS1) can also be engineered as a destabilizing domain. Since the estrogen receptor signaling pathway is involved in a variety of diseases such as breast cancer, the pathway has been widely studied and numerous agonist and antagonists of estrogen receptor have been developed. Thus, compatible pairs of ERLBD and drugs are known. There are ligands that bind to mutant but not wild-type forms of the ERLBD. By using one of these mutant domains encoding three mutations (L384M, M421G, G521R)12, it is possible to regulate the stability of an ERLBD-derived DD using a ligand that does not perturb endogenous estrogen-sensitive networks. An additional mutation (Y537S) can be introduced to further destabilize the ERLBD and to configure it as a potential DD candidate. This tetra-mutant is an advantageous DD development. The mutant ERLBD can be fused to a Cas and its stability can be regulated or perturbed using a ligand, whereby the Cas has a DD. Another DD can be a 12-kDa (107-amino-acid) tag based on a mutated FKBP protein, stabilized by Shield1 ligand; see, e.g., Nature Methods 5, (2008). For instance a DD can be a modified FK506 binding protein 12 (FKBP12) that binds to and is reversibly stabilized by a synthetic, biologically inert small molecule, Shield-1; see, e.g., Banaszynski L A, Chen L C, Maynard-Smith L A, Ooi A G, Wandless T J. A rapid, reversible, and tunable method to regulate protein function in living cells using synthetic small molecules. Cell. 2006; 126:995-1004; Banaszynski L A, Sellmyer M A, Contag C H, Wandless T J, Thorne S H. Chemical control of protein stability and function in living mice. Nat Med. 2008; 14:1123-1127; Maynard-Smith L A, Chen L C, Banaszynski L A, Ooi A G, Wandless T J. A directed approach for engineering conditional protein stability using biologically silent small molecules. The Journal of biological chemistry. 2007; 282:24866-24872; and Rodriguez, Chem Biol. Mar. 23, 2012; 19(3): 391-398—all of which are incorporated herein by reference and may be employed in the practice of the invention in selected a DD to associate with a Cas in the practice of this invention. As can be seen, the knowledge in the art includes a number of DDs, and the DD can be associated with, e.g., fused to, advantageously with a linker, to a Cas, whereby the DD can be stabilized in the presence of a ligand and when there is the absence thereof the DD can become destabilized, whereby the Cas is entirely destabilized, or the DD can be stabilized in the absence of a ligand and when the ligand is present the DD can become destabilized; the DD allows the Cas and hence the CRISPR-Cas complex or system to be regulated or controlled—turned on or off so to speak, to thereby provide means for regulation or control of the system, e.g., in an in vivo or in vitro environment. For instance, when a protein of interest is expressed as a fusion with the DD tag, it is destabilized and rapidly degraded in the cell, e.g., by proteasomes. Thus, absence of stabilizing ligand leads to a D associated Cas being degraded. When a new DD is fused to a protein of interest, its instability is conferred to the protein of interest, resulting in the rapid degradation of the entire fusion protein. Peak activity for Cas is sometimes beneficial to reduce off-target effects. Thus, short bursts of high activity are preferred. The present invention is able to provide such peaks. In some senses the system is inducible. In some other senses, the system repressed in the absence of stabilizing ligand and de-repressed in the presence of stabilizing ligand.

### Deactivated/Inactivated/Dead Cas Proteins

[0125] In certain embodiments, the Cas protein herein is a catalytically inactive or dead Cas protein. In some cases, Cas protein herein is a catalytically inactive or dead Cas protein (dCas). In some cases, a dead Cas protein, e.g., a dead Cas protein has nickase activity. In some embodiments, the dCas protein comprises mutations in the nuclease domain. In some embodiments, the dCas protein has been truncated. In some cases, the dead Cas proteins may be fused with a deaminase herein, e.g., an adenosine deaminase.

[0126] Where the Cas protein has nuclease activity, the Cas protein may be modified to have diminished nuclease activity e.g., nuclease inactivation of at least 70%, at least 80%, at least 90%, at least 95%, at least 97%, or 100% as compared with the wild type enzyme; or to put in another way, a Cas enzyme having advantageously about 0% of the nuclease activity of the non-mutated or wild type Cas, or no more than about 3% or about 5% or about 10% of the nuclease activity of the non-mutated or wild type Cas. This is possible by introducing mutations into the nuclease domains of the Cas and orthologs thereof.

[0127] The inactivated Cas CRISPR enzyme may have associated (e.g., via fusion protein) one or more functional domains, including for example, one or more domains from the group comprising, consisting essentially of, or consisting of methylase activity, demethylase activity, transcription activation activity, transcription repression activity, transcription release factor activity, histone modification activity, RNA cleavage activity, DNA cleavage activity, nucleic acid binding activity, and molecular switches (e.g., light inducible). Preferred domains are Fok1, VP64, P65, HSF1, MyoD1. In the event that Fok1 is provided, it is advantageous that multiple Fok1 functional domains are provided to allow for a functional dimer and that gRNAs are designed to provide proper spacing for functional use (Fok1) as specifically described in Tsai et al. Nature Biotechnology, Vol. 32, Number 6, June 2014). The adaptor protein may utilize known linkers to attach such functional domains. In some cases it is advantageous that additionally at least one NLS is provided. In some instances, it is advantageous to position the NLS at the N terminus. When more than one functional domain is included, the functional domains may be the same or different.

[0128] In general, the positioning of the one or more functional domain on the inactivated Cas enzyme is one which allows for correct spatial orientation for the functional domain to affect the target with the attributed functional effect. For example, if the functional domain is a transcription activator (e.g., VP64 or p65), the transcription activator is placed in a spatial orientation which allows it to affect the transcription of the target. Likewise, a transcription repressor will be advantageously positioned to affect the transcription of the target, and a nuclease (e.g., Fok1) will be advantageously positioned to cleave or partially cleave the target. This may include positions other than the N-/C-terminus of the CRISPR enzyme.

[0129] The dead or deactivated Cas proteins may be used as target-binding proteins, (e.g., DNA binding proteins). In these cases, the dead or deactivated Cas proteins may be fused with one or more functional domains.

### Functional Domains

[0130] The systems and compositions provided herein may comprise one or more of the Cas proteins associated with one or more functional domains. In certain embodiments, the systems and compositions comprise fusion proteins comprising the Cas proteins(s)/subunit(s) associated with the functional domain(s).

[0131] In one aspect, the CRISPR-Cas system may be a class I, Type IV CRISPR-Cas system comprising a fusion of multimeric subunit components.

[0132] In one embodiment, the class I, Type IV CRISPR-Cas system comprises a fusion of a functional domain at the N-terminus, the C-terminus, or any accessible part (e.g. loop) of the protein complex.

[0133] In one embodiment, the class I, Type IV CRISPR-Cas system comprises fusion of one or more of the DinG, Cas5, Cas6 (e.g., cas6b, cas6e, cas6e/f), Cas7, Cas8 and Cas8-like, Cas10-like, Cas11, Cas2 and Cas4 subunits in any combination thereof.

[0134] In one aspect, the CRISPR-Cas system may be a class I, Type I CRISPR-Cas system comprising a fusion of multimeric subunit components.

[0135] In one embodiment, the class I, Type I CRISPR-Cas system comprises a fusion of a functional domain at the N-terminus, the C-terminus, or any accessible part (e.g. loop) of the protein complex.

[0136] In one embodiment the class I, Type I CRISPR-Cas system comprises fusion of the Cas3 Cas5, Cas6, Cas7, Cas8 and Cas11 subunits, and in any combination thereof.

[0137] In some embodiments, one or more functional domains are associated with the Cas system protein subunits. In some embodiments, one or more functional domains are associated with an adaptor protein, for example as used with the modified guides of Konnerman et al. (Nature 517, 583-588, 29 Jan. 2015). In some embodiments, one or more functional domains are associated with a dead gRNA (dRNA). In some embodiments, a dRNA complex with active Cas system/protein subunit(s) directs gene regulation by a functional domain at on gene locus while an gRNA directs DNA cleavage by the active Cas protein at another locus, for example as described analogously in CRISPR-Cas systems by Dahlman et al., ‘Orthogonal gene control with a catalytically active Cas9 nuclease’. In some embodiments, dRNAs are selected to maximize selectivity of regulation for a gene locus of interest compared to off-target regulation. In some embodiments, dRNAs are selected to maximize target gene regulation and minimize target cleavage.

[0138] For the purposes of the following discussion, reference to a functional domain could be a functional domain associated with one or more Cas protein subunits of the Cas system or a functional domain associated with the adaptor protein.

[0139] In the practice of the invention, loops of the gRNA may be extended, without colliding with the Cas protein by the insertion of distinct RNA loop(s) or distinct sequence(s) that may recruit adaptor proteins that can bind to the distinct RNA loop(s) or distinct sequence(s). The adaptor proteins may include but are not limited to orthogonal RNA-binding protein/aptamer combinations that exist within the diversity of bacteriophage coat proteins. A list of such coat proteins includes, but is not limited to: Qβ, F2, GA, fr, JP501, M12, R17, BZ13, JP34, JP500, KU1, M11, MX1, TW18, VK, SP, FI, ID2, NL95, TW19, AP205, ϕCb5, ϕCb8r, ϕCb12r, ϕCb23r, 7s and PRR1. These adaptor proteins or orthogonal RNA binding proteins can further recruit effector proteins or fusions which comprise one or more functional domains.

[0140] In some embodiments, the functional domain may be selected from the group consisting of: transposase domain, integrase domain, recombinase domain, resolvase domain, invertase domain, protease domain, DNA methyltransferase domain, DNA hydroxylmethylase domain, DNA demethylase domain, histone acetylase domain, histone deacetylases domain, nuclease domain, repressor domain, activator domain, nuclear-localization signal domains, transcription-regulatory protein (or transcription complex recruiting) domain, cellular uptake activity associated domain, nucleic acid binding domain, antibody presentation domain, histone modifying enzymes, recruiter of histone modifying enzymes; inhibitor of histone modifying enzymes, histone methyltransferase, histone demethylase, histone kinase, histone phosphatase, histone ribosylase, histone deribosylase, histone ubiquitinase, histone deubiquitinase, histone biotinase and histone tail protease. In some preferred embodiments, the functional domain is a transcriptional activation domain, such as, without limitation, VP64, p65, MyoD1, HSF1, RTA, SET7/9 or a histone acetyltransferase. In some embodiments, the functional domain is a transcription repression domain, preferably KRAB. In some embodiments, the transcription repression domain is SID, or concatemers of SID (eg SID4X). In some embodiments, the functional domain is an epigenetic modifying domain, such that an epigenetic modifying enzyme is provided. In some embodiments, the functional domain is an activation domain, which may be the P65 activation domain.

[0141] In some examples, the Cas is associated with a ligase or functional fragment thereof. The ligase may ligate a single-strand break (a nick) generated by the Cas. In certain cases, the ligase may ligate a double-strand break generated by the Cas. In certain examples, the Cas is associated with a reverse transcriptase or functional fragment thereof.

[0142] In some embodiments, the one or more functional domains is an NLS (Nuclear Localization Sequence) or an NES (Nuclear Export Signal). In some embodiments, the one or more functional domains is a transcriptional activation domain comprises VP64, p65, MyoD1, HSF1, RTA, SET7/9 and a histone acetyltransferase. Other references herein to activation (or activator) domains in respect of those associated with the CRISPR enzyme include any known transcriptional activation domain and specifically VP64, p65, MyoD1, HSF1, RTA, SET7/9 or a histone acetyltransferase.

[0143] In some embodiments, the one or more functional domains is a transcriptional repressor domain. In some embodiments, the transcriptional repressor domain is a KRAB domain. In some embodiments, the transcriptional repressor domain is a NuE domain, NcoR domain, SID domain or a SID4X domain.

[0144] In some embodiments, the one or more functional domains have one or more activities comprising methylase activity, demethylase activity, transcription activation activity, transcription repression activity, transcription release factor activity, histone modification activity, RNA cleavage activity, DNA cleavage activity, DNA integration activity or nucleic acid binding activity.

[0145] Histone modifying domains are also preferred in some embodiments. Exemplary histone modifying domains are discussed below. Transposase domains, HR (Homologous Recombination) machinery domains, recombinase domains, and/or integrase domains are also preferred as the present functional domains. In some embodiments, DNA integration activity includes HR machinery domains, integrase domains, recombinase domains and/or transposase domains. Histone acetyltransferases are preferred in some embodiments.

[0146] In some embodiments, the DNA cleavage activity is due to a nuclease. In some embodiments, the nuclease comprises a Fok1 nuclease. See, “Dimeric CRISPR RNA-guided Fok1 nucleases for highly specific genome editing”, Shengdar Q. Tsai, Nicolas Wyvekens, Cyd Khayter, Jennifer A. Foden, Vishal Thapar, Deepak Reyon, Mathew J. Goodwin, Martin J. Aryee, J. Keith Joung Nature Biotechnology 32(6): 569-77 (2014), relates to dimeric RNA-guided Fok1 Nucleases that recognize extended sequences and can edit endogenous genes with high efficiencies in human cells.

[0147] In some embodiments, the one or more functional domains is attached to the Cas protein so that upon binding to the sgRNA and target the functional domain is in a spatial orientation allowing for the functional domain to function in its attributed function.

[0148] Functional domains may be used to regulate transcription, e.g., transcriptional repression. Transcriptional repression is often mediated by chromatin modifying enzymes such as histone methyltransferases (HMTs) and deacetylases (HDACs). Repressive histone effector domains are known and an exemplary list is provided below. In the exemplary table, preference was given to proteins and functional truncations of small size to facilitate efficient viral packaging (for instance via AAV). In general, however, the domains may include HDACs, hi stone methyltransferases (HMTs), and hi stone acetyltransferase (HAT) inhibitors, as well as HDAC and HMT recruiting proteins. The functional domain may be or include, in some embodiments, HDAC Effector Domains, HDAC Recruiter Effector Domains, Histone Methyltransferase (HMT) Effector Domains, Histone Methyltransferase (HMT) Recruiter Effector Domains, or Histone Acetyltransferase Inhibitor Effector Domains.

TABLE 3
HDAC Effector Domains

| | | | | | | Selected | | |
|---|---|---|---|---|---|---|---|---|
| Subtype/ | | Substrate | Modification | | Full | truncation | Final | Catalytic |
| Complex | Name | (if known) | (if known) | Organism | size (aa) | (aa) | size (aa) | domain |
| HDAC I | HDAC8 | — | — | X. laevis | 325 | 1-325 | 325 | 1-272: |
| | | | | | | | | HDAC |
| HDAC I | RPD3 | — | — | S. cerevisiae | 433 | 19-340 | 322 | 19-331: |
| | | | | | | | (Vannier) | HDAC |
| HDAC IV | MesoLo4 | — | — | M. loti | 300 | 1-300 | 300 | — |
| | | | | | | (Gregoretti) | | |
| HDAC IV | HDAC11 | — | — | H. sapiens | 347 | 1-347 | 347 | 14-326: |
| | | | | | | (Gao) | | HDAC |
| HD2 | HDT1 | — | — | A. thaliana | 245 | 1-211 | 211 | — |
| | | | | | | (Wu) | | |
| SIRT I | SIRT3 | H3K9Ac | — | H. sapiens | 399 | 143-399 | 257 | 126-382: |
| | | H4K16Ac | | | | (Scher) | | SIRT |
| | | H3K56Ac | | | | | | |
| SIRT I | HST2 | — | — | C. albicans | 331 | 1-331 | 331 | — |
| | | | | | | (Hnisz) | | |
| SIRT I | CobB | — | — | E. coli | 242 | 1-242 | 242 | — |
| | | | | (K12) | | (Landry) | | |
| SIRT I | HST2 | — | — | S. cerevisiae | 357 | 8-298 | 291 | — |
| | | | | | | (Wilson) | | |
| SIRT III | SIRT5 | H4K8Ac | — | H. sapiens | 310 | 37-310 | 274 | 41-309: |
| | | H4K16Ac | | | | (Gertz) | | SIRT |
| SIRT III | Sir2A | — | — | P. falciparum | 273 | 1-273 | 273 | 19-273: |
| | | | | | | (Zhu) | | SIRT |
| SIRT IV | SIRT6 | H3K9Ac | — | H. sapiens | 355 | 1-289 | 289 | 35-274: |
| | | H3K56Ac | | | | (Tennen) | | SIRT |

[0149] Accordingly, the repressor domains of the present invention may be selected from histone methyltransferases (HMTs), histone deacetylases (HDACs), histone acetyltransferase (HAT) inhibitors, as well as HDAC and HMT recruiting proteins.

[0150] The HDAC domain may be any of those in the Table 3 above, namely: HDAC8, RPD3, MesoLo4, HDAC11, HDT1, SIRT3, HST2, CobB, HST2, SIRT5, Sir2A, or SIRT6.

[0151] In some embodiment, the functional domain may be a HDAC Recruiter Effector Domain. Preferred examples include those in the Table 4 below, namely MeCP2, MBD2b, Sin3a, NcoR, SALL1, RCOR1. NcoR is exemplified in the present Examples and, although preferred, it is envisaged that others in the class will also be useful.

TABLE 4
HDAC Recruiter Effector Domains

| | | | | | | Selected | | |
|---|---|---|---|---|---|---|---|---|
| Subtype/ | | Substrate | Modification | | Full | truncation | Final | Catalytic |
| Complex | Name | (if known) | (if known) | Organism | size (aa) | (aa) | size (aa) | domain |
| Sin3a | MeCP2 | — | — | R. norvegicus | 492 | 207-492 | 286 | — |
| | | | | | | (Nan) | | |
| Sin3a | MBD2b | — | — | H. sapiens | 262 | 45-262 | 218 | — |
| | | | | | | (Boeke) | | |
| Sin3a | Sin3a | — | — | H. sapiens | 1273 | 524-851 | 328 | 627-829: |
| | | | | | | (Laherty) | | HDAC1 |
| | | | | | | | | interaction |
| NcoR | NcoR | — | — | H. sapiens | 2440 | 420-488 | 69 | — |
| | | | | | | (Zhang) | | |
| NuRD | SALL1 | — | — | M. musculus | 1322 | 1-93 | 93 | — |
| | | | | | | (Lauberth) | | |
| CoREST | RCOR1 | — | — | H. sapiens | 482 | 81-300 | 220 | — |
| | | | | | | (Gu, Ouyang) | | |

[0152] In some embodiment, the functional domain may be a Methyltransferase (HMT) Effector Domain. Preferred examples include those in the Table 5 below, namely NUE, vSET, EHMT2/G9A, SUV39H1, dim-5, KYP, SUVR4, SET4, SET1, SETD8, and TgSET8. NUE is exemplified in the present Examples and, although preferred, it is envisaged that others in the class will also be useful.

TABLE 5
Histone Methyltransferase (HMT) Effector Domains

| | | | | | | Selected | | |
|---|---|---|---|---|---|---|---|---|
| Subtype/ | | Substrate | Modification | | Full | truncation | Final | Catalytic |
| Complex | Name | (if known) | (if known) | Organism | size (aa) | (aa) | size (aa) | domain |
| SET | NUE | H2B, H3, H4 | — | C. trachomatis | 219 | 1-219 | 219 | — |
| | | | | | | (Pennini) | | |
| SET | vSET | — | H3K27me3 | P. bursaria | 119 | 1-119 | 119 | 4-112: |
| | | | | chlorella virus | | (Mujtaba) | | SET2 |
| SUV39 | EHMT2/ | H1.4K2, H3K9, | H3K9me1/2, | M. musculus | 1263 | 969-1263 | 295 | 1025-1233: |
| family | G9A | H3K27 | H1K25me1 | | | (Tachibana) | | preSET, SET, |
| | | | | | | | | postSET |
| SUV39 | SUV39H1 | — | H3K9me2/3 | H. sapiens | 412 | 79-412 | 334 | 172-412: |
| | | | | | | (Snowden) | | preSET, SET, |
| | | | | | | | | postSET |
| Suvar3-9 | dim-5 | — | H3K9me3 | N. crassa | 331 | 1-331 | 331 | 77-331: |
| | | | | | | (Rathert) | | preSET, SET, |
| | | | | | | | | postSET |
| Suvar3-9 | KYP | — | H3K9me1/2 | A. thaliana | 624 | 335-601 | 267 | — |
| (SUVH | | | | | | | (Jackson) | |
| subfamily) | | | | | | | | |
| Suvar3-9 | SUVR4 | H3K9me1 | H3K9me2/3 | A. thaliana | 492 | 180-492 | 313 | 192-462: |
| (SUVR | | | | | | | (Thorstensen) | preSET, SET, |
| subfamily) | | | | | | | | postSET |
| Suvar4-20 | SET4 | — | H4K20me3 | C. elegans | 288 | 1-288 | 288 | — |
| | | | | | | (Vielle) | | |
| SET8 | SET1 | — | H4K20me1 | C. elegans | 242 | 1-242 | 242 | — |
| | | | | | | (Vielle) | | |
| SET8 | SETD8 | — | H4K20me1 | H. sapiens | 393 | 185-393 | 209 | 256-382: |
| | | | | | | | (Couture) | SET |
| SET8 | TgSET8 | — | H4K20me1/2/3 | T. gondii | 1893 | 1590-1893 | 304 | 1749-1884: |
| | | | | | | (Sautel) | | SET |

[0153] In some embodiment, the functional domain may be a Histone Methyltransferase (HMT) Recruiter Effector Domain. Preferred examples include those in the Table 4 below, namely Hp1a, PHF19, and NIPP1.

TABLE 6
Histone Methyltransferase (HMT) Recruiter Effector Domains

| | | | | | | Selected | | |
|---|---|---|---|---|---|---|---|---|
| Subtype/ | | Substrate | Modification | | Full | truncation | Final | Catalytic |
| Complex | Name | (if known) | (if known) | Organism | size (aa) | (aa) | size (aa) | domain |
| — | Hp1a | — | H3K9me3 | M. musculus | 191 | 73-191 | 119 | 121-179: |
| | | | | | | | (Hathaway) | chromoshadow |
| — | PHF19 | — | H3K27me3 | H. sapiens | 580 | (1-250) + | 335 | 163-250: |
| | | | | | | GGSG linker | (Ballaré) | PHD2 |
| | | | | | | (SEQ ID | | |
| | | | | | | NO: 43) + | | |
| | | | | | | (500-580) | | |
| — | NIPP1 | — | H3K27me3 | H. sapiens | 351 | 1-329 | 329 | 310-329: |
| | | | | | | (Jin) | | EED |

[0154] In some embodiment, the functional domain may be Histone Acetyltransferase Inhibitor Effector Domain. Preferred examples include SET/TAF-1β listed in the Table 5 below.

TABLE 7
Histone Acetyltransferase Inhibitor Effector Domains

| | | | | | | Selected | | |
|---|---|---|---|---|---|---|---|---|
| Subtype/ | | Substrate | Modification | | Full | truncation | Final | Catalytic |
| Complex | Name | (if known) | (if known) | Organism | size (aa) | (aa) | size (aa) | domain |
| — | SET/TAF-1β | — | — | M. musculus | 289 | 1-289 | 289 | — |
| | | | | | | (Cervoni) | | |

[0155] It is also preferred to target endogenous (regulatory) control elements (such as enhancers and silencers) in addition to a promoter or promoter-proximal elements. Thus, the invention can also be used to target endogenous control elements (including enhancers and silencers) in addition to targeting of the promoter. These control elements can be located upstream and downstream of the transcriptional start site (TSS), starting from 200 bp from the TSS to 100 kb away. Targeting of known control elements can be used to activate or repress the gene of interest. In some cases, a single control element can influence the transcription of multiple target genes. Targeting of a single control element could therefore be used to control the transcription of multiple genes simultaneously.

[0156] Targeting of putative control elements on the other hand (e.g. by tiling the region of the putative control element as well as 200 bp up to 100 kB around the element) can be used as a means to verify such elements (by measuring the transcription of the gene of interest) or to detect novel control elements (e.g. by tiling 100 kb upstream and downstream of the TSS of the gene of interest). In addition, targeting of putative control elements can be useful in the context of understanding genetic causes of disease. Many mutations and common SNP variants associated with disease phenotypes are located outside coding regions. Targeting of such regions with either the activation or repression systems described herein can be followed by readout of transcription of either a) a set of putative targets (e.g. a set of genes located in closest proximity to the control element) or b) whole-transcriptome readout by e.g. RNAseq or microarray. This would allow for the identification of likely candidate genes involved in the disease phenotype. Such candidate genes could be useful as novel drug targets.

[0157] Histone acetyltransferase (HAT) inhibitors are mentioned herein. However, an alternative in some embodiments is for the one or more functional domains to comprise an acetyltransferase, preferably a histone acetyltransferase. These are useful in the field of epigenomics, for example in methods of interrogating the epigenome. Methods of interrogating the epigenome may include, for example, targeting epigenomic sequences. Targeting epigenomic sequences may include the guide being directed to an epigenomic target sequence. Epigenomic target sequence may include, in some embodiments, include a promoter, silencer or an enhancer sequence.

[0158] Examples of acetyltransferases are known but may include, in some embodiments, histone acetyltransferases. In some embodiments, the histone acetyltransferase may comprise the catalytic core of the human acetyltransferase p300 (Gerbasch & Reddy, Nature Biotech 6th April 2015).

### Linkers

[0159] The term “linker” as used in reference to a fusion protein refers to a molecule which joins the proteins to form a fusion protein. Generally, such molecules have no specific biological activity other than to join or to preserve some minimum distance or other spatial relationship between the proteins. However, in certain embodiments, the linker may be selected to influence some property of the linker and/or the fusion protein such as the folding, net charge, or hydrophobicity of the linker.

[0160] Suitable linkers for use in the methods of the present invention are well known to those of skill in the art and include, but are not limited to, straight or branched-chain carbon linkers, heterocyclic carbon linkers, or peptide linkers. However, as used herein the linker may also be a covalent bond (carbon-carbon bond or carbon-heteroatom bond). In particular embodiments, the linker is used to separate the Cas protein and the nucleotide deaminase by a distance sufficient to ensure that each protein retains its required functional property. Preferred peptide linker sequences adopt a flexible extended conformation and do not exhibit a propensity for developing an ordered secondary structure. In certain embodiments, the linker can be a chemical moiety which can be monomeric, dimeric, multimeric or polymeric. Preferably, the linker comprises amino acids. Typical amino acids in flexible linkers include Gly, Asn and Ser. Accordingly, in particular embodiments, the linker comprises a combination of one or more of Gly, Asn and Ser amino acids. Other near neutral amino acids, such as Thr and Ala, also may be used in the linker sequence. Exemplary linkers are disclosed in Maratea et al. (1985), Gene 40: 39-46; Murphy et al. (1986) Proc. Nat'l. Acad. Sci. USA 83: 8258-62; U.S. Pat. Nos. 4,935,233; and 4,751,180. For example, GlySer linkers GGS, GGGS (SEQ ID NO:413) or GSG can be used. GGS, GSG, GGGS or GGGGS (SEQ ID NO:414) linkers can be used in repeats of 3 (such as (GGS)₃ (SEQ ID NO:415), (GGGGS)₃ (SEQ ID NO:416)) or 5, 6, 7, 9 or even 12 or more, to provide suitable lengths. In some cases, the linker may be (GGGGS)₃₋₁₅, For example, in some cases, the linker may be (GGGGS)₃₋₁₁, e.g., GGGGS, (GGGGS)₂ (SEQ ID NO:417), (GGGGS)₃, (GGGGS)₄ (SEQ ID NO:418), (GGGGS)₅ (SEQ ID NO:419), (GGGGS)₆ (SEQ ID NO:420), (GGGGS)₇ (SEQ ID NO:421), (GGGGS)₈ (SEQ ID NO:422), (GGGGS)₉ (SEQ ID NO:423), (GGGGS)₁₀ (SEQ ID NO:424), or (GGGGS)₁₁ (SEQ ID NO:425).

[0161] In particular embodiments, linkers such as (GGGGS)₃ are preferably used herein. (GGGGS)₆ (GGGGS)₉ or (GGGGS)₁₂ (SEQ ID NO:426) may preferably be used as alternatives. Other preferred alternatives are (GGGGS)₁, (GGGGS)₂, (GGGGS)₄, (GGGGS)₅, (GGGGS)₇, (GGGGS)₈, (GGGGS)₁₀, or (GGGGS)₁₁. In yet a further embodiment, LEPGEKPYKCPECGKSFSQSGALTRHQRTHTR (SEQ ID NO:427) is used as a linker. In yet an additional embodiment, the linker is an XTEN linker. In particular embodiments, the Cas protein is linked to the deaminase protein or its catalytic domain by means of an LEPGEKPYKCPECGKSFSQSGALTRHQRTHTR (SEQ ID NO:428) linker. In further particular embodiments, the Cas protein is linked C-terminally to the N-terminus of a deaminase protein or its catalytic domain by means of an LEPGEKPYKCPECGKSFSQSGALTRHQRTHTR (SEQ ID NO:429) linker. In addition, N- and C-terminal NLSs can also function as linker (e.g., PKKKRKVEASSPKKRKVEAS (SEQ ID NO:430)). Examples of suitable linkers are shown in Table 8.

TABLE 8
Examples of suitable linkers as disclosed herein.

| | |
|---|---|
| GGS | GGTGGTAGT (SEQ ID NO: 431) |
| GGSx3 (9) | GGTGGTAGTGGAGGGAGCGGCGGTTCA (SEQ ID NO: 432) |
| GGSx7 (21) | ggtggaggaggctctggtggaggcggtagcggaggcggagggtcgGGTGGTAGTGGAGGG |
| | AGCGGCGGTTCA (SEQ ID NO: 433) |
| XTEN | TCGGGATCTGAGACGCCTGGGACCTCGGAATCGGCTACGCCCGAA |
| | AGT (SEQ ID NO: 434) |
| Z- | Gtggataacaaatttaacaaagaaatgtgggcggcgtgggaagaaattcgtaacctgccgaacctgaacggc |
| EGFR_Short | tggcagatgaccgcgtttattgcgagcctggtggatgatccgagccagagcgcgaacctgctggcggaagcg |
| | aaaaaactgaacgatgcgcaggcgccgaaaaccggcggtggttctggt (SEQ ID NO: 435) |
| GSAT | Ggtggttctgccggtggctccggttctggctccagcggtggcagctctggtgcgtccggcacgggtactgcg |
| | ggtggcactggcagcggttccggtactggctctggc (SEQ ID NO: 436) |

[0162] Linkers may be used between the guide RNAs and the functional domain (activator or repressor), or between the Cas protein and the functional domain. The linkers may be used to engineer appropriate amounts of “mechanical flexibility”.

[0163] In certain embodiments, the one or more functional domains are controllable, i.e. inducible.

### Split Proteins

[0164] It is noted that in this context, and more generally for the various applications as described herein, the use of a split version of the Cas protein can be envisaged. Indeed, this may not only allow increased specificity but may also be advantageous for delivery. The Cas is split in the sense that the two parts of the Cas enzyme substantially comprise a functioning Cas. The split may be so that the catalytic domain(s) are unaffected. That Cas may function as a nuclease or it may be a dead-Cas which is essentially an RNA-binding protein with very little or no catalytic activity, due to typically mutation(s) in its catalytic domains.

[0165] Each half of the split Cas may be fused to a dimerization partner. By means of example, and without limitation, employing rapamycin sensitive dimerization domains, allows to generate a chemically inducible split Cas for temporal control of Cas activity. Cas can thus be rendered chemically inducible by being split into two fragments and that rapamycin-sensitive dimerization domains may be used for controlled reassembly of the Cas. The two parts of the split Cas can be thought of as the N′ terminal part and the C′ terminal part of the split Cas. The fusion is typically at the split point of the Cas. In other words, the C′ terminal of the N′ terminal part of the split Cas is fused to one of the dimer halves, whilst the N′ terminal of the C′ terminal part is fused to the other dimer half.

[0166] The Cas does not have to be split in the sense that the break is newly created. The split point is typically designed in silico and cloned into the constructs. Together, the two parts of the split Cas, the N′ terminal and C′ terminal parts, form a full Cas, comprising preferably at least 70% or more of the wildtype amino acids (or nucleotides encoding them), preferably at least 80% or more, preferably at least 90% or more, preferably at least 95% or more, and most preferably at least 99% or more of the wildtype amino acids (or nucleotides encoding them). Some trimming may be possible, and mutants are envisaged. Non-functional domains may be removed entirely. What is important is that the two parts may be brought together and that the desired Cas function is restored or reconstituted. The dimer may be a homodimer or a heterodimer.

[0167] The effector protein can moreover be fused to another functional RNase domain, such as a non-specific RNase or Argonaute 2, which acts in synergy to increase the RNase activity or to ensure further degradation of the message.

### Modulating Cas Proteins

[0168] The invention provides accessory proteins that modulate CRISPR protein function. In certain embodiments, the accessory protein modulates catalytic activity of a CRISPR protein. In an embodiment of the invention an accessory protein modulates targeted, or sequence specific, nuclease activity. In an embodiment of the invention, an accessory protein modulates collateral nuclease activity. In an embodiment of the invention, an accessory protein modulates binding to a target nucleic acid.

[0169] According to the invention, the nuclease activity to be modulated can be directed against nucleic acids comprising or consisting of RNA, including without limitation mRNA, miRNA, siRNA and nucleic acids comprising cleavable RNA linkages along with nucleotide analogs. In an embodiment of the invention, the nuclease activity to be modulated can be directed against nucleic acids comprising or consisting of DNA, including without limitation nucleic acids comprising cleavable DNA linkages and nucleic acid analogs.

[0170] In an embodiment of the invention, an accessory protein enhances an activity of a CRISPR protein. In certain embodiments, the accessory protein inhibits an activity of a CRISPR protein.

[0171] According to the invention, naturally occurring accessory proteins of Type IV CRISPR systems comprise small proteins encoded at or near a CRISPR locus that function to modify an activity of a CRISPR protein. In general, a CRISPR locus can be identified as comprising a putative CRISPR array and/or encoding a putative CRISPR effector protein. In an embodiment, an effector protein can be from 800 to 2000 amino acids, or from 900 to 1800 amino acids, or from 950 to 1300 amino acids. In an embodiment, an accessory protein can be encoded within 25 kb, or within 20 kb or within 15 kb, or within 10 kb of a putative CRISPR effector protein or array, or from 2 kb to 10 kb from a putative CRISPR effector protein or array.

[0172] In an embodiment of the invention, an accessory protein is from 50 to 300 amino acids, or from 100 to 300 amino acids or from 150 to 250 amino acids or about 200 amino acids.

[0173] Identification and use of a CRISPR accessory protein of the invention is independent of CRISPR effector protein classification. Accessory proteins of the invention can be found in association with or engineered to function with a variety of CRISPR effector proteins. Examples of accessory proteins identified and used herein are representative of CRISPR effector proteins generally. It is understood that CRISPR effector protein classification may involve homology, feature location, nucleic acid target (e.g. DNA or RNA), absence or presence of tracr RNA, location of guide/spacer sequence 5′ or 3′ of a direct repeat, or other criteria. In embodiments of the invention, accessory protein identification and use transcend such classifications.

[0174] According to the invention, in certain embodiments, enhancing activity of a Type IV or Type I Cas protein or complex thereof comprises contacting the Type IV or Type I Cas protein or complex thereof with an accessory protein from the same organism that activates the Cas protein. In other embodiments, enhancing activity of a Type IV or Type I Cas protein of complex thereof comprises contacting the Type IV or Type I Cas protein or complex thereof with an activator accessory protein from a different organism within the same subclass (e.g., Type IV or Type I). In other embodiments, enhancing activity of a Type IV or Type I Cas protein or complex thereof comprises contacting the Type IV or Type I Cas protein or complex thereof with an accessory protein not within the subclass.

[0175] According to the invention, in certain embodiments, repressing activity of a Type IV or Type I Cas protein or complex thereof comprises contacting the Type IV or Type I Cas protein or complex thereof with an accessory protein from the same organism that represses the Cas protein. In other embodiments, repressing activity of a Type IV or Type I Cas protein or complex thereof comprises contacting the Type IV or Type I Cas protein or complex thereof with a repressor accessory protein from a different organism within the same subclass. In other embodiments, repressing activity of a Type IV or Type I Cas protein or complex thereof comprises contacting the Type IV or Type I Cas protein or complex thereof with a repressor accessory protein not within the subclass.

[0176] In certain embodiments where the Type IV or Type I Cas protein and the Type IV or Type I accessory protein are from the same organism, the two proteins will function together in an engineered CRISPR system. In certain embodiments, it will be desirable to alter the function of the engineered CRISPR system, for example by modifying either or both of the proteins or their expression. In embodiments where the Type IV or Type I Cas protein and the Type IV or Type I accessory protein are from different organisms which may be within the same class or different classes, the proteins may function together in an engineered CRISPR system but it will often be desired or necessary to modify either or both of the proteins to function together.

[0177] Accordingly, in certain embodiments of the invention either or both of a Cas protein and an accessory protein may be modified to adjust aspects of protein-protein interactions between the Cas protein and accessory protein. In certain embodiments, either or both of a Cas protein and an accessory protein may be modified to adjust aspects of protein-nucleic acid interactions. Ways to adjust protein-protein interactions and protein-nucleic acid interaction include without limitation, fitting molecular surfaces, polar interactions, hydrogen bonds, and modulating van der Waals interactions. In certain embodiments, adjusting protein-protein interactions or protein-nucleic acid binding comprises increasing or decreasing binding interactions. In certain embodiments, adjusting protein-protein interactions or protein-nucleic acid binding comprises modifications that favor or disfavor a conformation of the protein or nucleic acid.

[0178] By “fitting”, is meant determining including by automatic, or semi-automatic means, interactions between one or more atoms of a Cas protein (and optionally at least one atoms of a Cas accessory protein), or between one or more atoms of a Cas protein and one or more atoms of a nucleic acid, (or optionally between one or more atoms of a Cas accessory protein and a nucleic acid), and calculating the extent to which such interactions are stable. Interactions include attraction and repulsion, brought about by charge, steric considerations and the like.

[0179] The three-dimensional structure of Type IV CRISPR protein or complex thereof provides in the context of the instant invention an additional tool for identifying additional mutations in orthologs of Cas. Further, the three-dimensional structure of Type I CRISPR protein or complex thereof provides in the context of the instant invention an additional tool for identifying additional mutations in orthologs of Cas. The crystal structure can also be basis for the design of new and specific Cass (and optionally Cas accessory proteins). Various computer-based methods for fitting are described further. Binding interactions of Cas (and optionally accessory proteins), and nucleic acids can be examined through the use of computer modeling using a docking program. Docking programs are known; for example, GRAM, DOCK or AUTODOCK (see Walters et al. Drug Discovery Today, vol. 3, no. 4 (1998), 160-178, and Dunbrack et al. Folding and Design 2 (1997), 27-42). This procedure can include computer fitting to ascertain how well the shape and the chemical structure of the binding partners. Computer-assisted, manual examination of the active site or binding site of a Type IV or Type I Cas protein system may be performed. Programs such as GRID (P. Goodford, J. Med. Chem, 1985, 28, 849-57)—a program that determines probable interaction sites between molecules with various functional groups—may also be used to analyze the active site or binding site to predict partial structures of binding compounds. Computer programs can be employed to estimate the attraction, repulsion or steric hindrance of the two binding partners, e.g., components of a Type IV or Type I CRISPR system, or a nucleic acid molecule and a component of a Type IV or Type I CRISPR system.

[0180] Amino acid substitutions may be made on the basis of differences or similarities in amino acid properties (such as polarity, charge, solubility, hydrophobicity, hydrophilicity, and/or the amphipathic nature of the residues) and it is therefore useful to group amino acids together in functional groups. Amino acids may be grouped together based on the properties of their side chains alone. In comparing orthologs, there are likely to be residues conserved for structural or catalytic reasons. These sets may be described in the form of a Venn diagram (Livingstone C. D. and Barton G. J. (1993) “Protein sequence alignments: a strategy for the hierarchical analysis of residue conservation” Comput. Appl. Biosci. 9: 745-756) (Taylor W. R. (1986) “The classification of amino acid conservation” J. Theor. Biol. 119; 205-218). Conservative substitutions may be made, for example according to the Table 9 below which describes a generally accepted Venn diagram grouping of amino acids.

TABLE 9
Generally accepted Venn diagram
grouping of amino acids

| Set | | Sub-set | |
|---|---|---|---|
| Hydro- | F W Y H K M | Aromatic | F W Y H |
| phobic | I L V A G C | | |
| | | Aliphatic | I L V |
| Polar | W Y H K R E | Charged | H K R E D |
| | D C S T N Q | | |
| | | Positively | H K R |
| | | charged | |
| | | Negatively | E D |
| | | charged | |
| Small | V C A G S P | Tiny | A G S |
| | T N D | | |

[0181] In some embodiments, the modifications in Cas may comprise modification of one or more amino acid residues of the Cas protein. In some embodiments, the modifications in Cas may comprise modification of one or more amino acid residues located in a region which comprises residues which are positively charged in the unmodified Cas protein (and/or Cas accessory protein). In some embodiments, the modifications in Cas may comprise modification of one or more amino acid residues which are positively charged in the unmodified Cas protein (and/or Cas accessory protein). In some embodiments, the modifications in Cas may comprise modification of one or more amino acid residues which are not positively charged in the unmodified Cas protein (and/or Cas accessory protein). The modification may comprise modification of one or more amino acid residues which are uncharged in the unmodified Cas protein (and/or Cas accessory protein). The modification may comprise modification of one or more amino acid residues which are negatively charged in the unmodified Cas protein (and/or Cas accessory protein). The modification may comprise modification of one or more amino acid residues which are hydrophobic in the unmodified Cas protein (and/or Cas accessory protein). The modification may comprise modification of one or more amino acid residues which are polar in the unmodified Cas protein (and/or Cas accessory protein). The modification may comprise substitution of a hydrophobic amino acid or polar amino acid with a charged amino acid, which can be a negatively charged or positively charged amino acid. The modification may comprise substitution of a negatively charged amino acid with a positively charged or polar or hydrophobic amino acid. The modification may comprise substitution of a positively charged amino acid with a negatively charged or polar or hydrophobic amino acid.

[0182] Embodiments herein also include sequences (both polynucleotide or polypeptide) which may comprise homologous substitution (substitution and replacement are both used herein to mean the interchange of an existing amino acid residue or nucleotide, with an alternative residue or nucleotide) that may occur i.e., like-for-like substitution in the case of amino acids such as basic for basic, acidic for acidic, polar for polar, etc. Non-homologous substitution may also occur i.e., from one class of residue to another or alternatively involving the inclusion of unnatural amino acids such as ornithine (hereinafter referred to as Z), diaminobutyric acid ornithine (hereinafter referred to as B), norleucine ornithine (hereinafter referred to as O), pyriylalanine, thienylalanine, naphthylalanine and phenylglycine. Variant amino acid sequences may include suitable spacer groups that may be inserted between any two amino acid residues of the sequence including alkyl groups such as methyl, ethyl or propyl groups in addition to amino acid spacers such as glycine or β-alanine residues. A further form of variation, which involves the presence of one or more amino acid residues in peptoid form, may be well understood by those skilled in the art. For the avoidance of doubt, “the peptoid form” is used to refer to variant amino acid residues wherein the α-carbon substituent group is on the residue's nitrogen atom rather than the α-carbon. Processes for preparing peptides in the peptoid form are known in the art, for example Simon R J et al., PNAS (1992) 89(20), 9367-9371 and Horwell D C, Trends Biotechnol. (1995) 13(4), 132-134.

[0183] Homology modelling: Corresponding residues in other Cas orthologs can be identified by the methods of Zhang et al., 2012 (Nature; 490(7421): 556-60) and Chen et al., 2015 (PLoS Comput Biol; 11(5): e1004248)—a computational protein-protein interaction (PPI) method to predict interactions mediated by domain-motif interfaces. PrePPI (Predicting PPI), a structure based PPI prediction method, combines structural evidence with non-structural evidence using a Bayesian statistical framework. The method involves taking a pair a query proteins and using structural alignment to identify structural representatives that correspond to either their experimentally determined structures or homology models. Structural alignment is further used to identify both close and remote structural neighbors by considering global and local geometric relationships. Whenever two neighbors of the structural representatives form a complex reported in the Protein Data Bank, this defines a template for modelling the interaction between the two query proteins. Models of a complex are created by superimposing the representative structures on their corresponding structural neighbor in the template. This approach is in Dey et al., 2013 (Prot Sci; 22: 359-66).

[0184] In another aspect, the disclosure provides a method of altering activity of a Cas protein, comprising: identifying one or more candidate amino acids in the Cas protein based on a three-dimensional structure of at least a portion of the Cas protein, wherein the one or more candidate amino acids interact with a guide RNA that forms a complex with the Cas protein, or are in an inter-domain linker domain, or a bridge helix domain of the Cas protein; and mutating the one or more candidate amino acids thereby generating a mutated Cas protein, wherein activity the mutated Cas protein is different than the Cas protein.

### Crispr-Cas System Promotes Non-Homologous End-Joining

[0185] In certain embodiments, nuclease-induced non-homologous end-joining (NHEJ) can be used to target gene-specific knockouts. Nuclease-induced NHEJ can also be used to remove (e.g., delete) sequence in a gene of interest. Generally, NHEJ repairs a double-strand break in the DNA by joining together the two ends; however, generally, the original sequence is restored only if two compatible ends, exactly as they were formed by the double-strand break, are perfectly ligated. The DNA ends of the double-strand break are frequently the subject of enzymatic processing, resulting in the addition or removal of nucleotides, at one or both strands, prior to rejoining of the ends. This results in the presence of insertion and/or deletion (indel) mutations in the DNA sequence at the site of the NHEJ repair. Two-thirds of these mutations typically alter the reading frame and, therefore, produce a non-functional protein. Additionally, mutations that maintain the reading frame, but which insert or delete a significant amount of sequence, can destroy functionality of the protein. This is locus dependent as mutations in critical functional domains are likely less tolerable than mutations in non-critical regions of the protein. The indel mutations generated by NHEJ are unpredictable in nature; however, at a given break site certain indel sequences are favored and are overrepresented in the population, likely due to small regions of microhomology. The lengths of deletions can vary widely; most commonly in the 1-50 bp range, but they can easily be greater than 50 bp, e.g., they can easily reach greater than about 100-200 bp. Insertions tend to be shorter and often include short duplications of the sequence immediately surrounding the break site. However, it is possible to obtain large insertions, and in these cases, the inserted sequence has often been traced to other regions of the genome or to plasmid DNA present in the cells.

[0186] Because NHEJ is a mutagenic process, it may also be used to delete small sequence motifs as long as the generation of a specific final sequence is not required. If a double-strand break is targeted near to a short target sequence, the deletion mutations caused by the NHEJ repair often span, and therefore remove, the unwanted nucleotides. For the deletion of larger DNA segments, introducing two double-strand breaks, one on each side of the sequence, can result in NHEJ between the ends with removal of the entire intervening sequence. Both of these approaches can be used to delete specific DNA sequences; however, the error-prone nature of NHEJ may still produce indel mutations at the site of repair.

[0187] Both double strand cleaving Cas molecules and single strand, or nickase, Cas molecules can be used in the methods and compositions described herein to generate NHEJ-mediated indels. NHEJ-mediated indels targeted to the gene, e.g., a coding region, e.g., an early coding region of a gene of interest can be used to knockout (i.e., eliminate expression of) a gene of interest. For example, early coding region of a gene of interest includes sequence immediately following a transcription start site, within a first exon of the coding sequence, or within 500 bp of the transcription start site (e.g., less than 500, 450, 400, 350, 300, 250, 200, 150, 100 or 50 bp).

[0188] In an embodiment, in which a guide RNA and Cas nuclease generate a double strand break for the purpose of inducing NHEJ-mediated indels, a guide RNA may be configured to position one double-strand break in close proximity to a nucleotide of the target position. In an embodiment, the cleavage site may be between 0-500 bp away from the target position (e.g., less than 500, 400, 300, 200, 100, 50, 40, 30, 25, 20, 15, 10, 9, 8, 7, 6, 5, 4, 3, 2 or 1 bp from the target position).

[0189] In an embodiment, in which two guide RNAs complexing with Cas nickases induce two single strand breaks for the purpose of inducing NHEJ-mediated indels, two guide RNAs may be configured to position two single-strand breaks to provide for NHEJ repair a nucleotide of the target position.

### Guide Sequences

[0190] The systems and compositions herein may further comprise one or more guide sequences. The guide sequences may hybridize or be capable of hybridizing with a target sequence. In embodiments of the invention the terms guide sequence and guide RNA and crRNA are used interchangeably as in foregoing cited documents such as WO 2014/093622 (PCT/US2013/074667). In general, a guide sequence is any polynucleotide sequence having sufficient complementarity with a target polynucleotide sequence to hybridize with the target sequence and direct sequence-specific binding of a CRISPR complex to the target sequence. In some embodiments, the degree of complementarity between a guide sequence and its corresponding target sequence, when optimally aligned using a suitable alignment algorithm, is about or more than about 50%, 60%, 75%, 80%, 85%, 90%, 95%, 97.5%, 99%, or more. Optimal alignment may be determined with the use of any suitable algorithm for aligning sequences, non-limiting example of which include the Smith-Waterman algorithm, the Needleman-Wunsch algorithm, algorithms based on the Burrows-Wheeler Transform (e.g., the Burrows Wheeler Aligner), ClustalW, Clustal X, BLAT, Novoalign (Novocraft Technologies; available at www.novocraft.com), ELAND (Illumina, San Diego, Calif.), SOAP (available at soap.genomics.org.cn), and Maq (available at maq.sourceforge.net). In some embodiments, a guide sequence is about or more than about 5, 10, 11, 12, 13, 14, 15, 16, 17, 18, 19, 20, 21, 22, 23, 24, 25, 26, 27, 28, 29, 30, 35, 40, 45, 50, 75, or more nucleotides in length. In some embodiments, a guide sequence is less than about 75, 50, 45, 40, 35, 30, 25, 20, 15, 12, or fewer nucleotides in length. Preferably the guide sequence is 10-30 nucleotides long, such as 30 nucleotides long. The ability of a guide sequence to direct sequence-specific binding of a CRISPR complex to a target sequence may be assessed by any suitable assay. For example, the components of a CRISPR system sufficient to form a CRISPR complex, including the guide sequence to be tested, may be provided to a host cell having the corresponding target sequence, such as by transfection with vectors encoding the components of the CRISPR sequence, followed by an assessment of preferential cleavage within the target sequence, such as by Surveyor assay as described herein. Similarly, cleavage of a target polynucleotide sequence may be evaluated in a test tube by providing the target sequence, components of a CRISPR complex, including the guide sequence to be tested and a control guide sequence different from the test guide sequence, and comparing binding or rate of cleavage at the target sequence between the test and control guide sequence reactions. Other assays are possible, and will occur to those skilled in the art. A guide sequence may be selected to target any target sequence. In some embodiments, the target sequence is a sequence within a genome of a cell. Exemplary target sequences include those that are unique in the target genome.

[0191] As used herein, the term “crRNA” or “guide RNA” or “single guide RNA” or “sgRNA” or “one or more nucleic acid components” of a Type IV CRISPR-Cas locus effector protein comprises any polynucleotide sequence having sufficient complementarity with a target nucleic acid sequence to hybridize with the target nucleic acid sequence and direct sequence-specific binding of a nucleic acid-targeting complex to the target nucleic acid sequence.

[0192] In certain embodiments, the CRISPR system as provided herein can make use of a crRNA or analogous polynucleotide comprising a guide sequence, wherein the polynucleotide is an RNA, a DNA or a mixture of RNA and DNA, and/or wherein the polynucleotide comprises one or more nucleotide analogs. The sequence can comprise any structure, including but not limited to a structure of a native crRNA, such as a bulge, a hairpin or a stem loop structure. In certain embodiments, the polynucleotide comprising the guide sequence forms a duplex with a second polynucleotide sequence which can be an RNA or a DNA sequence.

[0193] In certain embodiments, guides of the invention comprise non-naturally occurring nucleic acids and/or non-naturally occurring nucleotides and/or nucleotide analogs, and/or chemically modifications. Non-naturally occurring nucleic acids can include, for example, mixtures of naturally and non-naturally occurring nucleotides. Non-naturally occurring nucleotides and/or nucleotide analogs may be modified at the ribose, phosphate, and/or base moiety. In an embodiment of the invention, a guide nucleic acid comprises ribonucleotides and non-ribonucleotides. In one such embodiment, a guide comprises one or more ribonucleotides and one or more deoxyribonucleotides. In an embodiment of the invention, the guide comprises one or more non-naturally occurring nucleotide or nucleotide analog such as a nucleotide with phosphorothioate linkage, boranophosphate linkage, a locked nucleic acid (LNA) nucleotides comprising a methylene bridge between the 2′ and 4′ carbons of the ribose ring, or bridged nucleic acids (BNA). Other examples of modified nucleotides include 2′-O-methyl analogs, 2′-deoxy analogs, 2-thiouridine analogs, N6-methyladenosine analogs, or 2′-fluoro analogs. Further examples of modified bases include, but are not limited to, 2-aminopurine, 5-bromo-uridine, pseudouridine (Ψ), N1-methylpseudouridine (me1Ψ), 5-methoxyuridine(5moU), inosine, 7-methylguanosine. Examples of guide RNA chemical modifications include, without limitation, incorporation of 2′-O-methyl (M), 2′-O-methyl 3′phosphorothioate (MS), S-constrained ethyl (cEt), or 2′-O-methyl 3′thioPACE (MSP) at one or more terminal nucleotides. Such chemically modified guide RNAs can comprise increased stability and increased activity as compared to unmodified guide RNAs, though on-target vs. off-target specificity is not predictable. (See, Hendel, 2015, Nat Biotechnol. 33(9):985-9, doi: 10.1038/nbt.3290, published online 29 Jun. 2015; Allerson et al., J. Med. Chem. 2005, 48:901-904; Bramsen et al., Front. Genet., 2012, 3:154; Deng et al., PNAS, 2015, 112:11870-11875; Sharma et al., Med Chem Comm., 2014, 5:1454-1471; Li et al., Nature Biomedical Engineering, 2017, 1, 0066 DOI:10.1038/s41551-017-0066).

[0194] In certain embodiments, the gRNA (crRNA) binding of the Cas protein of the invention is altered or modified. It is to be understood that mutated Cas has an altered or modified gRNA binding if the gRNA binding is different than the gRNA binding of the corresponding wild type Cas (i.e. unmutated Cas). gRNA binding can be determined by means known in the art. By means of example, and without limitation, gRNA binding can be determined by calculating binding strength or affinity (such as based on equilibrium constants, Ka, Kd, etc.). In certain embodiments, gRNA binding is increased. In certain embodiments, gRNA binding is increased by at least 5%, preferably at least 10%, more preferably at least 20%, such as at least 30%, at least 40%, at least 50%, at least 60%, at least 70%, at least 80%, at least 90%, or at least 100%. In certain embodiments, gRNA binding is decreased. In certain embodiments, gRNA binding is decreased by at least 5%, preferably at least 10%, more preferably at least 20%, such as at least 30%, at least 40%, at least 50%, at least 60%, at least 70%, at least 80%, at least 90%, or (substantially) 100%.

[0195] In some embodiments, the 5′ and/or 3′ end of a guide RNA is modified by a variety of functional moieties including fluorescent dyes, polyethylene glycol, cholesterol, proteins, or detection tags. (See Kelly et al., 2016, J. Biotech. 233:74-83). In certain embodiments, a guide comprises ribonucleotides in a region that binds to a target DNA and one or more deoxyribonucleotides and/or nucleotide analogs in a region that binds to Cas. In an embodiment of the invention, deoxyribonucleotides and/or nucleotide analogs are incorporated in engineered guide structures, such as, without limitation, 5′ and/or 3′ end, stem-loop regions, and the seed region. In certain embodiments, the modification is not in the 5′-handle of the stem-loop regions. Chemical modification in the 5′-handle of the stem-loop region of a guide may abolish its function (see Li, et al., Nature Biomedical Engineering, 2017, 1:0066). In certain embodiments, at least 1, 2, 3, 4, 5, 6, 7, 8, 9, 10, 11, 12, 13, 14, 15, 16, 17, 18, 19, 20, 21, 22, 23, 24, 25, 26, 27, 28, 29, 30, 35, 40, 45, 50, or 75 nucleotides of a guide is chemically modified. In some embodiments, 3-5 nucleotides at either the 3′ or the 5′ end of a guide is chemically modified. In some embodiments, only minor modifications are introduced in the seed region, such as 2′-F modifications. In some embodiments, 2′-F modification is introduced at the 3′ end of a guide. In certain embodiments, three to five nucleotides at the 5′ and/or the 3′ end of the guide are chemically modified with 2′-O-methyl (M), 2′-O-methyl-3′-phosphorothioate (MS), S-constrained ethyl(cEt), or 2′-O-methyl-3′-thioPACE (MSP). Such modification can enhance genome editing efficiency (see Hendel et al., Nat. Biotechnol. (2015) 33(9): 985-989). In certain embodiments, all of the phosphodiester bonds of a guide are substituted with phosphorothioates (PS) for enhancing levels of gene disruption. In certain embodiments, more than five nucleotides at the 5′ and/or the 3′ end of the guide are chemically modified with 2′-O-Me, 2′-F or S-constrained ethyl(cEt). Such chemically modified guide can mediate enhanced levels of gene disruption (see Ragdarm et al., 0215, PNAS, E7110-E7111). In an embodiment of the invention, a guide is modified to comprise a chemical moiety at its 3′ and/or 5′ end. Such moieties include, but are not limited to amine, azide, alkyne, thio, dibenzocyclooctyne (DBCO), or Rhodamine. In certain embodiment, the chemical moiety is conjugated to the guide by a linker, such as an alkyl chain. In certain embodiments, the chemical moiety of the modified guide can be used to attach the guide to another molecule, such as DNA, RNA, protein, or nanoparticles. Such chemically modified guide can be used to identify or enrich cells generically edited by a CRISPR system (see Lee et al., eLife, 2017, 6:e25312, DOI:10.7554)

[0196] In some embodiments, the modification to the guide is a chemical modification, an insertion, a deletion or a split. In some embodiments, the chemical modification includes, but is not limited to, incorporation of 2′-O-methyl (M) analogs, 2′-deoxy analogs, 2-thiouridine analogs, N6-methyladenosine analogs, 2′-fluoro analogs, 2-aminopurine, 5-bromo-uridine, pseudouridine (Ψ), N1-methylpseudouridine (me1Ψ), 5-methoxyuridine(5moU), inosine, 7-methylguanosine, 2′-O-methyl-3′-phosphorothioate (MS), S-constrained ethyl(cEt), phosphorothioate (PS), or 2′-O-methyl-3′-thioPACE (MSP). In some embodiments, the guide comprises one or more of phosphorothioate modifications. In certain embodiments, at least 1, 2, 3, 4, 5, 6, 7, 8, 9, 10, 11, 12, 13, 14, 15, 16, 17, 18, 19, 20, or 25 nucleotides of the guide are chemically modified. In certain embodiments, one or more nucleotides in the seed region are chemically modified. In certain embodiments, one or more nucleotides in the 3′-terminus are chemically modified. In certain embodiments, none of the nucleotides in the 5′-handle is chemically modified. In some embodiments, the chemical modification in the seed region is a minor modification, such as incorporation of a 2′-fluoro analog. In a specific embodiment, one nucleotide of the seed region is replaced with a 2′-fluoro analog. In some embodiments, 5 or 10 nucleotides in the 3′-terminus are chemically modified. Such chemical modifications at the 3′-terminus of the Cpf1 CrRNA improve gene cutting efficiency (see Li, et al., Nature Biomedical Engineering, 2017, 1:0066). In a specific embodiment, 5 nucleotides in the 3′-terminus are replaced with 2′-fluoro analogues. In a specific embodiment, 10 nucleotides in the 3′-terminus are replaced with 2′-fluoro analogues. In a specific embodiment, 5 nucleotides in the 3′-terminus are replaced with 2′-O-methyl (M) analogs.

[0197] In some embodiments, the loop of the 5′-handle of the guide is modified. In some embodiments, the loop of the 5′-handle of the guide is modified to have a deletion, an insertion, a split, or chemical modifications. In certain embodiments, the loop comprises 3, 4, or 5 nucleotides. In certain embodiments, the loop comprises the sequence of UCUU, UUUU, UAUU, or UGUU.

[0198] In one aspect, the guide comprises portions that are chemically linked or conjugated via a non-phosphodiester bond. In one aspect, the guide comprises, in non-limiting examples, direct repeat sequence portion and a targeting sequence portion that are chemically linked or conjugated via a non-nucleotide loop. In some embodiments, the portions are joined via a non-phosphodiester covalent linker. Examples of the covalent linker include but are not limited to a chemical moiety selected from the group consisting of carbamates, ethers, esters, amides, imines, amidines, aminotrizines, hydrozone, disulfides, thioethers, thioesters, phosphorothioates, phosphorodithioates, sulfonamides, sulfonates, fulfones, sulfoxides, ureas, thioureas, hydrazide, oxime, triazole, photolabile linkages, C—C bond forming groups such as Diels-Alder cyclo-addition pairs or ring-closing metathesis pairs, and Michael reaction pairs.

[0199] In some embodiments, portions of the guide are first synthesized using the standard phosphoramidite synthetic protocol (Herdewijn, P., ed., Methods in Molecular Biology Col 288, Oligonucleotide Synthesis: Methods and Applications, Humana Press, New Jersey (2012)). In some embodiments, the non-targeting guide portions can be functionalized to contain an appropriate functional group for ligation using the standard protocol known in the art (Hermanson, G. T., Bioconjugate Techniques, Academic Press (2013)). Examples of functional groups include, but are not limited to, hydroxyl, amine, carboxylic acid, carboxylic acid halide, carboxylic acid active ester, aldehyde, carbonyl, chlorocarbonyl, imidazolylcarbonyl, hydrozide, semicarbazide, thio semicarbazide, thiol, maleimide, haloalkyl, sufonyl, ally, propargyl, diene, alkyne, and azide. Once a non-targeting portions of a guide is functionalized, a covalent chemical bond or linkage can be formed between the two oligonucleotides. Examples of chemical bonds include, but are not limited to, those based on carbamates, ethers, esters, amides, imines, amidines, aminotrizines, hydrozone, disulfides, thioethers, thioesters, phosphorothioates, phosphorodithioates, sulfonamides, sulfonates, fulfones, sulfoxides, ureas, thioureas, hydrazide, oxime, triazole, photolabile linkages, C—C bond forming groups such as Diels-Alder cyclo-addition pairs or ring-closing metathesis pairs, and Michael reaction pairs.

[0200] In some embodiments, one or more portions of a guide can be chemically synthesized. In some embodiments, the chemical synthesis uses automated, solid-phase oligonucleotide synthesis machines with 2′-acetoxyethyl orthoester (2′-ACE) (Scaringe et al., J. Am. Chem. Soc. (1998) 120: 11820-11821; Scaringe, Methods Enzymol. (2000) 317: 3-18) or 2′-thionocarbamate (2′-TC) chemistry (Dellinger et al., J. Am. Chem. Soc. (2011) 133: 11540-11546; Hendel et al., Nat. Biotechnol. (2015) 33:985-989).

[0201] In some embodiments, the guide portions can be covalently linked using various bioconjugation reactions, loops, bridges, and non-nucleotide links via modifications of sugar, internucleotide phosphodiester bonds, purine and pyrimidine residues. Sletten et al., Angew. Chem. Int. Ed. (2009) 48:6974-6998; Manoharan, M. Curr. Opin. Chem. Biol. (2004) 8: 570-9; Behlke et al., Oligonucleotides (2008) 18: 305-19; Watts, et al., Drug. Discov. Today (2008) 13: 842-55; Shukla, et al., Chem Med Chem (2010) 5: 328-49.

[0202] In some embodiments, the guide portions can be covalently linked using click chemistry. In some embodiments, guide portions can be covalently linked using a triazole linker. In some embodiments, guide portions can be covalently linked using Huisgen 1,3-dipolar cycloaddition reaction involving an alkyne and azide to yield a highly stable triazole linker (He et al., Chem Bio Chem (2015) 17: 1809-1812; WO 2016/186745). In some embodiments, guide portions are covalently linked by ligating a 5′-hexyne portion and a 3′-azide portion. In some embodiments, either or both of the 5′-hexyne guide portion and a 3′-azide guide portion can be protected with 2′-acetoxyethl orthoester (2′-ACE) group, which can be subsequently removed using Dharmacon protocol (Scaringe et al., J. Am. Chem. Soc. (1998) 120: 11820-11821; Scaringe, Methods Enzymol. (2000) 317: 3-18).

[0203] In some embodiments, guide portions can be covalently linked via a linker (e.g., a non-nucleotide loop) that comprises a moiety such as spacers, attachments, bioconjugates, chromophores, reporter groups, dye labeled RNAs, and non-naturally occurring nucleotide analogues. More specifically, suitable spacers for purposes of this invention include, but are not limited to, polyethers (e.g., polyethylene glycols, polyalcohols, polypropylene glycol or mixtures of efhylene and propylene glycols), polyamines group (e.g., spennine, spermidine and polymeric derivatives thereof), polyesters (e.g., poly(ethyl acrylate)), polyphosphodiesters, alkylenes, and combinations thereof. Suitable attachments include any moiety that can be added to the linker to add additional properties to the linker, such as but not limited to, fluorescent labels. Suitable bioconjugates include, but are not limited to, peptides, glycosides, lipids, cholesterol, phospholipids, diacyl glycerols and dialkyl glycerols, fatty acids, hydrocarbons, enzyme substrates, steroids, biotin, digoxigenin, carbohydrates, polysaccharides. Suitable chromophores, reporter groups, and dye-labeled RNAs include, but are not limited to, fluorescent dyes such as fluorescein and rhodamine, chemiluminescent, electrochemiluminescent, and bioluminescent marker compounds. The design of example linkers conjugating two RNA components are also described in WO 2004/015075.

[0204] The linker (e.g., a non-nucleotide loop) can be of any length. In some embodiments, the linker has a length equivalent to about 0-16 nucleotides. In some embodiments, the linker has a length equivalent to about 0-8 nucleotides. In some embodiments, the linker has a length equivalent to about 0-4 nucleotides. In some embodiments, the linker has a length equivalent to about 2 nucleotides. Example linker design is also described in WO2011/008730.

[0205] In some embodiments, the degree of complementarity, when optimally aligned using a suitable alignment algorithm, is about or more than about 50%, 60%, 75%, 80%, 85%, 90%, 95%, 97.5%, 99%, or more. Optimal alignment may be determined with the use of any suitable algorithm for aligning sequences, non-limiting example of which include the Smith-Waterman algorithm, the Needleman-Wunsch algorithm, algorithms based on the Burrows-Wheeler Transform (e.g., the Burrows Wheeler Aligner), ClustalW, Clustal X, BLAT, Novoalign (Novocraft Technologies; available at www.novocraft.com), ELAND (Illumina, San Diego, Calif.), SOAP (available at soap.genomics.org.cn), and Maq (available at maq.sourceforge.net). The ability of a guide sequence (within a guide RNA or crRNA) to direct sequence-specific binding of a nucleic acid-targeting complex to a target nucleic acid sequence may be assessed by any suitable assay. For example, the components of a CRISPR-Cas system sufficient to form a nucleic acid-targeting complex, including the guide sequence to be tested, may be provided to a host cell having the corresponding target nucleic acid sequence, such as by transfection with vectors encoding the components of the nucleic acid-targeting complex, followed by an assessment of preferential targeting (e.g., cleavage) within the target nucleic acid sequence, such as by Surveyor assay as described herein. Similarly, cleavage of a target nucleic acid sequence may be evaluated in a test tube by providing the target nucleic acid sequence, components of a nucleic acid-targeting complex, including the guide sequence to be tested and a control guide sequence different from the test guide sequence, and comparing binding or rate of cleavage at the target sequence between the test and control guide sequence reactions. Other assays are possible, and will occur to those skilled in the art. A guide sequence, and hence a guide RNA or crRNA may be selected to target any target nucleic acid sequence. The target sequence may be DNA. The target sequence may be any RNA sequence. In some embodiments, the target sequence may be a sequence within a RNA molecule selected from the group consisting of messenger RNA (mRNA), pre-mRNA, ribosomal RNA (rRNA), transfer RNA (tRNA), micro-RNA (miRNA), small interfering RNA (siRNA), small nuclear RNA (snRNA), small nucleolar RNA (snoRNA), double stranded RNA (dsRNA), non-coding RNA (ncRNA), long non-coding RNA (lncRNA), and small cytoplasmatic RNA (scRNA). In some preferred embodiments, the target sequence may be a sequence within a RNA molecule selected from the group consisting of mRNA, pre-mRNA, and rRNA. In some preferred embodiments, the target sequence may be a sequence within a RNA molecule selected from the group consisting of ncRNA, and lncRNA. In some more preferred embodiments, the target sequence may be a sequence within an mRNA molecule or a pre-mRNA molecule.

[0206] In some embodiments, a guide RNA or crRNA is selected to reduce the degree secondary structure within the guide RNA or crRNA. In some embodiments, about or less than about 75%, 50%, 40%, 30%, 25%, 20%, 15%, 10%, 5%, 1%, or fewer of the nucleotides of the guide RNA participates in self-complementary base pairing when optimally folded. Optimal folding may be determined by any suitable polynucleotide folding algorithm. Some programs are based on calculating the minimal Gibbs free energy. An example of one such algorithm is mFold, as described by Zuker and Stiegler (Nucleic Acids Res. 9 (1981), 133-148). Another example folding algorithm is the online webserver RNAfold, developed at Institute for Theoretical Chemistry at the University of Vienna, using the centroid structure prediction algorithm (see e.g., A. R. Gruber et al., 2008, Cell 106(1): 23-24; and PA Carr and GM Church, 2009, Nature Biotechnology 27(12): 1151-62).

[0207] In some embodiments, a nucleic acid-targeting guide is designed or selected to modulate intermolecular interactions among guide molecules, such as among stem-loop regions of different guide molecules. It will be appreciated that nucleotides within a guide that base-pair to form a stem-loop are also capable of base-pairing to form an intermolecular duplex with a second guide and that such an intermolecular duplex would not have a secondary structure compatible with CRISPR complex formation. Accordingly, is useful to select or design DR sequences in order to modulate stem-loop formation and CRISPR complex formation. In some embodiments, about or less than about 75%, 50%, 40%, 30%, 25%, 20%, 15%, 10%, 5%, 1%, or fewer of nucleic acid-targeting guides are in intermolecular duplexes. It will be appreciated that stem-loop variation will often be within limits imposed by DR-CRISPR effector interactions. One way to modulate stem-loop formation or change the equilibrium between stem-loop and intermolecular duplex is to vary nucleotide pairs in the stem of the stem-loop of a DR. For example, in one embodiment, a G-C pair is replaced by an A-U or U-A pair. In another embodiment, an A-U pair is substituted for a G-C or a C-G pair. In another embodiment, a naturally occurring nucleotide is replaced by a nucleotide analog. Another way to modulate stem-loop formation or change the equilibrium between stem-loop and intermolecular duplex is to modify the loop of the stem-loop of a DR. Without be bound by theory, the loop can be viewed as an intervening sequence flanked by two sequences that are complementary to each other. When that intervening sequence is not self-complementary, its effect will be to destabilize intermolecular duplex formation. The same principle applies when guides are multiplexed: while the targeting sequences may differ, it may be advantageous to modify the stem-loop region in the DRs of the different guides. Moreover, when guides are multiplexed, the relative activities of the different guides can be modulated by balancing the activity of each individual guide. In certain embodiments, the equilibrium between intermolecular stem-loops vs. intermolecular duplexes is determined. The determination may be made by physical or biochemical means and can be in the presence or absence of a CRISPR effector.

[0208] In certain embodiments, a guide RNA or crRNA may comprise, consist essentially of, or consist of a direct repeat (DR) sequence and a guide sequence or spacer sequence. In certain embodiments, the guide RNA or crRNA may comprise, consist essentially of, or consist of a direct repeat sequence fused or linked to a guide sequence or spacer sequence. In certain embodiments, the direct repeat sequence may be located upstream (i.e., 5′) from the guide sequence or spacer sequence. In other embodiments, the direct repeat sequence may be located downstream (i.e., 3′) from the guide sequence or spacer sequence. In other embodiments, multiple DRs (such as dual DRs) may be present.

[0209] In certain embodiments, the crRNA comprises a stem loop, preferably a single stem loop. In certain embodiments, the direct repeat sequence forms a stem loop, preferably a single stem loop.

[0210] In certain embodiments, the spacer length of the guide RNA is from 15 to 35 nt. In certain embodiments, the spacer length of the guide RNA is at least 15 nucleotides. In certain embodiments, the spacer length is from 15 to 17 nt, e.g., 15, 16, or 17 nt, from 17 to 20 nt, e.g., 17, 18, 19, or 20 nt, from 20 to 24 nt, e.g., 20, 21, 22, 23, or 24 nt, from 23 to 25 nt, e.g., 23, 24, or 25 nt, from 24 to 27 nt, e.g., 24, 25, 26, or 27 nt, from 27-30 nt, e.g., 27, 28, 29, or 30 nt, from 30-35 nt, e.g., 30, 31, 32, 33, 34, or 35 nt, or 35 nt or longer.

[0211] The “tracrRNA” sequence or analogous terms includes any polynucleotide sequence that has sufficient complementarity with a crRNA sequence to hybridize. In general, degree of complementarity is with reference to the optimal alignment of the sca sequence and tracr sequence, along the length of the shorter of the two sequences. Optimal alignment may be determined by any suitable alignment algorithm, and may further account for secondary structures, such as self-complementarity within either the sca sequence or tracr sequence. In some embodiments, the degree of complementarity between the tracr sequence and sca sequence along the length of the shorter of the two when optimally aligned is about or more than about 25%, 30%, 40%, 50%, 60%, 70%, 80%, 90%, 95%, 97.5%, 99%, or higher. In certain embodiments, the tracrRNA may not be required. Indeed, the CRISPR-Cas protein from Bergeyella zoohelcum and orthologs thereof do not require a tracrRNA to ensure cleavage of an RNA target.

[0212] In further detail, the assay is as follows for a RNA target, provided that a PAM sequence is required to direct recognition. Two E. coli strains are used in this assay. One carries a plasmid that encodes the endogenous effector protein locus from the bacterial strain. The other strain carries an empty plasmid (e.g., pACYC184, control strain). All possible 7 or 8 bp PAM sequences are presented on an antibiotic resistance plasmid (pUC19 with ampicillin resistance gene). The PAM is located next to the sequence of proto-spacer 1 (the RNA target to the first spacer in the endogenous effector protein locus). Two PAM libraries were cloned.

[0213] One has a 8 random bp 5′ of the proto-spacer (e.g., total of 65536 different PAM sequences=complexity). The other library has 7 random bp 3′ of the proto-spacer (e.g., total complexity is 16384 different PAMs). Both libraries were cloned to have in average 500 plasmids per possible PAM. Test strain and control strain were transformed with 5′PAM and 3′PAM library in separate transformations and transformed cells were plated separately on ampicillin plates. Recognition and subsequent cutting/interference with the plasmid renders a cell vulnerable to ampicillin and prevents growth. Approximately 12h after transformation, all colonies formed by the test and control strains where harvested and plasmid RNA was isolated. Plasmid RNA was used as template for PCR amplification and subsequent deep sequencing. Representation of all PAMs in the untransformed libraries showed the expected representation of PAMs in transformed cells. Representation of all PAMs found in control strains showed the actual representation. Representation of all PAMs in test strain showed which PAMs are not recognized by the enzyme and comparison to the control strain allows extracting the sequence of the depleted PAM. In particular embodiments, the cleavage, such as the RNA cleavage is not PAM dependent.

[0214] For minimization of toxicity and off-target effect, it will be important to control the concentration of guide RNA delivered. Optimal concentrations of nucleic acid—targeting guide RNA can be determined by testing different concentrations in a cellular or non-human eukaryote animal model and using deep sequencing the analyze the extent of modification at potential off-target genomic loci. The concentration that gives the highest level of on-target modification while minimizing the level of off-target modification should be chosen for in vivo delivery. The system is derived advantageously from a CRISPR-Cas system. Dead guide sequences

[0215] In one aspect, the invention provides guide sequences which are modified in a manner which allows for formation of the CRISPR Cas complex and successful binding to the target, while at the same time, not either allowing for or not allowing for successful nuclease activity (i.e., without nuclease activity/without indel activity). For matters of explanation such modified guide sequences are referred to as “dead guides” or “dead guide sequences”. These dead guides or dead guide sequences can be thought of as catalytically inactive or conformationally inactive with regard to nuclease activity. Indeed, dead guide sequences may not sufficiently engage in productive base pairing with respect to the ability to promote catalytic activity or to distinguish on-target and off-target binding activity. Briefly, the assay involves synthesizing a CRISPR target RNA and guide RNAs comprising mismatches with the target RNA, combining these with the enzyme and analyzing cleavage based on gels based on the presence of bands generated by cleavage products, and quantifying cleavage based upon relative band intensities.

[0216] Hence, in a related aspect, the invention provides a non-naturally occurring or engineered composition CRISPR-Cas system comprising a functional enzyme as described herein, and guide RNA (gRNA) or crRNA wherein the gRNA or crRNA comprises a dead guide sequence whereby the gRNA is capable of hybridizing to a target sequence such that the CRISPR-Cas system is directed to a genomic locus of interest in a cell without detectable RNA cleavage activity of a non-mutant enzyme of the system. It is to be understood that any of the gRNAs or crRNAs according to the invention as described herein elsewhere may be used as dead gRNAs/crRNAs comprising a dead guide sequence.

[0217] The ability of a dead guide sequence to direct sequence-specific binding of a CRISPR complex to an RNA target sequence may be assessed by any suitable assay. For example, the components of a CRISPR-Cas system sufficient to form a CRISPR-Cas complex, including the dead guide sequence to be tested, may be provided to a host cell having the corresponding target sequence, such as by transfection with vectors encoding the components of the system, followed by an assessment of preferential cleavage within the target sequence.

[0218] As explained further herein, several structural parameters allow for a proper framework to arrive at such dead guides. Dead guide sequences can be typically shorter than respective guide sequences which result in active RNA cleavage. In particular embodiments, dead guides are 5%, 10%, 20%, 30%, 40%, 50%, shorter than respective guides directed to the same.

[0219] As explained below and known in the art, one aspect of gRNA or crRNA—specificity is the direct repeat sequence, which is to be appropriately linked to such guides. In particular, this implies that the direct repeat sequences are designed dependent on the origin of the enzyme. Structural data available for validated dead guide sequences may be used for designing CRISPR-Cas specific equivalents. Structural similarity between, e.g., the orthologous nuclease domains of two or more CRISPR-Cas proteins may be used to transfer design equivalent dead guides. Thus, the dead guide herein may be appropriately modified in length and sequence to reflect such CRISPR-Cas specific equivalents, allowing for formation of the CRISPR-Cas complex and successful binding to the target RNA, while at the same time, not allowing for successful nuclease activity.

[0220] Dead guides allow one to use gRNA or crRNA as a means for gene targeting, without the consequence of nuclease activity, while at the same time providing directed means for activation or repression. Guide RNA or crRNA comprising a dead guide may be modified to further include elements in a manner which allow for activation or repression of gene activity, in particular protein adaptors (e.g. aptamers) as described herein elsewhere allowing for functional placement of gene effectors (e.g. activators or repressors of gene activity). One example is the incorporation of aptamers, as explained herein and in the state of the art. By engineering the gRNA or crRNA comprising a dead guide to incorporate protein-interacting aptamers (Konermann et al., “Genome-scale transcription activation by an engineered CRISPR-Cas9 complex,” doi:10.1038/nature14136, incorporated herein by reference), one may assemble multiple distinct effector domains. Such may be modeled after natural processes.

[0221] The use of two different aptamers (each associated with a distinct nucleic acid-targeting guide RNAs) allows an activator-adaptor protein fusion and a repressor-adaptor protein fusion to be used, with different nucleic acid-targeting guide RNAs or crRNAs, to activate expression of RNA, whilst repressing another. They, along with their different guide RNAs or crRNAs can be administered together, or substantially together, in a multiplexed approach. A large number of such modified RNA-targeting guide RNAs or crRNAs can be used all at the same time, for example 10 or 20 or 30 and so forth, whilst only one (or at least a minimal number) of Cas protein molecules need to be delivered, as a comparatively small number of effector protein molecules can be used with a large number of modified guides. The adaptor protein may be associated (preferably linked or fused to) one or more activators or one or more repressors. For example, the adaptor protein may be associated with a first activator and a second activator. The first and second activators may be the same, but they are preferably different activators. Three or more or even four or more activators (or repressors) may be used, but package size may limit the number being higher than 5 different functional domains. Linkers are preferably used, over a direct fusion to the adaptor protein, where two or more functional domains are associated with the adaptor protein. Suitable linkers might include the GlySer linker.

### Mismatches

[0222] In some embodiments, at least one guide polynucleotide comprises a mismatch. The mismatch may be up- or downstream of a single nucleotide variation on the one or more guide sequences. In certain embodiments, modulations of cleavage efficiency can be exploited by introduction of mismatches, e.g. 1 or more mismatches, such as 1 or 2 mismatches between spacer sequence and target sequence, including the position of the mismatch along the spacer/target. The more central (i.e. not 3′ or 5′) for instance a double mismatch is, the more cleavage efficiency is affected. Accordingly, by choosing mismatch position along the spacer, cleavage efficiency can be modulated. By means of example, if less than 100% cleavage of targets is desired (e.g. in a cell population), 1 or more, such as preferably 2 mismatches between spacer and target sequence may be introduced in the spacer sequences. The more central along the spacer of the mismatch position, the lower the cleavage percentage. In certain example embodiments, the cleavage efficiency may be exploited to design single guides that can distinguish two or more targets that vary by a single nucleotide, such as a single nucleotide polymorphism (SNP), variation, or (point) mutation. The CRISPR effector may have reduced sensitivity to SNPs (or other single nucleotide variations) and continue to cleave SNP targets with a certain level of efficiency. Thus, for two targets, or a set of targets, a guide RNA may be designed with a nucleotide sequence that is complementary to one of the targets i.e. the on-target SNP. The guide RNA is further designed to have a synthetic mismatch. As used herein a “synthetic mismatch” refers to a non-naturally occurring mismatch that is introduced upstream or downstream of the naturally occurring SNP, such as at most 5 nucleotides upstream or downstream, for instance 4, 3, 2, or 1 nucleotide upstream or downstream, preferably at most 3 nucleotides upstream or downstream, more preferably at most 2 nucleotides upstream or downstream, most preferably 1 nucleotide upstream or downstream (i.e. adjacent the SNP). When the CRISPR effector binds to the on-target SNP, only a single mismatch will be formed with the synthetic mismatch and the CRISPR effector will continue to be activated and a detectable signal produced. When the guide RNA hybridizes to an off-target SNP, two mismatches will be formed, the mismatch from the SNP and the synthetic mismatch, and no detectable signal generated. Thus, the systems disclosed herein may be designed to distinguish SNPs within a population. For, example the systems may be used to distinguish pathogenic strains that differ by a single SNP or detect certain disease specific SNPs, such as but not limited to, disease associated SNPs, such as without limitation cancer associated SNPs.

[0223] In certain embodiments, the guide RNA is designed such that the mismatch (e.g. The synthetic mismatch, e.g., an additional mutation besides a SNP) is located on position 1, 2, 3, 4, 5, 6, 7, 8, 9, 10, 11, 12, 13, 14, 15, 16, 17, 18, 19, 20, 21, 22, 23, 24, 25, 26, 27, 28, 29, or 30 of the spacer sequence (starting at the 5′ end). In certain embodiments, the guide RNA is designed such that the mismatch is located on position 1, 2, 3, 4, 5, 6, 7, 8, or 9 of the spacer sequence (starting at the 5′ end). In certain embodiments, the guide RNA is designed such that the mismatch is located on position 4, 5, 6, or 7 of the spacer sequence (starting at the 5′ end. In certain embodiments, the guide RNA is designed such that the mismatch is located on position 5 of the spacer sequence (starting at the 5′ end).

[0224] In certain embodiments, the guide RNA is designed such that the mismatch is located 2 nucleotides upstream of the SNP (i.e. one intervening nucleotide). In certain embodiments, the guide RNA is designed such that the mismatch is located 2 nucleotides downstream of the SNP (i.e. one intervening nucleotide). In certain embodiments, the guide RNA is designed such that the mismatch is located on position 5 of the spacer sequence (starting at the 5′ end) and the SNP is located on position 3 of the spacer sequence (starting at the 5′ end).

[0225] In an aspect the invention provides a system for specific delivery of functional components to the RNA environment. This can be ensured using the CRISPR systems comprising the Cas proteins of the present invention which allow specific targeting of different components to RNA. More particularly such components include activators or repressors, such as activators or repressors of RNA translation, degradation, etc. Applications of this system are described elsewhere herein.

### Determination of PAM

[0226] In certain embodiments, a protospacer adjacent motif (PAM) or PAM-like motif directs binding of the Cas protein complex as disclosed herein to the target locus of interest. In some embodiments, the PAM may be a 5′ PAM (i.e., located upstream of the 5′ end of the protospacer). In other embodiments, the PAM may be a 3′ PAM (i.e., located downstream of the 5′ end of the protospacer). In other embodiments, both a 5′ PAM and a 3′ PAM are required. In one example, the PAM comprises or is CC. In certain examples, the PAM is or comprises (C/T)CN (e.g., a 5′ CCN or TCN). In certain examples, the PAM is or comprises GG.

[0227] In certain embodiments, a PAM or PAM-like motif may not be required for directing binding of the effector protein (e.g. a Cas protein). In certain embodiments, a 5′ PAM is D (e.g., A, G, or U). In certain embodiments of the invention, cleavage at repeat sequences may generate crRNAs (e.g. short or long crRNAs) containing a full spacer sequence flanked by a short nucleotide (e.g. 5, 6, 7, 8, 9, or 10 nt or longer if it is a dual repeat) repeat sequence at the 5′ end (this may be referred to as a crRNA “tag”) and the rest of the repeat at the 3′ end. In certain embodiments, targeting by the effector proteins described herein may require the lack of homology between the crRNA tag and the target 5′ flanking sequence. This requirement may be similar to that described further in Samai et al. “Co-transcriptional DNA and RNA Cleavage during Type IVI CRISPR-Cas Immunity” Cell 161, 1164-1174, May 21, 2015, where the requirement is thought to distinguish between bona fide targets on invading nucleic acids from the CRISPR array itself, and where the presence of repeat sequences will lead to full homology with the crRNA tag and prevent autoimmunity.

[0228] In certain embodiments, the PFS (or PAM) recognition or specificity of the Cas protein of the invention is altered or modified. It is to be understood that mutated Cas has an altered or modified PFS recognition or specificity if the PFS recognition or specificity is different than the PFS recognition or specificity of the corresponding wild type Cas (i.e. unmutated Cas). PFS recognition or specificity can be determined by means known in the art. By means of example, and without limitation, PFS recognition or specificity can be determined by PFS (PAM) screens. In certain embodiments, at least one different PFS is recognized by the Cas. In certain embodiments, at least one PFS is recognized by the mutated Cas which is not recognized by the corresponding wild type Cas. In certain embodiments, at least one PFS is recognized by the mutated Cas which is not recognized by the corresponding wild type Cas, in addition to the wild type PFS. In certain embodiments, at least one PFS is recognized by the mutated Cas which is not recognized by the corresponding wild type Cas, and the wild type PFS is not anymore recognized. In certain embodiments, the PFS recognized by the mutated Cas is longer than the PFS recognized by the wild type Cas, such as 1, 2, or 3 nucleotides longer. In certain embodiments, the PFS recognized by the mutated Cas is shorter than the PFS recognized by the wild type Cas, such as 1, 2, or 3 nucleotides shorter.

[0229] In one aspect, determining the PFS sequence for suitable guide sequence of the nucleic acid-targeting protein is by comparison of sequences targeted by guides in depleted cells. In one aspect of such method, the method further comprises comparing the guide abundance for the different conditions in different replicate experiments. In one aspect of such method, the control guides are selected in that they are determined to show limited deviation in guide depletion in replicate experiments. In one aspect of such method, the significance of depletion is determined as (a) a depletion which is more than the most depleted control guide; or (b) a depletion which is more than the average depletion plus two times the standard deviation for the control guides. In one aspect of such method, the host cell is a bacterial host cell. In one aspect of such method, the step of co-introducing the plasmids is by electroporation and the host cell is an electro-competent host cell.

[0230] In some examples, determination of PAM can be performed as follows. This experiment closely parallels similar work in E. coli for the heterologous expression of StCas9 (Sapranauskas, R. et al. Nucleic Acids Res 39, 9275-9282 (2011)). Applicants introduce a plasmid containing both a PAM and a resistance gene into the heterologous E. coli, and then plate on the corresponding antibiotic. If there is DNA cleavage of the plasmid, Applicants observe no viable colonies.

[0231] In further detail, the assay is as follows for a DNA target. Two E. coli strains are used in this assay. One carries a plasmid that encodes the endogenous effector protein locus from the bacterial strain. The other strain carries an empty plasmid (e.g. pACYC184, control strain). All possible 7 or 8 bp PAM sequences are presented on an antibiotic resistance plasmid (pUC19 with ampicillin resistance gene). The PAM is located next to the sequence of proto-spacer 1 (the DNA target to the first spacer in the endogenous effector protein locus). Two PAM libraries were cloned. One has a 8 random bp 5′ of the proto-spacer (e.g. total of 65536 different PAM sequences=complexity). The other library has 7 random bp 3′ of the proto-spacer (e.g. total complexity is 16384 different PAMs). Both libraries were cloned to have in average 500 plasmids per possible PAM. Test strain and control strain were transformed with 5′PAM and 3′PAM library in separate transformations and transformed cells were plated separately on ampicillin plates. Recognition and subsequent cutting/interference with the plasmid renders a cell vulnerable to ampicillin and prevents growth. Approximately 12h after transformation, all colonies formed by the test and control strains where harvested and plasmid DNA was isolated. Plasmid DNA was used as template for PCR amplification and subsequent deep sequencing. Representation of all PAMs in the untransformed libraries showed the expected representation of PAMs in transformed cells. Representation of all PAMs found in control strains showed the actual representation. Representation of all PAMs in test strain showed which PAMs are not recognized by the enzyme and comparison to the control strain allows extracting the sequence of the depleted PAM.

### Nuclear Localization Sequences

[0232] In some embodiments, the Cas sequence is fused to one or more nuclear localization sequences (NLSs), such as about or more than about 1, 2, 3, 4, 5, 6, 7, 8, 9, 10, or more NLSs. In some embodiments, the Cas comprises about or more than about 1, 2, 3, 4, 5, 6, 7, 8, 9, 10, or more NLSs at or near the amino-terminus, about or more than about 1, 2, 3, 4, 5, 6, 7, 8, 9, 10, or more NLSs at or near the carboxy-terminus, or a combination of these (e.g. zero or at least one or more NLS at the amino-terminus and zero or at one or more NLS at the carboxy terminus). When more than one NLS is present, each may be selected independently of the others, such that a single NLS may be present in more than one copy and/or in combination with one or more other NLSs present in one or more copies. In a preferred embodiment of the invention, the Cas protein comprises at most 6 NLSs. In some embodiments, an NLS is considered near the N- or C-terminus when the nearest amino acid of the NLS is within about 1, 2, 3, 4, 5, 10, 15, 20, 25, 30, 40, 50, or more amino acids along the polypeptide chain from the N- or C-terminus. Non-limiting examples of NLSs include an NLS sequence derived from: the NLS of the SV40 virus large T-antigen, having the amino acid sequence PKKKRKV (SEQ ID NO:437); the NLS from nucleoplasmin (e.g. the nucleoplasmin bipartite NLS with the sequence KRPAATKKAGQAKKKK (SEQ ID NO:438); the c-myc NLS having the amino acid sequence PAAKRVKLD (SEQ ID NO:439) or RQRRNELKRSP (SEQ ID NO:440); the hRNPA1 M9 NLS having the sequence NQSSNFGPMKGGNFGGRSSGPYGGGGQYFAKPRNQGGY (SEQ ID NO:441); the sequence RMRIZFKNKGKDTAELRRRRVEVSVELRKAKKDEQILKRRNV (SEQ ID NO:442) of the IBB domain from importin-alpha; the sequences VSRKRPRP (SEQ ID NO:443) and PPKKARED (SEQ ID NO:444) of the myoma T protein; the sequence POPKKKPL (SEQ ID NO:445) of human p53; the sequence SALIKKKKKMAP (SEQ ID NO:446) of mouse c-abl IV; the sequences DRLRR (SEQ ID NO:447) and PKQKKRK (SEQ ID NO:448) of the influenza virus NS1; the sequence RKLKKKIKKL (SEQ ID NO:449) of the Hepatitis virus delta antigen; the sequence REKKKFLKRR (SEQ ID NO:450) of the mouse Mx1 protein; the sequence KRKGDEVDGVDEVAKKKSKK (SEQ ID NO:451) of the human poly(ADP-ribose) polymerase; and the sequence RKCLQAGMNLEARKTKK (SEQ ID NO:452) of the steroid hormone receptors (human) glucocorticoid. In general, the one or more NLSs are of sufficient strength to drive accumulation of the Cas in a detectable amount in the nucleus of a eukaryotic cell. In general, strength of nuclear localization activity may derive from the number of NLSs in the Cas, the particular NLS(s) used, or a combination of these factors. Detection of accumulation in the nucleus may be performed by any suitable technique. For example, a detectable marker may be fused to the Cas, such that location within a cell may be visualized, such as in combination with a means for detecting the location of the nucleus (e.g. a stain specific for the nucleus such as DAPI). Cell nuclei may also be isolated from cells, the contents of which may then be analyzed by any suitable process for detecting protein, such as immunohistochemistry, Western blot, or enzyme activity assay. Accumulation in the nucleus may also be determined indirectly, such as by an assay for the effect of CRISPR complex formation (e.g. assay for DNA cleavage or mutation at the target sequence, or assay for altered gene expression activity affected by CRISPR complex formation and/or Cas enzyme activity), as compared to a control no exposed to the Cas or complex, or exposed to a Cas lacking the one or more NLSs. In certain embodiments, other localization tags may be fused to the Cas protein, such as without limitation for localizing the Cas to particular sites in a cell, such as organells, such mitochondria, plastids, chloroplast, vesicles, golgi, (nuclear or cellular) membranes, ribosomes, nucleoluse, ER, cytoskeleton, vacuoles, centrosome, nucleosome, granules, centrioles, etc.

[0233] In certain embodiments of the invention, at least one nuclear localization signal (NLS) is attached to the nucleic acid sequences encoding the Cas proteins. In preferred embodiments at least one or more C-terminal or N-terminal NLSs are attached (and hence nucleic acid molecule(s) coding for the Cas protein can include coding for NLS(s) so that the expressed product has the NLS(s) attached or connected). In a preferred embodiment a C-terminal NLS is attached for optimal expression and nuclear targeting in eukaryotic cells, preferably human cells. The invention also encompasses methods for delivering multiple nucleic acid components, wherein each nucleic acid component is specific for a different target locus of interest thereby modifying multiple target loci of interest. The nucleic acid component of the complex may comprise one or more protein-binding RNA aptamers. The one or more aptamers may be capable of binding a bacteriophage coat protein.

### Multiplex Targeting Approach

[0234] The Cas proteins herein can employ more than one RNA guide without losing activity. This may enable the use of the Cas proteins, CRISPR-Cas systems or complexes as defined herein for targeting multiple targets (e.g., DNA targets), genes or gene loci, with a single enzyme, system or complex as defined herein. The guide RNAs may be tandemly arranged, optionally separated by a nucleotide sequence such as a direct repeat as defined herein. The position of the different guide RNAs is the tandem does not influence the activity.

[0235] In any of the described methods the complex may be delivered with multiple guides for multiplexed use. In any of the described methods more than one protein(s) may be used. In some examples, one Cas protein may be delivered with multiple guides, e.g., at least 2, at least 5, at least 10, at least 15, at least 20, at least 30, at least 40, at least 50, at least 60, at least 70, at least 80, at least 90, at least 100, at least 120, at least 140, at least 160, at least 180, at least 200, at least 220, at least 240, at least 260, at least 280, at least 300, at least 350, at least 400, or at least 500 guides. In some examples, a system herein may comprise a Cas protein and multiple guides, e.g., at least 2, at least 5, at least 10, at least 15, at least 20, at least 30, at least 40, at least 50, at least 60, at least 70, at least 80, at least 90, at least 100, at least 120, at least 140, at least 160, at least 180, at least 200, at least 220, at least 240, at least 260, at least 280, at least 300, at least 350, at least 400, or at least 500 guides.

[0236] The Cas enzyme may form part of a CRISPR system or complex, which further comprises tandemly arranged guide RNAs (gRNAs) comprising a series of 2, 3, 4, 5, 6, 7, 8, 9, 10, 15, 25, 25, 30, or more than 30 guide sequences, each capable of specifically hybridizing to a target sequence in a genomic locus of interest in a cell. In some embodiments, the functional Cas CRISPR system or complex binds to the multiple target sequences. In some embodiments, the functional CRISPR system or complex may edit the multiple target sequences, e.g., the target sequences may comprise a genomic locus, and in some embodiments there may be an alteration of gene expression. In some embodiments, the functional CRISPR system or complex may comprise further functional domains. In some embodiments, the invention provides a method for altering or modifying expression of multiple gene products. The method may comprise introducing into a cell containing said target nucleic acids, e.g., DNA molecules, or containing and expressing target nucleic acid, e.g., DNA molecules; for instance, the target nucleic acids may encode gene products or provide for expression of gene products (e.g., regulatory sequences). In some general embodiments, the Cas enzyme used for multiplex targeting is associated with one or more functional domains. In some more specific embodiments, the CRISPR enzyme used for multiplex targeting is a deadCas as defined herein elsewhere. In some embodiments, each of the guide sequence is at least 16, 17, 18, 19, 20, 25 nucleotides, or between 16-30, or between 16-25, or between 16-20 nucleotides in length. Examples of multiplex genome engineering using CRISPR effector proteins are provided in Cong et al. (Science February 15; 339(6121):819-23 (2013) and other publications cited herein.

[0237] In any of the described methods the strand break may be a single strand break or a double strand break. In preferred embodiments the double strand break may refer to the breakage of two sections of RNA, such as the two sections of RNA formed when a single strand RNA molecule has folded onto itself or putative double helices that are formed with an RNA molecule which contains self-complementary sequences allows parts of the RNA to fold and pair with itself.

### Base Editing

[0238] The present disclosure also provides for a base editing system. In general, such a system may comprise a deaminase (e.g., an adenosine deaminase or cytidine deaminase) fused with a Cas protein (e.g., a Type IV Cas protein herein). The Cas protein may be a dead Cas protein or a Cas nickase protein. In certain examples, the system comprises a mutated form of an adenosine deaminase fused with a dead CRISPR-Cas or CRISPR-Cas nickase. The mutated form of the adenosine deaminase may have both adenosine deaminase and cytidine deaminase activities.

[0239] In one aspect, the present disclosure provides an engineered adenosine deaminase. The engineered adenosine deaminase may comprise one or more mutations herein. In some embodiments, the engineered adenosine deaminase has cytidine deaminase activity. In certain examples, the engineered adenosine deaminase has both cytidine deaminase activity and adenosine deaminase. In some cases, the modifications by base editors herein may be used for targeting post-translational signaling or catalysis. In some embodiments, compositions herein comprise nucleotide sequence comprising encoding sequences for one or more components of a base editing system. A base-editing system may comprise a deaminase (e.g., an adenosine deaminase or cytidine deaminase) fused with a Cas protein or a variant thereof.

[0240] In certain examples, the system comprises a mutated form of an adenosine deaminase fused with a dead CRISPR-Cas or CRISPR-Cas nickase. The mutated form of the adenosine deaminase may have both adenosine deaminase and cytidine deaminase activities. In some embodiments, the adenosine deaminase may comprise one or more of the mutations: E488Q based on amino acid sequence positions of hADAR2-D, and mutations in a homologous ADAR protein corresponding to the above. In some embodiments, the adenosine deaminase may comprise one or more of the mutations: E488Q, V351G, based on amino acid sequence positions of hADAR2-D, and mutations in a homologous ADAR protein corresponding to the above. In some embodiments, the adenosine deaminase may comprise one or more of the mutations: E488Q, V351G, S486A, based on amino acid sequence positions of hADAR2-D, and mutations in a homologous ADAR protein corresponding to the above. In some embodiments, the adenosine deaminase may comprise one or more of the mutations: E488Q, V351G, S486A, T375S, based on amino acid sequence positions of hADAR2-D, and mutations in a homologous ADAR protein corresponding to the above. In some embodiments, the adenosine deaminase may comprise one or more of the mutations: E488Q, V351G, S486A, T375S, S370C, based on amino acid sequence positions of hADAR2-D, and mutations in a homologous ADAR protein corresponding to the above. In some embodiments, the adenosine deaminase may comprise one or more of the mutations: E488Q, V351G, S486A, T375S, S370C, P462A, based on amino acid sequence positions of hADAR2-D, and mutations in a homologous ADAR protein corresponding to the above. In some embodiments, the adenosine deaminase may comprise one or more of the mutations: E488Q, V351G, S486A, T375S, S370C, P462A, N597I, based on amino acid sequence positions of hADAR2-D, and mutations in a homologous ADAR protein corresponding to the above. In some embodiments, the adenosine deaminase may comprise one or more of the mutations: E488Q, V351G, S486A, T375S, S370C, P462A, N597I, L332I, based on amino acid sequence positions of hADAR2-D, and mutations in a homologous ADAR protein corresponding to the above. In some embodiments, the adenosine deaminase may comprise one or more of the mutations: E488Q, V351G, S486A, T375S, S370C, P462A, N597I, L332I, I398V, based on amino acid sequence positions of hADAR2-D, and mutations in a homologous ADAR protein corresponding to the above. In some embodiments, the adenosine deaminase may comprise one or more of the mutations: E488Q, V351G, S486A, T375S, S370C, P462A, N597I, L332I, I398V, K350I, based on amino acid sequence positions of hADAR2-D, and mutations in a homologous ADAR protein corresponding to the above. In some embodiments, the adenosine deaminase may comprise one or more of the mutations: E488Q, V351G, S486A, T375S, S370C, P462A, N597I, L332I, I398V, K350I, M383L, based on amino acid sequence positions of hADAR2-D, and mutations in a homologous ADAR protein corresponding to the above. In some embodiments, the adenosine deaminase may comprise one or more of the mutations: E488Q, V351G, S486A, T375S, S370C, P462A, N597I, L332I, I398V, K350I, M383L, D619G, based on amino acid sequence positions of hADAR2-D, and mutations in a homologous ADAR protein corresponding to the above. In some embodiments, the adenosine deaminase may comprise one or more of the mutations: E488Q, V351G, S486A, T375S, S370C, P462A, N597I, L332I, I398V, K350I, M383L, D619G, S582T, based on amino acid sequence positions of hADAR2-D, and mutations in a homologous ADAR protein corresponding to the above. In some embodiments, the adenosine deaminase may comprise one or more of the mutations: E488Q, V351G, S486A, T375S, S370C, P462A, N597I, L332I, I398V, K350I, M383L, D619G, S582T, V440I based on amino acid sequence positions of hADAR2-D, and mutations in a homologous ADAR protein corresponding to the above. In some embodiments, the adenosine deaminase may comprise one or more of the mutations: E488Q, V351G, S486A, T375S, S370C, P462A, N597I, L332I, I398V, K350I, M383L, D619G, S582T, V440I, S495N based on amino acid sequence positions of hADAR2-D, and mutations in a homologous ADAR protein corresponding to the above. In some embodiments, the adenosine deaminase may comprise one or more of the mutations: E488Q, V351G, S486A, T375S, S370C, P462A, N597I, L332I, I398V, K350I, M383L, D619G, S582T, V440I, S495N, K418E based on amino acid sequence positions of hADAR2-D, and mutations in a homologous ADAR protein corresponding to the above. In some embodiments, the adenosine deaminase may comprise one or more of the mutations: E488Q, V351G, S486A, T375S, S370C, P462A, N597I, L332I, I398V, K350I, M383L, D619G, S582T, V440I, S495N, K418E, S661T based on amino acid sequence positions of hADAR2-D, and mutations in a homologous ADAR protein corresponding to the above. In some examples, provided herein includes a mutated adenosine deaminase e.g., an adenosine deaminase comprising one or more mutations of E488Q, V351G, S486A, T375S, S370C, P462A, N597I, L332I, I398V, K350I, M383L, D619G, S582T, V440I, S495N, K418E, S661T, fused with a dead CRISPR-Cas protein or CRISPR-Cas nickase. In some examples, provided herein includes a mutated adenosine deaminase e.g., an adenosine deaminase comprising E488Q, V351G, S486A, T375S, S370C, P462A, N597I, L332I, I398V, K350I, M383L, D619G, S582T, V440I, S495N, K418E, and S661T, fused with a dead CRISPR-Cas protein or a CRISPR-Cas nickase. In some examples, provided herein includes a mutated adenosine deaminase e.g., an adenosine deaminase comprising E488Q, V351G, S486A, T375S, S370C, P462A, N597I, L332I, I398V, K350I, M383L, D619G, S582T, V440I, S495N, K418E, S661T, and S375N fused with a dead CRISPR-Cas protein or a CRISPR-Cas nickase.

[0241] In some embodiments, the adenosine deaminase may be a tRNA-specific adenosine deaminase or a variant thereof. In some embodiments, the adenosine deaminase may comprise one or more of the mutations: W23L, W23R, R26G, H36L, N37S, P48S, P48T, P48A, I49V, R51L, N72D, L84F, S97C, A106V, D108N, H123Y, G125A, A142N, S146C, D147Y, R152H, R152P, E155V, I156F, K157N, K161T, based on amino acid sequence positions of E. coli TadA, and mutations in a homologous deaminase protein corresponding to the above. In some embodiments, the adenosine deaminase may comprise one or more of the mutations: D108N based on amino acid sequence positions of E. coli TadA, and mutations in a homologous deaminase protein corresponding to the above. In some embodiments, the adenosine deaminase may comprise one or more of the mutations: A106V, D108N, based on amino acid sequence positions of E. coli TadA, and mutations in a homologous deaminase protein corresponding to the above. In some embodiments, the adenosine deaminase may comprise one or more of the mutations: A106V, D108N, D147Y, E155V, based on amino acid sequence positions of E. coli TadA, and mutations in a homologous deaminase protein corresponding to the above. In some embodiments, the adenosine deaminase may comprise one or more of the mutations: A106V, D108N, based on amino acid sequence positions of E. coli TadA, and mutations in a homologous deaminase protein corresponding to the above. In some embodiments, the adenosine deaminase may comprise one or more of the mutations: A106V, D108N, D147Y, E155V, L84F, H123Y, I156F, based on amino acid sequence positions of E. coli TadA, and mutations in a homologous deaminase protein corresponding to the above. In some embodiments, the adenosine deaminase may comprise one or more of the mutations: A106V, D108N, D147Y, E155V, L84F, H123Y, I156F, A142N, based on amino acid sequence positions of E. coli TadA, and mutations in a homologous deaminase protein corresponding to the above. In some embodiments, the adenosine deaminase may comprise one or more of the mutations: A106V, D108N, D147Y, E155V, L84F, H123Y, I156F, H36L, R51L, S146C, K157N, based on amino acid sequence positions of E. coli TadA, and mutations in a homologous deaminase protein corresponding to the above. In some embodiments, the adenosine deaminase may comprise one or more of the mutations: A106V, D108N, D147Y, E155V, L84F, H123Y, I156F, H36L, R51L, S146C, K157N, P48S, based on amino acid sequence positions of E. coli TadA, and mutations in a homologous deaminase protein corresponding to the above. In some embodiments, the adenosine deaminase may comprise one or more of the mutations: A106V, D108N, D147Y, E155V, L84F, H123Y, I156F, H36L, R51L, S146C, K157N, P48S, A142N, based on amino acid sequence positions of E. coli TadA, and mutations in a homologous deaminase protein corresponding to the above. In some embodiments, the adenosine deaminase may comprise one or more of the mutations: A106V, D108N, D147Y, E155V, L84F, H123Y, I156F, H36L, R51L, S146C, K157N, P48S, W23R, P48A, based on amino acid sequence positions of E. coli TadA, and mutations in a homologous deaminase protein corresponding to the above. In some embodiments, the adenosine deaminase may comprise one or more of the mutations: A106V, D108N, D147Y, E155V, L84F, H123Y, I156F, H36L, R51L, S146C, K157N, P48S, W23R, P48A, A142N, based on amino acid sequence positions of E. coli TadA, and mutations in a homologous deaminase protein corresponding to the above. In some embodiments, the adenosine deaminase may comprise one or more of the mutations: A106V, D108N, D147Y, E155V, L84F, H123Y, I156F, H36L, R51L, S146C, K157N, P48S, W23R, P48A, R152P, based on amino acid sequence positions of E. coli TadA, and mutations in a homologous deaminase protein corresponding to the above. In some embodiments, the adenosine deaminase may comprise one or more of the mutations: A106V, D108N, D147Y, E155V, L84F, H123Y, I156F, H36L, R51L, S146C, K157N, P48S, W23R, P48A, R152P, A142N, based on amino acid sequence positions of E. coli TadA, and mutations in a homologous deaminase protein corresponding to the above.

[0242] In some examples, the base editing systems may comprise an intein-mediated trans-splicing system that enables in vivo delivery of a base editor, e.g., a split-intein cytidine base editors (CBE) or adenine base editor (ABE) engineered to trans-splice. Examples of the such base editing systems include those described in Colin K. W. Lim et al., Treatment of a Mouse Model of ALS by In Vivo Base Editing, Mol Ther. 2020 Jan. 14. pii: S1525-0016(20)30011-3. doi: 10.1016/j.ymthe.2020.01.005; and Jonathan M. Levy et al., Cytosine and adenine base editing of the brain, liver, retina, heart and skeletal muscle of mice via adeno-associated viruses, Nature Biomedical Engineering volume 4, pages 97-110(2020), which are incorporated by reference herein in their entireties.

[0243] Examples of base editing systems include those described in WO2019071048 (e.g. paragraphs [0933]-0938]), WO2019084063 (e.g., paragraphs [0173]-[0186], [0323]-[0475], [0893]-[1094]), WO2019126716 (e.g., paragraphs [0290]-[0425], [1077]-[1084]), WO2019126709 (e.g., paragraphs [0294]-[0453]), WO2019126762 (e.g., paragraphs [0309]-[0438]), WO2019126774 (e.g., paragraphs [0511]-[0670]), Cox DBT, et al., RNA editing with CRISPR-Cas13, Science. 2017 Nov. 24; 358(6366):1019-1027; Abudayyeh O O et al., A cytosine deaminase for programmable single-base RNA editing, Science 26 Jul. 2019: Vol. 365, Issue 6451, pp. 382-386; Gaudelli N M et al., Programmable base editing of AT to GC in genomic DNA without DNA cleavage, Nature volume 551, pages 464-471 (23 Nov. 2017); Komor A C, et al., Programmable editing of a target base in genomic DNA without double-stranded DNA cleavage. Nature. 2016 May 19; 533(7603):420-4; Jordan L. Doman et al., Evaluation and minimization of Cas9-independent off-target DNA editing by cytosine base editors, Nat Biotechnol (2020). https://doi.org/10.1038/s41587-020-0414-6, which are incorporated by reference herein in their entireties.

### Prime Editing

[0244] In some embodiments, the Cas protein herein may be used for prime editing. In some cases, the Cas protein may be a nickase, e.g., a DNA nickase. The Cas may be a dCas. In some cases, the Cas has one or more mutations.

[0245] The Cas protein may be associated with a reverse transcriptase. The reverse transcriptase may be fused to the C-terminus of a Cas protein. Alternatively or additionally, the reverse transcriptase may be fused to the N-terminus of a Cas protein. The fusion may be via a linker and/or an adaptor protein. In some examples, the reverse transcriptase may be an M-MLV reverse transcriptase or variant thereof. The M-MLV reverse transcriptase variant may comprise one or more mutations. For the examples, the M-MLV reverse transcriptase may comprise D200N, L603W, and T330P. In another example, the M-MLV reverse transcriptase may comprise D200N, L603W, T330P, T306K, and W313F. In a particular example, the fusion of Cas and reverse transcriptase is Cas (H840A) fused with M-MLV reverse transcriptase (D200N+L603W+T330P+T306K+W313F).

[0246] In some embodiments, the Cas protein herein may target DNA using a guide RNA containing a binding sequence that hybridizes to the target sequence on the DNA. The guide RNA may further comprise an editing sequence that contains new genetic information that replaces target DNA nucleotides.

[0247] A single-strand break (a nick) may be generated on the target DNA by the Cas protein at the target site to expose a 3′-hydroxyl group, thus priming the reverse transcription of an edit-encoding extension on the guide directly into the target site. These steps may result in a branched intermediate with two redundant single-stranded DNA flaps: a 5′ flap that contains the unedited DNA sequence, and a 3′ flap that contains the edited sequence copied from the guide RNA. The 5′ flaps may be removed by a structure-specific endonuclease, e.g., FEN122, which excises 5′ flaps generated during lagging-strand DNA synthesis and long-patch base excision repair. The non-edited DNA strand may be nicked to induce bias DNA repair to preferentially replace the non-edited strand. Examples of prime editing systems and methods include those described in Anzalone A V et al., Search-and-replace genome editing without double-strand breaks or donor DNA, Nature. 2019 Oct 21. doi: 10.1038/s41586-019-1711-4, which is incorporated by reference herein in its entirety.

[0248] The Cas proteins may be used to prime-edit a single nucleotide on a target DNA. Alternatively or additionally, the Cas proteins may be used to prime-edit at least 2, at least 3, at least 4, at least 5, at least 6, at least 7, at least 8, at least 10, at least 11, at least 12, at least 13, at least 14, at least 15, at least 16, at least 17, at least 18, at least 19, at least 20, at least 21, at least 22, at least 23, at least 24, at least 25, at least 26, at least 27, at least 28, at least 29, at least 30, at least 40, at least 50, at least 60, at least 70, at least 80, at least 90, at least 100, at least 200, at least 300, at least 400, at least 500, at least 600, at least 700, at least 800, at least 900, or at least 10000 nucleotides on a target DNA.

### Cells and Organisms

[0249] In a further aspect, the invention provides a eukaryotic cell comprising a modified target locus of interest, wherein the target locus of interest has been modified according to in any of the herein described methods. A further aspect provides a cell line of said cell. Another aspect provides a multicellular organism comprising one or more said cells.

[0250] The present disclosure provides cells, tissues, organisms comprising the engineered Cas protein, the CRISPR-Cas systems, the polynucleotides encoding one or more components of the CRISPR-Cas systems, and/or vectors comprising the polynucleotides. The invention also provides for the nucleotide sequence encoding the effector protein being codon optimized for expression in a eukaryote or eukaryotic cell in any of the herein described methods or compositions. In an embodiment of the invention, the codon optimized effector protein is any Cas protein discussed herein and is codon optimized for operability in a eukaryotic cell or organism, e.g., such cell or organism as elsewhere herein mentioned, for instance, without limitation, a yeast cell, or a mammalian cell or organism, including a mouse cell, a rat cell, and a human cell or non-human eukaryote organism, e.g., plant.

[0251] In certain embodiments, the modification of the target locus of interest may result in: the eukaryotic cell comprising altered expression of at least one gene product; the eukaryotic cell comprising altered expression of at least one gene product, wherein the expression of the at least one gene product is increased; the eukaryotic cell comprising altered expression of at least one gene product, wherein the expression of the at least one gene product is decreased; or the eukaryotic cell comprising an edited genome.

[0252] In certain embodiments, the eukaryotic cell may be a mammalian cell or a human cell.

[0253] In further embodiments, the non-naturally occurring or engineered compositions, the vector systems, or the delivery systems as described in the present specification may be used for: site-specific gene knockout; site-specific genome editing; RNA sequence-specific interference; or multiplexed genome engineering.

[0254] Also provided is a gene product from the cell, the cell line, or the organism as described herein. In certain embodiments, the amount of gene product expressed may be greater than or less than the amount of gene product from a cell that does not have altered expression or edited genome. In certain embodiments, the gene product may be altered in comparison with the gene product from a cell that does not have altered expression or edited genome.

### Delivery

[0255] The present disclosure also provides delivery systems for introducing components of the systems and compositions herein to cells, tissues, organs, or organisms. A delivery system may comprise one or more delivery vehicles and/or cargos. Exemplary delivery systems and methods include those described in paragraphs [00117] to [00278] of Feng Zhang et al., (WO2016106236A1), and pages 1241-1251 and Table 1 of Lino C A et al., Delivering CRISPR: a review of the challenges and approaches, DRUG DELIVERY, 2018, VOL. 25, NO. 1, 1234-1257, which are incorporated by reference herein in their entireties.

[0256] The methods, systems, and tools provided herein may be designed for use with Class 1 CRISPR proteins or multi-subunit proteins. In an embodiment, the delivery is tailors for a Type I or Type IV Cas proteins detailed herein. Delivery, as further detailed herein, may comprise delivery of one or more subunits or CRISPR associated proteins separately, as one or more fusion proteins, or as polynucleotides encoding the proteins. Because the Class 1 systems typically comprise a multi-protein effector complex, which can, in embodiments, include one or more of ancillary proteins, such as one or more proteins in a complex referred to as a CRISPR-associated complex for antiviral defense (Cascade), one or more adaptation proteins and/or one or more accessory, CRISPR associated Rossman fold (CARF) domain containing proteins, delivery of such Class I systems may be modified to effect delivery, which may be further modified for successful delivery in eukaryotes. Delivery of multimeric Class I complexes is known in the art. See, e.g. Pickar-Oliver et al., Nat Biotechnol. 2019 December; 37(12): 1493-1501; doi: 10.1038/s41587-019-0235-7. Briefly, Pcikar-Oliver utilized a CMV promoter for each subunit of the system and further included N-terminal Flag epitope tags and nuclear localization systems. While Pickar-Olivier delivered each subunit of the complex on a separate vector delivery of more than one subunit on the same construct. Dolan et al. delivered T. fusca Type I-E for genome editing in hESCs via RNP electroporation utilizing C-terminal NLSs on Cas3 and to the C-terminus of each of the six Cas7 subunits delivered via electroporation. Dolan et al., Mol Cell. 2019 Jun. 6; 74(5): 936-950.e5; doi: 10.1016/j.molce1.2019.03.014; see also Morisaka, et al. Nat. Commun. 10, 5302 (2019); Cameron et al, Nat Biotechnol. 2019 December; 37(12):1471-147; doi: 10.1038/s41587-019-0310-0 (fusion of multi-subunit cascade to Fok1 nuclease domain for delivery via polycistronic vector with guide RNA delivered on separate plasmid for eukaryotic application); and Young et al., Commun Biol. 2019 Oct 18; 2:383. doi: 10.1038/s42003-019-0637-6 (delivery of class 1 type 1-E S. thermophilus system in Zea mays by tethering a plant transcriptional activation domain to 3 different subunits of the Cascade complex). Codon optimization based on human codon usage and/or further codon optimization by optimization tools such as ATUM/DNA2.0 can be performed to further optimize expression.

### Cargos

[0257] The delivery systems may comprise one or more cargos. The cargos may comprise one or more components of the systems and compositions herein. A cargo may comprise one or more of the following: i) a plasmid encoding one or more Cas proteins; ii) a plasmid encoding one or more guide RNAs, iii) mRNA of one or more Cas proteins; iv) one or more guide RNAs; v) one or more Cas proteins; vi) any combination thereof. In some examples, a cargo may comprise a plasmid encoding one or more Cas protein and one or more (e.g., a plurality of) guide RNAs. In some embodiments, a cargo may comprise mRNA encoding one or more Cas proteins and one or more guide RNAs.

[0258] In some examples, a cargo may comprise one or more Cas proteins and one or more guide RNAs, e.g., in the form of ribonucleoprotein complexes (RNP). The ribonucleoprotein complexes may be delivered by methods and systems herein. In some cases, the ribonucleoprotein may be delivered by way of a polypeptide-based shuttle agent. In one example, the ribonucleoprotein may be delivered using synthetic peptides comprising an endosome leakage domain (ELD) operably linked to a cell penetrating domain (CPD), to a histidine-rich domain and a CPD, e.g., as describe in WO2016161516.

### Physical Delivery

[0259] In some embodiments, the cargos may be introduced to cells by physical delivery methods. Examples of physical methods include microinjection, electroporation, and hydrodynamic delivery.

### Microinjection

[0260] Microinjection of the cargo directly to cells can achieve high efficiency, e.g., above 90% or about 100%. In some embodiments, microinjection may be performed using a microscope and a needle (e.g., with 0.5-5.0 μm in diameter) to pierce a cell membrane and deliver the cargo directly to a target site within the cell. Microinjection may be used for in vitro and ex vivo delivery.

[0261] Plasmids comprising coding sequences for Cas proteins and/or guide RNAs, mRNAs, and/or guide RNAs, may be microinjected. In some cases, microinjection may be used i) to deliver DNA directly to a cell nucleus, and/or ii) to deliver mRNA (e.g., in vitro transcribed) to a cell nucleus or cytoplasm. In certain examples, microinjection may be used to delivery sgRNA directly to the nucleus and Cas-encoding mRNA to the cytoplasm, e.g., facilitating translation and shuttling of Cas to the nucleus.

[0262] Microinjection may be used to generate genetically modified animals. For example, gene editing cargos may be injected into zygotes to allow for efficient germline modification. Such approach can yield normal embryos and full-term mouse pups harboring the desired modification(s). Microinjection can also be used to provide transiently up- or down-regulate a specific gene within the genome of a cell, e.g., using CRISPRa and CRISPRi.

### Electroporation

[0263] In some embodiments, the cargos and/or delivery vehicles may be delivered by electroporation. Electroporation may use pulsed high-voltage electrical currents to transiently open nanometer-sized pores within the cellular membrane of cells suspended in buffer, allowing for components with hydrodynamic diameters of tens of nanometers to flow into the cell. In some cases, electroporation may be used on various cell types and efficiently transfer cargo into cells. Electroporation may be used for in vitro and ex vivo delivery.

[0264] Electroporation may also be used to deliver the cargo to into the nuclei of mammalian cells by applying specific voltage and reagents, e.g., by nucleofection. Such approaches include those described in Wu Y, et al. (2015). Cell Res 25:67-79; Ye L, et al. (2014). Proc Natl Acad Sci USA 111:9591-6; Choi P S, Meyerson M. (2014). Nat Commun 5:3728; Wang J, Quake S R. (2014). Proc Natl Acad Sci 111:13157-62. Electroporation may also be used to deliver the cargo in vivo, e.g., with methods described in Zuckermann M, et al. (2015). Nat Commun 6:7391.

### Hydrodynamic Delivery

[0265] Hydrodynamic delivery may also be used for delivering the cargos, e.g., for in vivo delivery. In some examples, hydrodynamic delivery may be performed by rapidly pushing a large volume (8-10% body weight) solution containing the gene editing cargo into the bloodstream of a subject (e.g., an animal or human), e.g., for mice, via the tail vein. As blood is incompressible, the large bolus of liquid may result in an increase in hydrodynamic pressure that temporarily enhances permeability into endothelial and parenchymal cells, allowing for cargo not normally capable of crossing a cellular membrane to pass into cells. This approach may be used for delivering naked DNA plasmids and proteins. The delivered cargos may be enriched in liver, kidney, lung, muscle, and/or heart.

### Transfection

[0266] The cargos, e.g., nucleic acids, may be introduced to cells by transfection methods for introducing nucleic acids into cells. Examples of transfection methods include calcium phosphate-mediated transfection, cationic transfection, liposome transfection, dendrimer transfection, heat shock transfection, magnetofection, lipofection, impalefection, optical transfection, proprietary agent-enhanced uptake of nucleic acid.

### Delivery Vehicles

[0267] The delivery systems may comprise one or more delivery vehicles. The delivery vehicles may deliver the cargo into cells, tissues, organs, or organisms (e.g., animals or plants). The cargos may be packaged, carried, or otherwise associated with the delivery vehicles. The delivery vehicles may be selected based on the types of cargo to be delivered, and/or the delivery is in vitro and/or in vivo. Examples of delivery vehicles include vectors, viruses, non-viral vehicles, and other delivery reagents described herein.

[0268] The delivery vehicles in accordance with the present invention may a greatest dimension (e.g. diameter) of less than 100 microns (μm). In some embodiments, the delivery vehicles have a greatest dimension of less than 10 μm. In some embodiments, the delivery vehicles may have a greatest dimension of less than 2000 nanometers (nm). In some embodiments, the delivery vehicles may have a greatest dimension of less than 1000 nanometers (nm). In some embodiments, the delivery vehicles may have a greatest dimension (e.g., diameter) of less than 900 nm, less than 800 nm, less than 700 nm, less than 600 nm, less than 500 nm, less than 400 nm, less than 300 nm, less than 200 nm, less than 150 nm, or less than 100 nm, less than 50 nm. In some embodiments, the delivery vehicles may have a greatest dimension ranging between 25 nm and 200 nm.

[0269] In some embodiments, the delivery vehicles may be or comprise particles. For example, the delivery vehicle may be or comprise nanoparticles (e.g., particles with a greatest dimension (e.g., diameter) no greater than 1000 nm. The particles may be provided in different forms, e.g., as solid particles (e.g., metal such as silver, gold, iron, titanium), non-metal, lipid-based solids, polymers), suspensions of particles, or combinations thereof. Metal, dielectric, and semiconductor particles may be prepared, as well as hybrid structures (e.g., core-shell particles).

### Vectors

[0270] The systems, compositions, and/or delivery systems may comprise one or more vectors. The present disclosure also include vector systems. A vector system may comprise one or more vectors. In some embodiments, a vector refers to a nucleic acid molecule capable of transporting another nucleic acid to which it has been linked. Vectors include nucleic acid molecules that are single-stranded, double-stranded, or partially double-stranded; nucleic acid molecules that comprise one or more free ends, no free ends (e.g., circular); nucleic acid molecules that comprise DNA, RNA, or both; and other varieties of polynucleotides known in the art. A vector may be a plasmid, e.g., a circular double stranded DNA loop into which additional DNA segments can be inserted, such as by standard molecular cloning techniques. Certain vectors may be capable of autonomous replication in a host cell into which they are introduced (e.g., bacterial vectors having a bacterial origin of replication and episomal mammalian vectors). Some vectors (e.g., non-episomal mammalian vectors) are integrated into the genome of a host cell upon introduction into the host cell, and thereby are replicated along with the host genome. In certain examples, vectors may be expression vectors, e.g., capable of directing the expression of genes to which they are operatively-linked. In some cases, the expression vectors may be for expression in eukaryotic cells. Common expression vectors of utility in recombinant DNA techniques are often in the form of plasmids.

[0271] Examples of vectors include pGEX, pMAL, pRIT5, E. coli expression vectors (e.g., pTrc, pET 11d, yeast expression vectors (e.g., pYepSecl, pMFa, pJRY88, pYES2, and picZ, Baculovirus vectors (e.g., for expression in insect cells such as SF9 cells) (e.g., pAc series and the pVL series), mammalian expression vectors (e.g., pCDM8 and pMT2PC.

[0272] A vector may comprise i) Cas encoding sequence(s), and/or ii) a single, or at least 2, at least 3, at least 4, at least 5, at least 6, at least 7, at least 8, at least 9, at least 10, at least 12, at least 14, at least 16, at least 32, at least 48, at least 50 guide RNA(s) encoding sequences. In a single vector there can be a promoter for each RNA coding sequence. Alternatively or additionally, in a single vector, there may be a promoter controlling (e.g., driving transcription and/or expression) multiple RNA encoding sequences.

### Regulatory Elements

[0273] A vector may comprise one or more regulatory elements. The regulatory element(s) may be operably linked to coding sequences of Cas proteins, accessary proteins, guide RNAs (e.g., a single guide RNA, crRNA, and/or tracrRNA), or combination thereof. The term “operably linked” is intended to mean that the nucleotide sequence of interest is linked to the regulatory element(s) in a manner that allows for expression of the nucleotide sequence (e.g. in an in vitro transcription/translation system or in a host cell when the vector is introduced into the host cell). In certain examples, a vector may comprise: a first regulatory element operably linked to a nucleotide sequence encoding a Cas protein, and a second regulatory element operably linked to a nucleotide sequence encoding a guide RNA.

[0274] Examples of regulatory elements include promoters, enhancers, internal ribosomal entry sites (IRES), and other expression control elements (e.g., transcription termination signals, such as polyadenylation signals and poly-U sequences). Such regulatory elements are described, for example, in Goeddel, GENE EXPRESSION TECHNOLOGY: METHODS IN ENZYMOLOGY 185, Academic Press, San Diego, Calif. (1990). Regulatory elements include those that direct constitutive expression of a nucleotide sequence in many types of host cell and those that direct expression of the nucleotide sequence only in certain host cells (e.g., tissue-specific regulatory sequences). A tissue-specific promoter may direct expression primarily in a desired tissue of interest, such as muscle, neuron, bone, skin, blood, specific organs (e.g., liver, pancreas), or particular cell types (e.g., lymphocytes). Regulatory elements may also direct expression in a temporal-dependent manner, such as in a cell-cycle dependent or developmental stage-dependent manner, which may or may not also be tissue or cell-type specific.

[0275] Examples of promoters include one or more pol III promoter (e.g., 1, 2, 3, 4, 5, or more pol III promoters), one or more pol II promoters (e.g., 1, 2, 3, 4, 5, or more pol II promoters), one or more pol I promoters (e.g., 1, 2, 3, 4, 5, or more pol I promoters), or combinations thereof. Examples of pol III promoters include, but are not limited to, U6 and H1 promoters. Examples of pol II promoters include, but are not limited to, the retroviral Rous sarcoma virus (RSV) LTR promoter (optionally with the RSV enhancer), the cytomegalovirus (CMV) promoter (optionally with the CMV enhancer), the SV40 promoter, the dihydrofolate reductase promoter, the β-actin promoter, the phosphoglycerol kinase (PGK) promoter, and the EF1α promoter.

### Viral Vectors

[0276] The cargos may be delivered by viruses. In some embodiments, viral vectors are used. A viral vector may comprise virally-derived DNA or RNA sequences for packaging into a virus (e.g., retroviruses, replication defective retroviruses, adenoviruses, replication defective adenoviruses, and adeno-associated viruses). Viral vectors also include polynucleotides carried by a virus for transfection into a host cell. Viruses and viral vectors may be used for in vitro, ex vivo, and/or in vivo deliveries.

### Adeno Associated Virus (AAV)

[0277] The systems and compositions herein may be delivered by adeno associated virus (AAV). AAV vectors may be used for such delivery. AAV, of the Dependovirus genus and Parvoviridae family, is a single stranded DNA virus. In some embodiments, AAV may provide a persistent source of the provided DNA, as AAV delivered genomic material can exist indefinitely in cells, e.g., either as exogenous DNA or, with some modification, be directly integrated into the host DNA. In some embodiments, AAV do not cause or relate with any diseases in humans. The virus itself is able to efficiently infect cells while provoking little to no innate or adaptive immune response or associated toxicity.

[0278] Examples of AAV that can be used herein include AAV-1, AAV-2, AAV-3, AAV-4, AAV-5, AAV-6, AAV-8, and AAV-9. The type of AAV may be selected with regard to the cells to be targeted; e.g., one can select AAV serotypes 1, 2, 5 or a hybrid capsid AAV1, AAV2, AAV5 or any combination thereof for targeting brain or neuronal cells; and one can select AAV4 for targeting cardiac tissue. AAV8 is useful for delivery to the liver. AAV-2-based vectors were originally proposed for CFTR delivery to CF airways, other serotypes such as AAV-1, AAV-5, AAV-6, and AAV-9 exhibit improved gene transfer efficiency in a variety of models of the lung epithelium. Examples of cell types targeted by AAV are described in Grimm, D. et al, J. Virol. 82: 5887-5911 (2008)), and shown as follows:

| Cell Line | AAV-1 | AAV-2 | AAV-3 | AAV-4 | AAV-5 | AAV-6 | AAV-8 | AAV-9 |
|---|---|---|---|---|---|---|---|---|
| Huh-7 | 13 | 100 | 2.5 | 0.0 | 0.1 | 10 | 0.7 | 0.0 |
| HEK293 | 25 | 100 | 2.5 | 0.1 | 0.1 | 5 | 0.7 | 0.1 |
| HeLa | 3 | 100 | 2.0 | 0.1 | 6.7 | 1 | 0.2 | 0.1 |
| HepG2 | 3 | 100 | 16.7 | 0.3 | 1.7 | 5 | 0.3 | ND |
| Hep1A | 20 | 100 | 0.2 | 1.0 | 0.1 | 1 | 0.2 | 0.0 |
| 911 | 17 | 100 | 11 | 0.2 | 0.1 | 17 | 0.1 | ND |
| CHO | 100 | 100 | 14 | 1.4 | 333 | 50 | 10 | 1.0 |
| COS | 33 | 100 | 33 | 3.3 | 5.0 | 14 | 2.0 | 0.5 |
| MeWo | 10 | 100 | 20 | 0.3 | 6.7 | 10 | 1.0 | 0.2 |
| NIH3T3 | 10 | 100 | 2.9 | 2.9 | 0.3 | 10 | 0.3 | ND |
| A549 | 14 | 100 | 20 | ND | 0.5 | 10 | 0.5 | 0.1 |
| HT1180 | 20 | 100 | 10 | 0.1 | 0.3 | 33 | 0.5 | 0.1 |
| Monocytes | 1111 | 100 | ND | ND | 125 | 1429 | ND | ND |
| Immature DC | 2500 | 100 | ND | ND | 222 | 2857 | ND | ND |
| Mature DC | 2222 | 100 | ND | ND | 333 | 3333 | ND | ND |

[0279] CRISPR-Cas AAV particles may be created in HEK 293 T cells. Once particles with specific tropism have been created, they are used to infect the target cell line much in the same way that native viral particles do. This may allow for persistent presence of CRISPR-Cas components in the infected cell type, and what makes this version of delivery particularly suited to cases where long-term expression is desirable. Examples of doses and formulations for AAV that can be used include those describe in U.S. Pat. Nos. 8,454,972 and 8,404,658.

[0280] Various strategies may be used for delivery the systems and compositions herein with AAVs. In some examples, coding sequences of Cas and gRNA may be packaged directly onto one DNA plasmid vector and delivered via one AAV particle. In some examples, AAVs may be used to deliver gRNAs into cells that have been previously engineered to express Cas. In some examples, coding sequences of Cas and gRNA may be made into two separate AAV particles, which are used for co-transfection of target cells. In some examples, markers, tags, and other sequences may be packaged in the same AAV particles as coding sequences of Cas and/or gRNAs.

### Lentiviruses

[0281] The systems and compositions herein may be delivered by lentiviruses. Lentiviral vectors may be used for such delivery. Lentiviruses are complex retroviruses that have the ability to infect and express their genes in both mitotic and post-mitotic cells.

[0282] Examples of lentiviruses include human immunodeficiency virus (HIV), which may use its envelope glycoproteins of other viruses to target a broad range of cell types; minimal non-primate lentiviral vectors based on the equine infectious anemia virus (EIAV), which may be used for ocular therapies. In certain embodiments, self-inactivating lentiviral vectors with an siRNA targeting a common exon shared by HIV tat/rev, a nucleolar-localizing TAR decoy, and an anti-CCR5-specific hammerhead ribozyme (see, e.g., DiGiusto et al. (2010) Sci Transl Med 2:36ra43) may be used/and or adapted to the nucleic acid-targeting system herein.

[0283] Lentiviruses may be pseudo-typed with other viral proteins, such as the G protein of vesicular stomatitis virus. In doing so, the cellular tropism of the lentiviruses can be altered to be as broad or narrow as desired. In some cases, to improve safety, second- and third-generation lentiviral systems may split essential genes across three plasmids, which may reduce the likelihood of accidental reconstitution of viable viral particles within cells.

[0284] In some examples, leveraging the integration ability, lentiviruses may be used to create libraries of cells comprising various genetic modifications, e.g., for screening and/or studying genes and signaling pathways.

### Adenoviruses

[0285] The systems and compositions herein may be delivered by adenoviruses. Adenoviral vectors may be used for such delivery. Adenoviruses include nonenveloped viruses with an icosahedral nucleocapsid containing a double stranded DNA genome. Adenoviruses may infect dividing and non-dividing cells. In some embodiments, adenoviruses do not integrate into the genome of host cells, which may be used for limiting off-target effects of CRISPR-Cas systems in gene editing applications.

### Non-Viral Vehicles

[0286] The delivery vehicles may comprise non-viral vehicles. In general, methods and vehicles capable of delivering nucleic acids and/or proteins may be used for delivering the systems compositions herein. Examples of non-viral vehicles include lipid nanoparticles, cell-penetrating peptides (CPPs), DNA nanoclews, gold nanoparticles, streptolysin 0, multifunctional envelope-type nanodevices (MENDs), lipid-coated mesoporous silica particles, and other inorganic nanoparticles.

### Lipid Particles

[0287] The delivery vehicles may comprise lipid particles, e.g., lipid nanoparticles (LNPs) and liposomes.

### Lipid Nanoparticles (LNPs)

[0288] LNPs may encapsulate nucleic acids within cationic lipid particles (e.g., liposomes), and may be delivered to cells with relative ease. In some examples, lipid nanoparticles do not contain any viral components, which helps minimize safety and immunogenicity concerns. Lipid particles may be used for in vitro, ex vivo, and in vivo deliveries. Lipid particles may be used for various scales of cell populations.

[0289] In some examples. LNPs may be used for delivering DNA molecules (e.g., those comprising coding sequences of Cas and/or gRNA) and/or RNA molecules (e.g., mRNA of Cas, gRNAs). In certain cases, LNPs may be use for delivering RNP complexes of Cas/gRNA.

[0290] Components in LNPs may comprise cationic lipids 1,2-dilineoyl dimethylammonium-propane (DLinDAP), 1,2-dilinoleyloxy-3-N,N-dimethylaminopropane (DLinDMA), 1,2-dilinoleyloxyketo-N,N-dimethyl-3-aminopropane (DLinK-DMA), 1,2-dilinoleyl-4-(2-dimethylaminoethyl)-[1,3]-dioxolane (DLinKC2-DMA), (3-o-[2″-(methoxypolyethyleneglycol 2000) succinoyl]-1,2-dimyristoyl-sn-glycol (PEG-S-DMG), R-3-[(ro-methoxy-poly(ethylene glycol)2000) carbamoyl]-1,2-dimyristyloxlpropyl-3-amine (PEG-C-DOMG, and any combination thereof. Preparation of LNPs and encapsulation may be adapted from Rosin et al, Molecular Therapy, vol. 19, no. 12, pages 1286-2200, December 2011).

### Liposomes

[0291] In some embodiments, a lipid particle may be liposome. Liposomes are spherical vesicle structures composed of a uni- or multilamellar lipid bilayer surrounding internal aqueous compartments and a relatively impermeable outer lipophilic phospholipid bilayer. In some embodiments, liposomes are biocompatible, nontoxic, can deliver both hydrophilic and lipophilic drug molecules, protect their cargo from degradation by plasma enzymes, and transport their load across biological membranes and the blood brain barrier (BBB).

[0292] Liposomes can be made from several different types of lipids, e.g., phospholipids. A liposome may comprise natural phospholipids and lipids such as 1,2-distearoryl-sn-glycero-3-phosphatidyl choline (DSPC), sphingomyelin, egg phosphatidylcholines, monosialoganglioside, or any combination thereof.

[0293] Several other additives may be added to liposomes in order to modify their structure and properties. For instance, liposomes may further comprise cholesterol, sphingomyelin, and/or 1,2-dioleoyl-sn-glycero-3-phosphoethanolamine (DOPE), e.g., to increase stability and/or to prevent the leakage of the liposomal inner cargo.

### Stable Nucleic-Acid-Lipid Particles (SNALPs)

[0294] In some embodiments, the lipid particles may be stable nucleic acid lipid particles (SNALPs). SNALPs may comprise an ionizable lipid (DLinDMA) (e.g., cationic at low pH), a neutral helper lipid, cholesterol, a diffusible polyethylene glycol (PEG)-lipid, or any combination thereof. In some examples, SNALPs may comprise synthetic cholesterol, dipalmitoylphosphatidylcholine, 3-N-[(w-methoxy polyethylene glycol)2000)carbamoyl]-1,2-dimyrestyloxypropylamine, and cationic 1,2-dilinoleyloxy-3-N,Ndimethylaminopropane. In some examples, SNALPs may comprise synthetic cholesterol, 1,2-distearoyl-sn-glycero phosphocholine, PEG-cDMA, and 1,2-dilinoleyloxy-3-(N;N-dimethyl)aminopropane (DLinDMA)

### Other Lipids

[0295] The lipid particles may also comprise one or more other types of lipids, e.g., cationic lipids, such as amino lipid 2,2-dilinoleyl-4-dimethylaminoethyl[1,3]-dioxolane (DLin-KC2-DMA), DLin-KC2-DMA4, C12-200 and colipids disteroylphosphatidyl choline, cholesterol, and PEG-DMG.

### Lipoplexes/Polyplexes

[0296] In some embodiments, the delivery vehicles comprise lipoplexes and/or polyplexes. Lipoplexes may bind to negatively charged cell membrane and induce endocytosis into the cells. Examples of lipoplexes may be complexes comprising lipid(s) and non-lipid components. Examples of lipoplexes and polyplexes include FuGENE-6 reagent, a non-liposomal solution containing lipids and other components, zwitterionic amino lipids (ZALs), Ca2k (e.g., forming DNA/Ca′ microcomplexes), polyethenimine (PEI) (e.g., branched PEI), and poly(L-lysine) (PLL).

### Cell Penetrating Peptides

[0297] In some embodiments, the delivery vehicles comprise cell penetrating peptides (CPPs). CPPs are short peptides that facilitate cellular uptake of various molecular cargo (e.g., from nanosized particles to small chemical molecules and large fragments of DNA).

[0298] CPPs may be of different sizes, amino acid sequences, and charges. In some examples, CPPs can translocate the plasma membrane and facilitate the delivery of various molecular cargoes to the cytoplasm or an organelle. CPPs may be introduced into cells via different mechanisms, e.g., direct penetration in the membrane, endocytosis-mediated entry, and translocation through the formation of a transitory structure.

[0299] CPPs may have an amino acid composition that either contains a high relative abundance of positively charged amino acids such as lysine or arginine or has sequences that contain an alternating pattern of polar/charged amino acids and non-polar, hydrophobic amino acids. These two types of structures are referred to as polycationic or amphipathic, respectively. A third class of CPPs are the hydrophobic peptides, containing only apolar residues, with low net charge or have hydrophobic amino acid groups that are crucial for cellular uptake. Another type of CPPs is the trans-activating transcriptional activator (Tat) from Human Immunodeficiency Virus 1 (HIV-1). Examples of CPPs include to Penetratin, Tat (48-60), Transportan, and (R-AhX-R4) (Ahx refers to aminohexanoyl). Examples of CPPs and related applications also include those described in U.S. Pat. No. 8,372,951.

[0300] CPPs can be used for in vitro and ex vivo work quite readily, and extensive optimization for each cargo and cell type is usually required. In some examples, CPPs may be covalently attached to the Cas protein directly, which is then complexed with the gRNA and delivered to cells. In some examples, separate delivery of CPP-Cas and CPP-gRNA to multiple cells may be performed. CPP may also be used to delivery RNPs.

### DNA Nanoclews

[0301] In some embodiments, the delivery vehicles comprise DNA nanoclews. A DNA nanoclew refers to a sphere-like structure of DNA (e.g., with a shape of a ball of yarn). The nanoclew may be synthesized by rolling circle amplification with palindromic sequences that aide in the self-assembly of the structure. The sphere may then be loaded with a payload. An example of DNA nanoclew is described in Sun W et al, J Am Chem Soc. 2014 Oct 22; 136(42):14722-5; and Sun W et al, Angew Chem Int Ed Engl. 2015 Oct 5; 54(41):12029-33. DNA nanoclew may have a palindromic sequences to be partially complementary to the gRNA within the Cas:gRNA ribonucleoprotein complex. A DNA nanoclew may be coated, e.g., coated with PEI to induce endosomal escape.

### Gold Nanoparticles

[0302] In some embodiments, the delivery vehicles comprise gold nanoparticles (also referred to AuNPs or colloidal gold). Gold nanoparticles may form complex with cargos, e.g., Cas:gRNA RNP. Gold nanoparticles may be coated, e.g., coated in a silicate and an endosomal disruptive polymer, PAsp(DET). Examples of gold nanoparticles include AuraSense Therapeutics' Spherical Nucleic Acid (SNA™) constructs, and those described in Mout R, et al. (2017). ACS Nano 11:2452-8; Lee K, et al. (2017). Nat Biomed Eng 1:889-901.

iTOP

[0303] In some embodiments, the delivery vehicles comprise iTOP. iTOP refers to a combination of small molecules drives the highly efficient intracellular delivery of native proteins, independent of any transduction peptide. iTOP may be used for induced transduction by osmocytosis and propanebetaine, using NaCl-mediated hyperosmolality together with a transduction compound (propanebetaine) to trigger macropinocytotic uptake into cells of extracellular macromolecules. Examples of iTOP methods and reagents include those described in D'Astolfo D S, Pagliero R J, Pras A, et al. (2015). Cell 161:674-690.

### Polymer-Based Particles

[0304] In some embodiments, the delivery vehicles may comprise polymer-based particles (e.g., nanoparticles). In some embodiments, the polymer-based particles may mimic a viral mechanism of membrane fusion. The polymer-based particles may be a synthetic copy of Influenza virus machinery and form transfection complexes with various types of nucleic acids ((siRNA, miRNA, plasmid DNA or shRNA, mRNA) that cells take up via the endocytosis pathway, a process that involves the formation of an acidic compartment. The low pH in late endosomes acts as a chemical switch that renders the particle surface hydrophobic and facilitates membrane crossing. Once in the cytosol, the particle releases its payload for cellular action. This Active Endosome Escape technology is safe and maximizes transfection efficiency as it is using a natural uptake pathway. In some embodiments, the polymer-based particles may comprise alkylated and carboxyalkylated branched polyethylenimine. In some examples, the polymer-based particles are VIROMER, e.g., VIROMER RNAi, VIROMER RED, VIROMER mRNA, VIROMER CRISPR. Example methods of delivering the systems and compositions herein include those described in Bawage S S et al., Synthetic mRNA expressed Cas13a mitigates RNA virus infections, www.biorxiv.org/content/10.1101/370460v1.full doi: doi.org/10.1101/370460, Viromer® RED, a powerful tool for transfection of keratinocytes. doi: 10.13140/RG.2.2.16993.61281, Viromer® Transfection—Factbook 2018: technology, product overview, users' data., doi:10.13140/RG.2.2.23912.16642.

### Streptolysin O (SLO)

[0305] The delivery vehicles may be streptolysin O (SLO). SLO is a toxin produced by Group A streptococci that works by creating pores in mammalian cell membranes. SLO may act in a reversible manner, which allows for the delivery of proteins (e.g., up to 100 kDa) to the cytosol of cells without compromising overall viability. Examples of SLO include those described in Sierig G, et al. (2003). Infect Immun 71:446-55; Walev I, et al. (2001). Proc Natl Acad Sci USA 98:3185-90; Teng K W, et al. (2017). Elife 6:e25460.

### Multifunctional Envelope-Type Nanodevice (MEND)

[0306] The delivery vehicles may comprise multifunctional envelope-type nanodevice (MENDs). MENDs may comprise condensed plasmid DNA, a PLL core, and a lipid film shell. A MEND may further comprise cell-penetrating peptide (e.g., stearyl octaarginine). The cell penetrating peptide may be in the lipid shell. The lipid envelope may be modified with one or more functional components, e.g., one or more of: polyethylene glycol (e.g., to increase vascular circulation time), ligands for targeting of specific tissues/cells, additional cell-penetrating peptides (e.g., for greater cellular delivery), lipids to enhance endosomal escape, and nuclear delivery tags. In some examples, the MEND may be a tetra-lamellar MEND (T-MEND), which may target the cellular nucleus and mitochondria. In certain examples, a MEND may be a PEG-peptide-DOPE-conjugated MEND (PPD-MEND), which may target bladder cancer cells. Examples of MENDs include those described in Kogure K, et al. (2004). J Control Release 98:317-23; Nakamura T, et al. (2012). Acc Chem Res 45:1113-21.

### Lipid-Coated Mesoporous Silica Particles

[0307] The delivery vehicles may comprise lipid-coated mesoporous silica particles. Lipid-coated mesoporous silica particles may comprise a mesoporous silica nanoparticle core and a lipid membrane shell. The silica core may have a large internal surface area, leading to high cargo loading capacities. In some embodiments, pore sizes, pore chemistry, and overall particle sizes may be modified for loading different types of cargos. The lipid coating of the particle may also be modified to maximize cargo loading, increase circulation times, and provide precise targeting and cargo release. Examples of lipid-coated mesoporous silica particles include those described in Du X, et al. (2014). Biomaterials 35:5580-90; Durfee P N, et al. (2016). ACS Nano 10:8325-45.

### Inorganic Nanoparticles

[0308] The delivery vehicles may comprise inorganic nanoparticles. Examples of inorganic nanoparticles include carbon nanotubes (CNTs) (e.g., as described in Bates K and Kostarelos K. (2013). Adv Drug Deliv Rev 65:2023-33.), bare mesoporous silica nanoparticles (MSNPs) (e.g., as described in Luo G F, et al. (2014). Sci Rep 4:6064), and dense silica nanoparticles (SiNPs) (as described in Luo D and Saltzman W M. (2000). Nat Biotechnol 18:893-5).

### Methods of Use in General

[0309] In another aspect, the present disclosure discloses methods of using the compositions and systems herein. In general, the methods include modifying a target nucleic acid by introducing in a cell or organism that comprises the target nucleic acid the engineered Cas protein, polynucleotide(s) encoding engineered Cas protein, the CRISPR-Cas system, or the vector or vector system comprising the polynucleotide(s), such that the engineered Cas protein modifies the target nucleic acid in the cell or organism.

[0310] In some embodiments, the target nucleic acid comprises a genomic locus, and the engineered Cas protein modifies gene product encoded at the genomic locus or expression of the gene product. The target nucleic acid is DNA or RNA and wherein one or more nucleotides in the target nucleic acid may be base edited. The target nucleic acid may be DNA or RNA and wherein the target nucleic acid is cleaved. The engineered Cas protein may further cleave non-target nucleic acid.

[0311] In one embodiment, the systems and methods herein may be used for cleaving a target nucleic acid. The methods may comprise modifying a target nucleic acid using a nucleic acid-targeting complex that binds to the target nucleic acid and effect cleavage of said target nucleic acid. In an embodiment, the systems or compositions herein, when introduced into a cell, may create a break (e.g., a single or a double strand break) in the nucleic acid sequence. For example, the systems and methods can be used to cleave a disease nucleic acid in a cell. For example, an exogenous nucleic acid template comprising a sequence to be integrated flanked by an upstream sequence and a downstream sequence may be introduced into a cell. The upstream and downstream sequences share sequence similarity with either side of the site of integration in the nucleic acid. Where desired, a donor nucleic acid can be mRNA. The exogenous nucleic acid template comprises a sequence to be integrated (e.g., a mutated nucleic acid). The sequence for integration may be a sequence endogenous or exogenous to the cell. Thus, the sequence for integration may be operably linked to an appropriate control sequence or sequences. Alternatively, the sequence to be integrated may provide a regulatory function. The upstream and downstream sequences in the exogenous nucleic acid. A template are selected to promote recombination between the nucleic acid sequence of interest and the donor nucleic acid. The upstream sequence may be a nucleic acid sequence that shares sequence similarity with the nucleic acid sequence upstream of the targeted site for integration. Similarly, the downstream sequence may be a nucleic acid sequence that shares sequence similarity with the nucleic acid sequence downstream of the targeted site of integration. The upstream and downstream sequences in the exogenous nucleic acid template can have 75%, 80%, 85%, 90%, 95%, or 100% sequence identity with the targeted nucleic acid sequence. Preferably, the upstream and downstream sequences in the exogenous nucleic acid template have about 95%, 96%, 97%, 98%, 99%, or 100% sequence identity with the targeted sequence. In some cases, the upstream and downstream sequences in the exogenous nucleic acid template have about 99% or 100% sequence identity with the targeted nucleic acid sequence. An upstream or downstream sequence may comprise from about 20 bp to about 2500 bp, for example, about 50, 100, 200, 300, 400, 500, 600, 700, 800, 900, 1000, 1100, 1200, 1300, 1400, 1500, 1600, 1700, 1800, 1900, 2000, 2100, 2200, 2300, 2400, or 2500 bp. In some methods, the exemplary upstream or downstream sequence have about 200 bp to about 2000 bp, about 600 bp to about 1000 bp, or more particularly about 700 bp to about 1000 bp. In some methods, the exogenous nucleic acid template may further comprise a marker. Such a marker may make it easy to screen for targeted integrations. Examples of suitable markers include restriction sites, fluorescent proteins, or selectable markers. The exogenous nucleic acid template of the invention can be constructed using recombinant techniques (see, for example, Sambrook et al., 2001 and Ausubel et al., 1996). In a method for modifying a target nucleic acid by integrating an exogenous nucleic acid template, a break (e.g., double or single stranded break in double or single stranded nucleic acid) is introduced into the nucleic acid sequence by the nucleic acid-targeting complex, the break is repaired via homologous recombination with an exogenous nucleic acid template such that the template is integrated into the nucleic acid target. The presence of a double-stranded break facilitates integration of the template. In other embodiments, this invention provides a method of modifying expression of a nucleic acid in a eukaryotic cell. The method comprises increasing or decreasing expression of a target polynucleotide by using a nucleic acid-targeting complex that binds to the DNA or RNA (e.g., mRNA or pre-mRNA).

[0312] In some methods, a target nucleic acid can be inactivated to affect the modification of the expression in a cell. For example, upon the binding of a nucleic acid-targeting complex to a target sequence in a cell, the target nucleic acid is inactivated such that the sequence is not translated, the coded protein is not produced, or the sequence does not function as the wild-type sequence does. For example, a protein or microRNA coding sequence may be inactivated such that the protein or microRNA or pre-microRNA transcript is not produced. The target nucleic acid of a nucleic acid-targeting complex can be any nucleic acid endogenous or exogenous to the eukaryotic cell. For example, the target nucleic acid can be a nucleic acid residing in the nucleus of the eukaryotic cell. The target nucleic acid can be a sequence (e.g., mRNA or pre-mRNA) coding a gene product (e.g., a protein) or a non-coding sequence (e.g., ncRNA, lncRNA, tRNA, or rRNA). Examples of target nucleic acid include a sequence associated with a signaling biochemical pathway, e.g., a signaling biochemical pathway-associated nucleic acid. Examples of target nucleic acid include a disease associated nucleic acid. A “disease-associated” nucleic acid refers to any nucleic acid which is yielding translation products at an abnormal level or in an abnormal form in cells derived from a disease-affected tissues compared with tissues or cells of a non-disease control. It may be a nucleic acid transcribed from a gene that becomes expressed at an abnormally high level; it may be a RNA transcribed from a gene that becomes expressed at an abnormally low level, where the altered expression correlates with the occurrence and/or progression of the disease. A disease-associated nucleic acid also refers to a nucleic acid transcribed from a gene possessing mutation(s) or genetic variation that is directly responsible or is in linkage disequilibrium with a gene(s) that is responsible for the etiology of a disease. The translated products may be known or unknown, and may be at a normal or abnormal level. The target nucleic acid of a nucleic acid-targeting complex can be any nucleic acid endogenous or exogenous to the eukaryotic cell. For example, the target nucleic acid can be a nucleic acid residing in the nucleus of the eukaryotic cell. The target nucleic acid can be a sequence (e.g., mRNA or pre-mRNA) coding a gene product (e.g., a protein) or a non-coding sequence (e.g., ncRNA, lncRNA, tRNA, or rRNA).

[0313] In some embodiments, the methods may further comprise visualizing activity and, optionally, using a detectable label. The method may also comprise detecting binding of one or more components of the CRISPR-Cas system to the target nucleic acid.

[0314] According to one aspect the invention provides non-naturally occurring or engineered composition comprising a guide RNA comprising a guide sequence capable of hybridizing to a target sequence in a genomic locus of interest in a cell, wherein the guide RNA is modified by the insertion of one or more distinct RNA sequence(s) that bind an adaptor protein. In particular embodiments, the RNA sequences may bind to two or more adaptor proteins (e.g. aptamers), and wherein each adaptor protein is associated with one or more functional domains. The guide RNAs of the CRISPR-Cas enzymes described herein are shown to be amenable to modification of the guide sequence. In particular embodiments, the guide RNA is modified by the insertion of distinct RNA sequence(s) 5′ of the direct repeat, within the direct repeat, or 3′ of the guide sequence. When there is more than one functional domain, the functional domains can be same or different, e.g., two of the same or two different activators or repressors. In an aspect the invention provides a herein-discussed composition, wherein the one or more functional domains are attached to the Cas protein so that upon binding to the target RNA the functional domain is in a spatial orientation allowing for the functional domain to function in its attributed function; In an aspect the invention provides a herein-discussed composition, wherein the composition comprises a CRISPR-Cas complex having at least three functional domains, at least one of which is associated with the Cas protein and at least two of which are associated with the gRNA.

[0315] Accordingly, in an aspect the invention provides non-naturally occurring or engineered CRISPR-Cas complex composition comprising the guide RNA as herein-discussed and a CRISPR-Cas which is an Cas protein, wherein optionally the Cas protein comprises at least one mutation, such that the Cas protein has no more than 5% of the nuclease activity of the enzyme not having the at least one mutation, and optionally one or more comprising at least one or more nuclear localization sequences. In particular embodiments, the guide RNA is additionally or alternatively modified so as to still ensure binding of the Cas protein but to prevent cleavage by the Cas protein (as detailed elsewhere herein).

[0316] In particular embodiments, the Cas protein is a Cas protein which has a diminished nuclease activity of at least 97%, or 100% as compared with the CRISPR-Cas enzyme not having the at least one mutation. In an aspect the invention provides a herein-discussed composition, wherein the CRISPR-Cas enzyme comprises two or more mutations as otherwise herein-discussed.

[0317] In particular embodiments, an system is provided as described herein above comprising two or more functional domains. In particular embodiments, the two or more functional domains are heterologous functional domain. In particular embodiments, the system comprises an adaptor protein which is a fusion protein comprising a functional domain, the fusion protein optionally comprising a linker between the adaptor protein and the functional domain. In particular embodiments, the linker includes a GlySer linker. Additionally or alternatively, one or more functional domains are attached to the RNA effector protein by way of a linker, optionally a GlySer linker.

[0318] In an aspect the invention provides a herein-discussed composition, wherein the one or more functional domains associated with the adaptor protein or the Cas protein is a domain capable of activating or repressing RNA translation. In an aspect the invention provides a herein-discussed composition, wherein at least one of the one or more functional domains associated with the adaptor protein have one or more activities comprising methylase activity, demethylase activity, transcription activation activity, transcription repression activity, transcription release factor activity, histone modification activity, DNA integration activity RNA cleavage activity, DNA cleavage activity or nucleic acid binding activity, or molecular switch activity or chemical inducibility or light inducibility.

[0319] In an aspect the invention provides a herein-discussed composition comprising an aptamer sequence. In particular embodiments, the aptamer sequence is two or more aptamer sequences specific to the same adaptor protein. In an aspect the invention provides a herein-discussed composition, wherein the aptamer sequence is two or more aptamer sequences specific to different adaptor protein. In an aspect the invention provides a herein-discussed composition, wherein the adaptor protein comprises bacteriophage coat proteins. Accordingly, in particular embodiments, the aptamer is selected from a binding protein specifically binding any one of the adaptor proteins listed above. In an aspect the invention provides a herein-discussed composition, wherein the cell is a eukaryotic cell. In an aspect the invention provides a herein-discussed composition, wherein the eukaryotic cell is a mammalian cell, a plant cell or a yeast cell, whereby the mammalian cell is optionally a mouse cell. In an aspect the invention provides a herein-discussed composition, wherein the mammalian cell is a human cell.

[0320] In an aspect the invention provides a herein above-discussed composition wherein there is more than one guide RNA or gRNA or crRNA, and these target different sequences whereby when the composition is employed, there is multiplexing. In an aspect the invention provides a composition wherein there is more than one guide RNA or gRNA or crRNA modified by the insertion of distinct RNA sequence(s) that bind to one or more adaptor proteins.

[0321] In an aspect the invention provides a herein-discussed composition wherein one or more adaptor proteins associated with one or more functional domains is present and bound to the distinct RNA sequence(s) inserted into the guide RNA(s).

[0322] In an aspect the invention provides a herein-discussed composition wherein the guide RNA is modified to have at least one non-coding functional loop; e.g., wherein the at least one non-coding functional loop is repressive; for instance, wherein at least one non-coding functional loop comprises Alu.

[0323] In an aspect the invention provides a method for modifying gene expression comprising the administration to a host or expression in a host in vivo of one or more of the compositions as herein discussed.

[0324] In an aspect the invention provides a herein-discussed method comprising the delivery of the composition or nucleic acid molecule(s) coding therefor, wherein said nucleic acid molecule(s) are operatively linked to regulatory sequence(s) and expressed in vivo. In an aspect the invention provides a herein-discussed method wherein the expression in vivo is via a lentivirus, an adenovirus, or an AAV.

[0325] In an aspect the invention provides a mammalian cell line of cells as herein-discussed, wherein the cell line is, optionally, a human cell line or a mouse cell line. In an aspect the invention provides a transgenic mammalian model, optionally a mouse, wherein the model has been transformed with a herein-discussed composition or is a progeny of said transformant.

[0326] In an aspect the invention provides a nucleic acid molecule(s) encoding guide RNA or the CRISPR-Cas complex or the composition as herein-discussed. In an aspect the invention provides a vector comprising: a nucleic acid molecule encoding a guide RNA (gRNA) or crRNA comprising a guide sequence capable of hybridizing to an RNA target sequence in a cell, wherein the direct repeat of the gRNA or crRNA is modified by the insertion of distinct RNA sequence(s) that bind(s) to two or more adaptor proteins, and wherein each adaptor protein is associated with one or more functional domains; or, wherein the gRNA is modified to have at least one non-coding functional loop. In an aspect the invention provides vector(s) comprising nucleic acid molecule(s) encoding: non-naturally occurring or engineered CRISPR-Cas complex composition comprising the gRNA or crRNA herein-discussed, and an Cas protein, wherein optionally the Cas protein comprises at least one mutation, such that the Cas protein has no more than 5% of the nuclease activity of the Cas protein not having the at least one mutation, and optionally one or more comprising at least one or more nuclear localization sequences. In an aspect a vector can further comprise regulatory element(s) operable in a eukaryotic cell operably linked to the nucleic acid molecule encoding the guide RNA (gRNA) or crRNA and/or the nucleic acid molecule encoding the Cas protein and/or the optional nuclear localization sequence(s).

[0327] In one aspect, the invention provides a kit comprising one or more of the components described herein. In some embodiments, the kit comprises a vector system as described herein and instructions for using the kit.

[0328] In an aspect the invention provides a method of screening for gain of function (GOF) or loss of function (LOF) or for screening non-coding RNAs or potential regulatory regions (e.g. enhancers, repressors) comprising the cell line of as herein-discussed or cells of the model herein-discussed containing or expressing the Cas protein and introducing a composition as herein-discussed into cells of the cell line or model, whereby the gRNA or crRNA includes either an activator or a repressor, and monitoring for GOF or LOF respectively as to those cells as to which the introduced gRNA or crRNA includes an activator or as to those cells as to which the introduced gRNA or crRNA includes a repressor.

[0329] In an aspect the invention provides a library of non-naturally occurring or engineered compositions, each comprising a CRISPR guide RNA (gRNA) or crRNA comprising a guide sequence capable of hybridizing to a target RNA sequence of interest in a cell, an Cas protein, wherein the Cas protein comprises at least one mutation, such that the Cas protein has no more than 5% of the nuclease activity of the Cas protein not having the at least one mutation, wherein the gRNA or crRNA is modified by the insertion of distinct RNA sequence(s) that bind to one or more adaptor proteins, and wherein the adaptor protein is associated with one or more functional domains, wherein the composition comprises one or more or two or more adaptor proteins, wherein the each protein is associated with one or more functional domains, and wherein the gRNAs or crRNAs comprise a genome wide library comprising a plurality of guide RNAs (gRNAs) or crRNAs. In an aspect the invention provides a library as herein-discussed, wherein the Cas protein has a diminished nuclease activity of at least 97%, or 100% as compare with the Cas protein not having the at least one mutation. In an aspect the invention provides a library as herein-discussed, wherein the adaptor protein is a fusion protein comprising the functional domain. In an aspect the invention provides a library as herein discussed, wherein the gRNA or crRNA is not modified by the insertion of distinct RNA sequence(s) that bind to the one or two or more adaptor proteins. In an aspect the invention provides a library as herein discussed, wherein the one or two or more functional domains are associated with the Cas protein. In an aspect the invention provides a library as herein discussed, wherein the cell population of cells is a population of eukaryotic cells. In an aspect the invention provides a library as herein discussed, wherein the eukaryotic cell is a mammalian cell, a plant cell or a yeast cell. In an aspect the invention provides a library as herein discussed, wherein the mammalian cell is a human cell. In an aspect the invention provides a library as herein discussed, wherein the population of cells is a population of embryonic stem (ES) cells.

[0330] In an aspect the invention provides a library as herein discussed, wherein the targeting is of about 100 or more RNA sequences. In an aspect the invention provides a library as herein discussed, wherein the targeting is of about 1000 or more RNA sequences. In an aspect the invention provides a library as herein discussed, wherein the targeting is of about 20,000 or more sequences. In an aspect the invention provides a library as herein discussed, wherein the targeting is of the entire transcriptome. In an aspect the invention provides a library as herein discussed, wherein the targeting is of a panel of target sequences focused on a relevant or desirable pathway. In an aspect the invention provides a library as herein discussed, wherein the pathway is an immune pathway. In an aspect the invention provides a library as herein discussed, wherein the pathway is a cell division pathway.

[0331] In one aspect, the invention provides a method of generating a model eukaryotic cell comprising a gene with modified expression. In some embodiments, a disease gene is any gene associated an increase in the risk of having or developing a disease. In some embodiments, the method comprises (a) introducing one or more vectors encoding the components of the system described herein above into a eukaryotic cell, and (b) allowing a CRISPR complex to bind to a target polynucleotide so as to modify expression of a gene, thereby generating a model eukaryotic cell comprising modified gene expression.

[0332] The structural information provided herein allows for interrogation of guide RNA or crRNA interaction with the target RNA and the Cas protein permitting engineering or alteration of guide RNA structure to optimize functionality of the entire CRISPR-Cas system. For example, the guide RNA or crRNA may be extended, without colliding with the Cas protein by the insertion of adaptor proteins that can bind to RNA. These adaptor proteins can further recruit effector proteins or fusions which comprise one or more functional domains.

[0333] An aspect of the invention is that the above elements are comprised in a single composition or comprised in individual compositions. These compositions may advantageously be applied to a host to elicit a functional effect on the genomic level.

[0334] The skilled person will understand that modifications to the guide RNA or crRNA which allow for binding of the adapter+functional domain but not proper positioning of the adapter+functional domain (e.g. due to steric hindrance within the three dimension structure of the CRISPR-Cas complex) are modifications which are not intended. The one or more modified guide RNA or crRNA may be modified, by introduction of a distinct RNA sequence(s) 5′ of the direct repeat, within the direct repeat, or 3′ of the guide sequence.

[0335] The modified guide RNA or crRNA, the inactivated Cas protein (with or without functional domains), and the binding protein with one or more functional domains, may each individually be comprised in a composition and administered to a host individually or collectively. Alternatively, these components may be provided in a single composition for administration to a host. Administration to a host may be performed via viral vectors known to the skilled person or described herein for delivery to a host (e.g. lentiviral vector, adenoviral vector, AAV vector). As explained herein, use of different selection markers (e.g. for lentiviral gRNA or crRNA selection) and concentration of gRNA or crRNA (e.g. dependent on whether multiple gRNAs or crRNAs are used) may be advantageous for eliciting an improved effect.

[0336] Using the provided compositions, the person skilled in the art can advantageously and specifically target single or multiple loci with the same or different functional domains to elicit one or more genomic events. The compositions may be applied in a wide variety of methods for screening in libraries in cells and functional modeling in vivo (e.g. gene activation of lincRNA and identification of function; gain-of-function modeling; loss-of-function modeling; the use the compositions of the invention to establish cell lines and transgenic animals for optimization and screening purposes).

[0337] The current invention comprehends the use of the compositions of the current invention to establish and utilize conditional or inducible CRISPR-Cas events. (See, e.g., Platt et al., Cell (2014), dx.doi.org/10.1016/j.cell.2014.09.014, or PCT patent publications cited herein, such as WO 2014/093622 (PCT/US2013/074667), which are not believed prior to the present invention or application).

[0338] The invention provides a method of modifying expression of a target gene of interest, the method comprising contacting a target RNA with one or more non-naturally occurring or engineered compositions comprising i) a mutated Cas protein according to the invention as described herein, and ii) a crRNA, wherein the crRNA comprises a) a guide sequence that hybridizes to a target RNA sequence in a cell, and b) a direct repeat sequence, wherein the Cas protein forms a complex with the crRNA, wherein the guide sequence directs sequence-specific binding to the target RNA sequence in a cell, whereby there is formed a CRISPR complex comprising the Cas protein complexed with the guide sequence that is hybridized to the target RNA sequence, whereby expression of the target locus of interest is modified. The complex can be formed in vitro or ex vivo and introduced into a cell or contacted with RNA; or can be formed in vivo.

[0339] In some embodiment of the method of modifying expression of a target gene of interest, the target gene is in a prokaryotic cell.

[0340] In some embodiment of the method of modifying expression of a target gene of interest, the target gene is in a eukaryotic cell.

[0341] The invention provides a cell comprising a modified target of interest, wherein the target of interest has been modified according to any of the method disclosed herein.

[0342] In some embodiment of the invention, the cell is a prokaryotic cell.

[0343] In some embodiment of the invention, the cell is a eukaryotic cell.

[0344] In some embodiment, modification of the target of interest in a cell results in: a cell comprising altered expression of at least one gene product; a cell comprising altered expression of at least one gene product, wherein the expression of the at least one gene product is increased; or a cell comprising altered expression of at least one gene product, wherein the expression of the at least one gene product is decreased.

[0345] In some embodiment, the cell is a mammalian cell or a human cell.

[0346] The invention provides a cell line of or comprising a cell disclosed herein or a cell modified by any of the methods disclosed herein, or progeny thereof.

[0347] The invention provides a multicellular organism comprising one or more cells disclosed herein or one or more cells modified according to any of the methods disclosed herein.

[0348] The invention provides a plant or animal model comprising one or more cells disclosed herein or one or more cells modified according to any of the methods disclosed herein.

[0349] The invention provides a gene product from a cell or the cell line or the organism or the plant or animal model disclosed herein.

[0350] In some embodiment, the amount of gene product expressed is greater than or less than the amount of gene product from a cell that does not have altered expression.

[0351] The invention provides a method of identifying the requirements of a suitable guide sequence for the Cas protein of the invention, said method comprising: (a) selecting a set of essential genes within an organism, (b) designing a library of targeting guide sequences capable of hybridizing to regions the coding regions of these genes as well as 5′ and 3′ UTRs of these genes, (c) generating randomized guide sequences that do not hybridize to any region within the genome of said organism as control guides, (d) preparing a plasmid comprising the nucleic acid-targeting protein and a first resistance gene and a guide plasmid library comprising said library of targeting guides and said control guides and a second resistance gene, (e) co-introducing said plasmids into a host cell, (f) introducing said host cells on a selective medium for said first and second resistance genes, (g) sequencing essential genes of growing host cells, (h) determining significance of depletion of cells transformed with targeting guides by comparing depletion of cells with control guides; and, (i) determining based on the depleted guide sequences the requirements of a suitable guide sequence.

[0352] The invention provides a method of modifying sequences associated with or at a target locus of interest, the method comprising delivering to said locus a non-naturally occurring or engineered composition comprising a Cas protein and one or more nucleic acid components, wherein the effector protein forms a complex with the one or more nucleic acid components and upon binding of the said complex to the locus of interest the effector protein induces the modification of the sequences associated with or at the target locus of interest. In a preferred embodiment, the modification is the introduction of a strand break. In a preferred embodiment, the sequences associated with or at the target locus of interest comprises RNA or consists of RNA.

[0353] The invention provides a method of modifying sequences associated with or at a target locus of interest, the method comprising delivering to said locus a non-naturally occurring or engineered composition comprising a Cas protein, optionally a small accessory protein, and one or more nucleic acid components, wherein the effector protein forms a complex with the one or more nucleic acid components and upon binding of the said complex to the locus of interest the effector protein induces the modification of the sequences associated with or at the target locus of interest. In a preferred embodiment, the modification is the introduction of a strand break. In a preferred embodiment, the sequences associated with or at the target locus of interest comprises RNA or consists of RNA.

[0354] The invention provides a method of modifying sequences associated with or at a target locus of interest, the method comprising delivering to said sequences associated with or at the locus a non-naturally occurring or engineered composition comprising a Cas loci effector protein and one or more nucleic acid components, wherein the Cas protein forms a complex with the one or more nucleic acid components and upon binding of the said complex to the locus of interest the effector protein induces the modification of sequences associated with or at the target locus of interest. In a preferred embodiment, the modification is the introduction of a strand break. In a preferred embodiment the Cas protein forms a complex with one nucleic acid component; advantageously an engineered or non-naturally occurring nucleic acid component. The induction of modification of sequences associated with or at the target locus of interest can be Cas protein-nucleic acid guided. In a preferred embodiment the one nucleic acid component is a CRISPR RNA (crRNA). In a preferred embodiment the one nucleic acid component is a mature crRNA or guide RNA, wherein the mature crRNA or guide RNA comprises a spacer sequence (or guide sequence) and a direct repeat (DR) sequence or derivatives thereof. In a preferred embodiment the spacer sequence or the derivative thereof comprises a seed sequence, wherein the seed sequence is critical for recognition and/or hybridization to the sequence at the target locus. In a preferred embodiment of the invention the crRNA is a short crRNA that may be associated with a short DR sequence. In another embodiment of the invention the crRNA is a long crRNA that may be associated with a long DR sequence (or dual DR). Aspects of the invention relate to Cas protein complexes having one or more non-naturally occurring or engineered or modified or optimized nucleic acid components. In a preferred embodiment the nucleic acid component comprises RNA. In a preferred embodiment the nucleic acid component of the complex may comprise a guide sequence linked to a direct repeat sequence, wherein the direct repeat sequence comprises one or more stem loops or optimized secondary structures. In preferred embodiments of the invention, the direct repeat may be a short DR or a long DR (dual DR). In a preferred embodiment the direct repeat may be modified to comprise one or more protein-binding RNA aptamers. In a preferred embodiment, one or more aptamers may be included such as part of optimized secondary structure. Such aptamers may be capable of binding a bacteriophage coat protein. In a preferred embodiment the bacteriophage coat protein is MS2. The invention also provides for the nucleic acid component of the complex being 30 or more, 40 or more or 50 or more nucleotides in length.

[0355] The invention provides methods of genome editing or modifying sequences associated with or at a target locus of interest wherein the method comprises introducing a Cas complex into any desired cell type, prokaryotic or eukaryotic cell, whereby the Cas protein complex effectively functions to interfere with RNA in the eukaryotic or prokaryotic cell. In preferred embodiments, the cell is a eukaryotic cell and the RNA is transcribed from a mammalian genome or is present in a mammalian cell. In preferred methods of RNA editing or genome editing in human cells, the Cas proteins may include but are not limited to the specific species of Cas proteins disclosed herein.

[0356] The invention also provides a method of modifying a target locus of interest, the method comprising delivering to said locus a non-naturally occurring or engineered composition comprising a Cas protein and one or more nucleic acid components, wherein the Cas protein forms a complex with the one or more nucleic acid components and upon binding of the said complex to the locus of interest the effector protein induces the modification of the target locus of interest. In a preferred embodiment, the modification is the introduction of a strand break.

[0357] In such methods the target locus of interest may be comprised within a RNA molecule. In such methods the target locus of interest may be comprised in a RNA molecule in vitro.

[0358] In such methods the target locus of interest may be comprised in a RNA molecule within a cell. The cell may be a prokaryotic cell or a eukaryotic cell. The cell may be a mammalian cell. The modification introduced to the cell by the present invention may be such that the cell and progeny of the cell are altered for improved production of biologic products such as an antibody, starch, alcohol or other desired cellular output. The modification introduced to the cell by the present invention may be such that the cell and progeny of the cell include an alteration that changes the biologic product produced.

[0359] The mammalian cell many be a non-human mammal, e.g., primate, bovine, ovine, porcine, canine, rodent, Leporidae such as monkey, cow, sheep, pig, dog, rabbit, rat or mouse cell. The cell may be a non-mammalian eukaryotic cell such as poultry bird (e.g., chicken), vertebrate fish (e.g., salmon) or shellfish (e.g., oyster, claim, lobster, shrimp) cell. The cell may also be a plant cell. The plant cell may be of a monocot or dicot or of a crop or grain plant such as cassava, corn, sorghum, soybean, wheat, oat or rice. The plant cell may also be of an algae, tree or production plant, fruit or vegetable (e.g., trees such as citrus trees, e.g., orange, grapefruit or lemon trees; peach or nectarine trees; apple or pear trees; nut trees such as almond or walnut or pistachio trees; nightshade plants; plants of the genus Brassica; plants of the genus Lectica; plants of the genus Spinalis; plants of the genus Capsicum; cotton, tobacco, asparagus, carrot, cabbage, broccoli, cauliflower, tomato, eggplant, pepper, lettuce, spinach, strawberry, blueberry, raspberry, blackberry, grape, coffee, cocoa).

[0360] The invention provides a method of modifying a target locus of interest, the method comprising delivering to said locus a non-naturally occurring or engineered composition comprising a Cas protein and one or more nucleic acid components, wherein the effector protein forms a complex with the one or more nucleic acid components and upon binding of the said complex to the locus of interest the effector protein induces the modification of the target locus of interest. In a preferred embodiment, the modification is the introduction of a strand break.

[0361] In such methods the target locus of interest may be comprised within an RNA molecule. In a preferred embodiment, the target locus of interest comprises or consists of RNA.

[0362] The invention also provides a method of modifying a target locus of interest, the method comprising delivering to said locus a non-naturally occurring or engineered composition comprising a Cas protein and one or more nucleic acid components, wherein the Cas protein forms a complex with the one or more nucleic acid components and upon binding of the said complex to the locus of interest the effector protein induces the modification of the target locus of interest. In a preferred embodiment, the modification is the introduction of a strand break.

[0363] Preferably, in such methods the target locus of interest may be comprised in a RNA molecule in vitro. Also preferably, in such methods the target locus of interest may be comprised in a RNA molecule within a cell. The cell may be a prokaryotic cell or a eukaryotic cell. The cell may be a mammalian cell. The cell may be a rodent cell. The cell may be a mouse cell.

[0364] In any of the described methods the target locus of interest may be a genomic or epigenomic locus of interest. In any of the described methods the complex may be delivered with multiple guides for multiplexed use. In any of the described methods more than one protein(s) may be used.

[0365] In further aspects of the invention the nucleic acid components may comprise a CRISPR RNA (crRNA) sequence. As the effector protein is a Cas protein, the nucleic acid components may comprise a CRISPR RNA (crRNA) sequence and generally may not comprise any trans-activating crRNA (tracr RNA) sequence.

[0366] In any of the described methods the effector protein and nucleic acid components may be provided via one or more polynucleotide molecules encoding the protein and/or nucleic acid component(s), and wherein the one or more polynucleotide molecules are operably configured to express the protein and/or the nucleic acid component(s). The one or more polynucleotide molecules may comprise one or more regulatory elements operably configured to express the protein and/or the nucleic acid component(s). The one or more polynucleotide molecules may be comprised within one or more vectors. In any of the described methods the target locus of interest may be a genomic, epigenomic, or transcriptomic locus of interest.

### Transcript Tracking

[0367] In another aspect, the present disclosure provides compositions and methods for transcript tracking. In some embodiments, transcript tracking allows researchers to visualize transcripts in cells, tissues, organs or animals, providing important spatio-temporal information regarding RNA dynamics and function.

[0368] In some embodiments, the compositions may be a Cas protein herein with one or more labels, or a CRISPR-Cas system comprising such labeled Cas protein. The Cas protein or system may bind to one or more transcripts such that the transcripts may be detected (e.g., visualized) using the label on the Cas protein.

[0369] In some embodiments, the present disclosure includes a system for expressing a Cas protein with one or more polypeptides or polynucleotide labels. The system may comprise polynucleotides encoding the Cas protein and/or the labels. The system may further include vector systems comprising such polynucleotides. For example, a Cas protein may be fused with a fluorescent protein or a fragment thereof. Examples of fluorescent proteins include GFP proteins, EGFP, Azami-Green, Kaede, ZsGreenl and CopGFP; CFP proteins, such as Cerulean, mCFP, AmCyanl, MiCy, and CyPet; BFP proteins such as EBFP; YFP proteins such as EYFP, YPet, Venus, ZsYellow, and mCitrine; OFP proteins such as cOFP, mKO, and mOrange; red fluorescent protein, or RFP; red or far-red fluorescent proteins from any other species, such as Heteractis reef coral and Actinia or Entacmaea sea anemone, as well as variants thereof. RFPs include, for example, Discosoma variants, such as mRFP1, mCherry, tdTomato, mStrawberry, mTangerine, DsRed2, and DsRed-T1, Anthomedusa J-Red and Anemonia AsRed2. Far-red fluorescent proteins include, for example, Actinia AQ143, Entacmaea eqFP611, Discosoma variants such as mPlum and mRasberry, and Heteractis HcRed1 and t-HcRed.

[0370] In some cases, the systems for expressing the labeled Cas protein may be inducible. For example, the systems may comprise polynucleotides encoding the Cas protein and/or labels under control of a regulatory element herein, e.g., inducible promoters. Such systems may allow spatial and/or temporal control of the expression of the labels, thus enabling spatial and/or temporal control of transcript tracking.

[0371] In certain cases, the CRISPR-Cas may be labeled with a detectable tag. The labeling may be performed in cells. Alternatively or additionally, the labeling may be performed first and the labeled Cas protein is then delivered into cells, tissues, organs, or organs.

[0372] The detectable tags may be detected (e.g., visualized by imaging, ultrasound, or MRI). Examples of such detectable tags include detectable oligonucleotide tags may be, but are not limited to, oligonucleotides comprising unique nucleotide sequences, oligonucleotides comprising detectable moieties, and oligonucleotides comprising both unique nucleotide sequences and detectable moieties. In some cases, the detectable tag comprises a labeling substance, which is detectable by spectroscopic, photochemical, biochemical, immunochemical, electrical, optical or chemical means. Such tags include biotin for staining with labeled streptavidin conjugate, magnetic beads (e.g., Dynabeads®), fluorescent dyes (e.g., fluorescein, texas red, rhodamine, green fluorescent protein, and the like), radiolabels (e.g., ³H, ¹²⁵I, ³⁵S, ¹⁴C, or 32P), enzymes (e.g., horse radish peroxidase, alkaline phosphatase and others commonly used in an ELISA), and calorimetric labels such as colloidal gold or colored glass or plastic (e.g., polystyrene, polypropylene, latex, etc.) beads. Detectable tags may be detected by many methods. For example, radiolabels may be detected using photographic film or scintillation counters, fluorescent markers may be detected using a photodetector to detect emitted light. Enzymatic labels are typically detected by providing the enzyme with a substrate and detecting, the reaction product produced by the action of the enzyme on the substrate, and calorimetric labels are detected by simply visualizing the colored label. Examples of the labeling substance which may be employed include labeling substances known to those skilled in the art, such as fluorescent dyes, enzymes, coenzymes, chemiluminescent substances, and radioactive substances. Specific examples include radioisotopes (e.g., ³²P, ¹⁴C, ¹²⁵I, ³H, and ¹³¹I) fluorescein, rhodamine, dansyl chloride, umbelliferone, luciferase, peroxidase, alkaline phosphatase, β-galactosidase, β-glucosidase, horseradish peroxidase, glucoamylase, lysozyme, saccharide oxidase, microperoxidase, biotin, and ruthenium. In the case where biotin is employed as a labeling substance, preferably, after addition of a biotin-labeled antibody, streptavidin bound to an enzyme (e.g., peroxidase) is further added. Advantageously, the label is a fluorescent label. Examples of fluorescent labels include, but are not limited to, Atto dyes, 4-acetamido-4′-isothiocyanatostilbene-2,2′disulfonic acid; acridine and derivatives: acridine, acridine isothiocyanate; 5-(2′-aminoethyl)aminonaphthalene-1-sulfonic acid (EDANS); 4-amino-N-[3-vinylsulfonyl)phenyl]naphthalimide-3, 5 di sulfonate; N-(4-anilino naphthyl)maleimide; anthranilamide; BODIPY; Brilliant Yellow; coumarin and derivatives; coumarin, 7-amino-4-methylcoumarin (AMC, Coumarin 120), 7-amino trifluoromethylcouluarin (Coumaran 151); cyanine dyes; cyanosine; 4′,6-diaminidino phenylindole (DAPI); 5′5″-dibromopyrogallol-sulfonaphthalein (Bromopyrogallol Red); 7-diethylamino-3-(4′-isothiocyanatophenyl)-4-methylcoumarin; diethylenetriamine pentaacetate; 4,4′-diisothiocyanatodihydro-stilbene-2,2′-disulfonic acid; 4,4′-diisothiocyanatostilbene-2,2′-disulfonic acid; 5-[dimethylamino]naphthalene-1-sulfonyl chloride (DNS, dansylchloride); 4-dimethylaminophenylazophenyl-4′-isothiocyanate (DABITC); eosin and derivatives; eosin, eosin isothiocyanate, erythrosin and derivatives; erythrosin B, erythrosin, isothiocyanate; ethidium; fluorescein and derivatives; 5-carboxyfluorescein (FAM), 5-(4,6-dichlorotriazin-2-yl)aminofluorescein (DTAF), 2′,7′-dimethoxy-4′5′-dichloro-6-carboxyfluorescein, fluorescein, fluorescein isothiocyanate, QFITC, (XRITC); fluorescamine; IR144; IR1446; Malachite Green isothiocyanate; 4-methylumbelliferoneortho cresolphthalein; nitrotyrosine; pararosaniline; Phenol Red; B-phycoerythrin; o-phthaldialdehyde; pyrene and derivatives: pyrene, pyrene butyrate, succinimidyl 1-pyrene; butyrate quantum dots; Reactive Red 4 (Cibacron™ Brilliant Red 3B-A) rhodamine and derivatives: 6-carboxy-X-rhodamine (ROX), 6-carboxyrhodamine (R6G), lissamine rhodamine B sulfonyl chloride rhodamine (Rhod), rhodamine B, rhodamine 123, rhodamine X isothiocyanate, sulforhodamine B, sulforhodamine 101, sulfonyl chloride derivative of sulforhodamine 101 (Texas Red); N,N,N′,N′ tetramethyl-6-carboxyrhodamine (TAMRA); tetramethyl rhodamine; tetramethyl rhodamine isothiocyanate (TRITC); riboflavin; rosolic acid; terbium chelate derivatives; Cy3; Cy5; Cy5.5; Cy7; IRD 700; IRD 800; La Jolta Blue; phthalo cyanine; and naphthalo cyanine. A fluorescent label may be a fluorescent protein, such as blue fluorescent protein, cyan fluorescent protein, green fluorescent protein, red fluorescent protein, yellow fluorescent protein or any photoconvertible protein. Colorimetric labeling, bioluminescent labeling and/or chemiluminescent labeling may further accomplish labeling. Labeling further may include energy transfer between molecules in the hybridization complex by perturbation analysis, quenching, or electron transport between donor and acceptor molecules, the latter of which may be facilitated by double stranded match hybridization complexes. The fluorescent label may be a perylene or a terrylen. In the alternative, the fluorescent label may be a fluorescent bar code. Advantageously, the label may be light sensitive, wherein the label is light-activated and/or light cleaves the one or more linkers to release the molecular cargo. The light-activated molecular cargo may be a major light-harvesting complex (LHCII). In another embodiment, the fluorescent label may induce free radical formation. In some embodiments, the detectable moieties may be quantum dots.

[0373] In some embodiments, the present disclosure provides for a system for delivery the labeled Cas proteins or labeled CRISPR-Cas systems. The delivery system may comprise any delivery vehicles, e.g., those described herein such as RNP, liposomes, nanoparticles, exosomes, microvesicles, nucleic acid nanoassemblies, a gene gun, an implantable device, or the vector systems herein.

### Nucleic Acid Targeting

[0374] In certain embodiments, the Cas protein herein is, or in, or comprises, or consists essentially of, or consists of, or involves or relates to Cas protein herein, wherein one or more amino acids are mutated, as described herein elsewhere. Thus, in some embodiments, the effector protein may be a RNA-binding protein, such as a dead-Cas type effector protein, which may be optionally functionalized as described herein for instance with an transcriptional activator or repressor domain, NLS or other functional domain. In some embodiments, the effector protein may be a RNA-binding protein that cleaves a single strand of RNA. If the RNA bound is ssRNA, then the ssRNA is fully cleaved. In some embodiments, the effector protein may be a RNA-binding protein that cleaves a double strand of RNA, for example if it comprises two RNase domains. If the RNA bound is dsRNA, then the dsRNA is fully cleaved. In some embodiments, the effector protein may be a RNA-binding protein that has nickase activity, i.e. it binds dsRNA, but only cleaves one of the RNA strands.

[0375] RNase function in CRISPR systems is known, for example mRNA targeting has been reported for certain type III CRISPR-Cas systems (Hale et al., 2014, Genes Dev, vol. 28, 2432-2443; Hale et al., 2009, Cell, vol. 139, 945-956; Peng et al., 2015, Nucleic acids research, vol. 43, 406-417) and provides significant advantages. A CRISPR-Cas system, composition or method targeting RNA via the present effector proteins is thus provided.

[0376] The target RNA, i.e. the RNA of interest, is the RNA to be targeted by the present invention leading to the recruitment to, and the binding of the effector protein at, the target site of interest on the target RNA. The target RNA may be any suitable form of RNA. This may include, in some embodiments, mRNA. In other embodiments, the target RNA may include tRNA or rRNA.

### DNA Cleavage and Repair

[0377] The method comprises modifying a target polynucleotide using a CRISPR complex that binds to the target polynucleotide and effect cleavage of said target polynucleotide. Typically, the CRISPR complex of the invention, when introduced into a cell, creates a break (e.g., a single or a double strand break) in the genome sequence. For example, the method can be used to cleave a disease gene in a cell. The break created by the CRISPR complex can be repaired by a repair processes such as the error prone non-homologous end joining (NHEJ) pathway or the high fidelity homology-directed repair (HDR). During these repair process, an exogenous polynucleotide template can be introduced into the genome sequence. In some methods, the HDR process is used modify genome sequence. For example, an exogenous polynucleotide template comprising a sequence to be integrated flanked by an upstream sequence and a downstream sequence is introduced into a cell. The upstream and downstream sequences share sequence similarity with either side of the site of integration in the chromosome. Where desired, a donor polynucleotide can be DNA, e.g., a DNA plasmid, a bacterial artificial chromosome (BAC), a yeast artificial chromosome (YAC), a viral vector, a linear piece of DNA, a PCR fragment, a naked nucleic acid, or a nucleic acid complexed with a delivery vehicle such as a liposome or poloxamer. The exogenous polynucleotide template comprises a sequence to be integrated (e.g., a mutated gene). The sequence for integration may be a sequence endogenous or exogenous to the cell. Examples of a sequence to be integrated include polynucleotides encoding a protein or a non-coding RNA (e.g., a microRNA). Thus, the sequence for integration may be operably linked to an appropriate control sequence or sequences. Alternatively, the sequence to be integrated may provide a regulatory function. The upstream and downstream sequences in the exogenous polynucleotide template are selected to promote recombination between the chromosomal sequence of interest and the donor polynucleotide. The upstream sequence is a nucleic acid sequence that shares sequence similarity with the genome sequence upstream of the targeted site for integration. Similarly, the downstream sequence is a nucleic acid sequence that shares sequence similarity with the chromosomal sequence downstream of the targeted site of integration. The upstream and downstream sequences in the exogenous polynucleotide template can have 75%, 80%, 85%, 90%, 95%, or 100% sequence identity with the targeted genome sequence. Preferably, the upstream and downstream sequences in the exogenous polynucleotide template have about 95%, 96%, 97%, 98%, 99%, or 100% sequence identity with the targeted genome sequence. In some methods, the upstream and downstream sequences in the exogenous polynucleotide template have about 99% or 100% sequence identity with the targeted genome sequence. An upstream or downstream sequence may comprise from about 20 bp to about 2500 bp, for example, about 50, 100, 200, 300, 400, 500, 600, 700, 800, 900, 1000, 1100, 1200, 1300, 1400, 1500, 1600, 1700, 1800, 1900, 2000, 2100, 2200, 2300, 2400, or 2500 bp. In some methods, the exemplary upstream or downstream sequence have about 200 bp to about 2000 bp, about 600 bp to about 1000 bp, or more particularly about 700 bp to about 1000 bp. In some methods, the exogenous polynucleotide template may further comprise a marker. Such a marker may make it easy to screen for targeted integrations. Examples of suitable markers include restriction sites, fluorescent proteins, or selectable markers. The exogenous polynucleotide template of the invention can be constructed using recombinant techniques (see, for example, Sambrook et al., 2001 and Ausubel et al., 1996). In a method for modifying a target polynucleotide by integrating an exogenous polynucleotide template, a double stranded break is introduced into the genome sequence by the CRISPR complex, the break is repaired via homologous recombination an exogenous polynucleotide template such that the template is integrated into the genome. The presence of a double-stranded break facilitates integration of the template. In other embodiments, this invention provides a method of modifying expression of a polynucleotide in a eukaryotic cell. The method comprises increasing or decreasing expression of a target polynucleotide by using a CRISPR complex that binds to the polynucleotide. In some methods, a target polynucleotide can be inactivated to effect the modification of the expression in a cell. For example, upon the binding of a CRISPR complex to a target sequence in a cell, the target polynucleotide is inactivated such that the sequence is not transcribed, the coded protein is not produced, or the sequence does not function as the wild-type sequence does. For example, a protein or microRNA coding sequence may be inactivated such that the protein or microRNA or pre-microRNA transcript is not produced. In some methods, a control sequence can be inactivated such that it no longer functions as a control sequence. As used herein, “control sequence” refers to any nucleic acid sequence that effects the transcription, translation, or accessibility of a nucleic acid sequence. Examples of a control sequence include, a promoter, a transcription terminator, and an enhancer are control sequences. The target polynucleotide of a CRISPR complex can be any polynucleotide endogenous or exogenous to the eukaryotic cell. For example, the target polynucleotide can be a polynucleotide residing in the nucleus of the eukaryotic cell. The target polynucleotide can be a sequence coding a gene product (e.g., a protein) or a non-coding sequence (e.g., a regulatory polynucleotide or a junk DNA). Examples of target polynucleotides include a sequence associated with a signaling biochemical pathway, e.g., a signaling biochemical pathway-associated gene or polynucleotide. Examples of target polynucleotides include a disease associated gene or polynucleotide. A “disease-associated” gene or polynucleotide refers to any gene or polynucleotide which is yielding transcription or translation products at an abnormal level or in an abnormal form in cells derived from a disease-affected tissues compared with tissues or cells of a non-disease control. It may be a gene that becomes expressed at an abnormally high level; it may be a gene that becomes expressed at an abnormally low level, where the altered expression correlates with the occurrence and/or progression of the disease. A disease-associated gene also refers to a gene possessing mutation(s) or genetic variation that is directly responsible or is in linkage disequilibrium with a gene(s) that is responsible for the etiology of a disease. The transcribed or translated products may be known or unknown, and may be at a normal or abnormal level. The target polynucleotide of a CRISPR complex can be any polynucleotide endogenous or exogenous to the eukaryotic cell. For example, the target polynucleotide can be a polynucleotide residing in the nucleus of the eukaryotic cell. The target polynucleotide can be a sequence coding a gene product (e.g., a protein) or a non-coding sequence (e.g., a regulatory polynucleotide or a junk DNA).

Gene Editing or Altering a Target Loci with Cas; HDR and Templates

[0378] The double strand break or single strand break in one of the strands advantageously should be sufficiently close to target position such that correction occurs. In an embodiment, the distance is not more than 50, 100, 200, 300, 350 or 400 nucleotides. While not wishing to be bound by theory, it is believed that the break should be sufficiently close to target position such that the break is within the region that is subject to exonuclease-mediated removal during end resection. If the distance between the target position and a break is too great, the mutation may not be included in the end resection and, therefore, may not be corrected, as the template nucleic acid sequence may only be used to correct sequence within the end resection region.

[0379] In an embodiment, in which a guide RNA and a Type IV molecule, in particular Cas or an ortholog or homolog thereof, preferably a Cas nuclease induce a double strand break for the purpose of inducing HDR-mediated correction, the cleavage site is between 0-200 bp (e.g., 0 to 175, 0 to 150, 0 to 125, 0 to 100, 0 to 75, 0 to 50, 0 to 25, 25 to 200, 25 to 175, 25 to 150, 25 to 125, 25 to 100, 25 to 75, 25 to 50, 50 to 200, 50 to 175, 50 to 150, 50 to 125, 50 to 100, 50 to 75, 75 to 200, 75 to 175, 75 to 150, 75 to 125, 75 to 100 bp) away from the target position. In an embodiment, the cleavage site is between 0-100 bp (e.g., 0 to 75, 0 to 50, 0 to 25, 25 to 100, 25 to 75, 25 to 50, 50 to 100, 50 to 75 or 75 to 100 bp) away from the target position. In a further embodiment, two or more guide RNAs complexing with Cas or an ortholog or homolog thereof, may be used to induce multiplexed breaks for purpose of inducing HDR-mediated correction.

[0380] The homology arm should extend at least as far as the region in which end resection may occur, e.g., in order to allow the resected single stranded overhang to find a complementary region within the donor template. The overall length could be limited by parameters such as plasmid size or viral packaging limits. In an embodiment, a homology arm may not extend into repeated elements. Exemplary homology arm lengths include a least 50, 100, 250, 500, 750 or 1000 nucleotides.

[0381] Target position, as used herein, refers to a site on a target nucleic acid or target gene (e.g., the chromosome) that is modified by a Type IV, in particular Cas or an ortholog or homolog thereof, preferably Cas molecule-dependent process. For example, the target position can be a modified Cas molecule cleavage of the target nucleic acid and template nucleic acid directed modification, e.g., correction, of the target position. In an embodiment, a target position can be a site between two nucleotides, e.g., adjacent nucleotides, on the target nucleic acid into which one or more nucleotides is added. The target position may comprise one or more nucleotides that are altered, e.g., corrected, by a template nucleic acid. In an embodiment, the target position is within a target sequence (e.g., the sequence to which the guide RNA binds). In an embodiment, a target position is upstream or downstream of a target sequence (e.g., the sequence to which the guide RNA binds).

[0382] A template nucleic acid, as that term is used herein, refers to a nucleic acid sequence which can be used in conjunction with a Type IV molecule, in particular Cas or an ortholog or homolog thereof, preferably a Cas molecule and a guide RNA molecule to alter the structure of a target position. In an embodiment, the target nucleic acid is modified to have some or all of the sequence of the template nucleic acid, typically at or near cleavage site(s). In an embodiment, the template nucleic acid is single stranded. In an alternate embodiment, the template nucleic acid is double stranded. In an embodiment, the template nucleic acid is DNA, e.g., double stranded DNA. In an alternate embodiment, the template nucleic acid is single stranded DNA.

[0383] In an embodiment, the template nucleic acid alters the structure of the target position by participating in homologous recombination. In an embodiment, the template nucleic acid alters the sequence of the target position. In an embodiment, the template nucleic acid results in the incorporation of a modified, or non-naturally occurring base into the target nucleic acid.

[0384] The template sequence may undergo a breakage mediated or catalyzed recombination with the target sequence. In an embodiment, the template nucleic acid may include sequence that corresponds to a site on the target sequence that is cleaved by a Cas mediated cleavage event. In an embodiment, the template nucleic acid may include sequence that corresponds to both, a first site on the target sequence that is cleaved in a first Cas mediated event, and a second site on the target sequence that is cleaved in a second Cas mediated event.

[0385] In certain embodiments, the template nucleic acid can include sequence which results in an alteration in the coding sequence of a translated sequence, e.g., one which results in the substitution of one amino acid for another in a protein product, e.g., transforming a mutant allele into a wild type allele, transforming a wild type allele into a mutant allele, and/or introducing a stop codon, insertion of an amino acid residue, deletion of an amino acid residue, or a nonsense mutation. In certain embodiments, the template nucleic acid can include sequence which results in an alteration in a non-coding sequence, e.g., an alteration in an exon or in a 5′ or 3′ non-translated or non-transcribed region. Such alterations include an alteration in a control element, e.g., a promoter, enhancer, and an alteration in a cis-acting or trans-acting control element.

[0386] A template nucleic acid having homology with a target position in a target gene may be used to alter the structure of a target sequence. The template sequence may be used to alter an unwanted structure, e.g., an unwanted or mutant nucleotide. The template nucleic acid may include sequence which, when integrated, results in: decreasing the activity of a positive control element; increasing the activity of a positive control element; decreasing the activity of a negative control element; increasing the activity of a negative control element; decreasing the expression of a gene; increasing the expression of a gene; increasing resistance to a disorder or disease; increasing resistance to viral entry; correcting a mutation or altering an unwanted amino acid residue conferring, increasing, abolishing or decreasing a biological property of a gene product, e.g., increasing the enzymatic activity of an enzyme, or increasing the ability of a gene product to interact with another molecule.

[0387] The template nucleic acid may include sequence which results in: a change in sequence of 1, 2, 3, 4, 5, 6, 7, 8, 9, 10, 11, 12 or more nucleotides of the target sequence. In an embodiment, the template nucleic acid may be 20+/−10, 30+/−10, 40+/−10, 50+/−10, 60+/−10, 70+/−10, 80+/−10, 90+/−10, 100+/−10, 1 10+/−10, 120+/−10, 130+/−10, 140+/−10, 150+/−10, 160+/−10, 170+/−10, 1 80+/−10, 190+/−10, 200+/−10, 210+/−10, of 220+/−10 nucleotides in length. In an embodiment, the template nucleic acid may be 30+/−20, 40+/−20, 50+/−20, 60+/−20, 70+/−20, 80+/−20, 90+/−20, 100+/−20, 1 10+/−20, 120+/−20, 130+/−20, 140+/−20, I 50+/−20, 160+/−20, 170+/−20, 180+/−20, 190+/−20, 200+/−20, 210+/−20, of 220+/−20 nucleotides in length. In an embodiment, the template nucleic acid is 10 to 1,000, 20 to 900, 30 to 800, 40 to 700, 50 to 600, 50 to 500, 50 to 400, 50 to 300, 50 to 200, or 50 to 100 nucleotides in length.

[0388] A template nucleic acid comprises the following components: [5′ homology arm]-[replacement sequence]-[3′ homology arm]. The homology arms provide for recombination into the chromosome, thus replacing the undesired element, e.g., a mutation or signature, with the replacement sequence. In an embodiment, the homology arms flank the most distal cleavage sites. In an embodiment, the 3′ end of the 5′ homology arm is the position next to the 5′ end of the replacement sequence. In an embodiment, the 5′ homology arm can extend at least 10, 20, 30, 40, 50, 100, 200, 300, 400, 500, 600, 700, 800, 900, 1000, 1500, or 2000 nucleotides 5′ from the 5′ end of the replacement sequence. In an embodiment, the 5′ end of the 3′ homology arm is the position next to the 3′ end of the replacement sequence. In an embodiment, the 3′ homology arm can extend at least 10, 20, 30, 40, 50, 100, 200, 300, 400, 500, 600, 700, 800, 900, 1000, 1500, or 2000 nucleotides 3′ from the 3′ end of the replacement sequence.

[0389] In certain embodiments, one or both homology arms may be shortened to avoid including certain sequence repeat elements. For example, a 5′ homology arm may be shortened to avoid a sequence repeat element. In other embodiments, a 3′ homology arm may be shortened to avoid a sequence repeat element. In some embodiments, both the 5′ and the 3′ homology arms may be shortened to avoid including certain sequence repeat elements.

[0390] In certain embodiments, a template nucleic acids for correcting a mutation may designed for use as a single-stranded oligonucleotide. When using a single-stranded oligonucleotide, 5′ and 3′ homology arms may range up to about 200 base pairs (bp) in length, e.g., at least 25, 50, 75, 100, 125, 150, 175, or 200 bp in length.

### DNA Repair and NHEJ

[0391] In certain embodiments, nuclease-induced non-homologous end-joining (NHEJ) can be used to target gene-specific knockouts. Nuclease-induced NHEJ can also be used to remove (e.g., delete) sequence in a gene of interest. Generally, NHEJ repairs a double-strand break in the DNA by joining together the two ends; however, generally, the original sequence is restored only if two compatible ends, exactly as they were formed by the double-strand break, are perfectly ligated. The DNA ends of the double-strand break are frequently the subject of enzymatic processing, resulting in the addition or removal of nucleotides, at one or both strands, prior to rejoining of the ends. This results in the presence of insertion and/or deletion (indel) mutations in the DNA sequence at the site of the NHEJ repair. Two-thirds of these mutations typically alter the reading frame and, therefore, produce a non-functional protein. Additionally, mutations that maintain the reading frame, but which insert or delete a significant amount of sequence, can destroy functionality of the protein. This is locus dependent as mutations in critical functional domains are likely less tolerable than mutations in non-critical regions of the protein. The indel mutations generated by NHEJ are unpredictable in nature; however, at a given break site certain indel sequences are favored and are over-represented in the population, likely due to small regions of microhomology. The lengths of deletions can vary widely; most commonly in the 1-50 bp range, but they can easily be greater than 50 bp, e.g., they can easily reach greater than about 100-200 bp. Insertions tend to be shorter and often include short duplications of the sequence immediately surrounding the break site. However, it is possible to obtain large insertions, and in these cases, the inserted sequence has often been traced to other regions of the genome or to plasmid DNA present in the cells.

[0392] Because NHEJ is a mutagenic process, it may also be used to delete small sequence motifs as long as the generation of a specific final sequence is not required. If a double-strand break is targeted near to a short target sequence, the deletion mutations caused by the NHEJ repair often span, and therefore remove, the unwanted nucleotides. For the deletion of larger DNA segments, introducing two double-strand breaks, one on each side of the sequence, can result in NHEJ between the ends with removal of the entire intervening sequence. Both of these approaches can be used to delete specific DNA sequences; however, the error-prone nature of NHEJ may still produce indel mutations at the site of repair.

[0393] Both double strand cleaving Type IV molecule, in particular Cas or an ortholog or homolog thereof, preferably Cas molecules and single strand, or nickase, Type IV molecule, in particular Cas or an ortholog or homolog thereof, preferably Cas molecules can be used in the methods and compositions described herein to generate NHEJ-mediated indels. NHEJ-mediated indels targeted to the gene, e.g., a coding region, e.g., an early coding region of a gene of interest can be used to knockout (i.e., eliminate expression of) a gene of interest. For example, early coding region of a gene of interest includes sequence immediately following a transcription start site, within a first exon of the coding sequence, or within 500 bp of the transcription start site (e.g., less than 500, 450, 400, 350, 300, 250, 200, 150, 100 or 50 bp).

[0394] In an embodiment, in which a guide RNA and Type IV molecule, in particular Cas or an ortholog or homolog thereof, preferably Cas nuclease generate a double strand break for the purpose of inducing NHEJ-mediated indels, a guide RNA may be configured to position one double-strand break in close proximity to a nucleotide of the target position. In an embodiment, the cleavage site may be between 0-500 bp away from the target position (e.g., less than 500, 400, 300, 200, 100, 50, 40, 30, 25, 20, 15, 10, 9, 8, 7, 6, 5, 4, 3, 2 or 1 bp from the target position).

[0395] In an embodiment, in which two guide RNAs complexing with Type IV molecules, in particular Cas or an ortholog or homolog thereof, preferably Cas nickases induce two single strand breaks for the purpose of inducing NHEJ-mediated indels, two guide RNAs may be configured to position two single-strand breaks to provide for NHEJ repair a nucleotide of the target position.

### Self-Inactivating Systems

[0396] Once all copies of RNA in a cell have been edited, continued a CRISPR-Cas protein expression or activity in that cell is no longer necessary. A Self-Inactivating system that relies on the use of RNA as to the CRISPR-Cas or crRNA as the guide target sequence can shut down the system by preventing expression of CRISPR-Cas or complex formation.

### Modulation of Cellular Status

[0397] In certain embodiments CRISPR-Cas in a complex with crRNA is activated upon binding to target RNA and subsequently cleaves any nearby ssRNA targets (i.e, “collateral” or “bystander” effects). CRISPR-Cas, once primed by the cognate target, can cleave other (non-complementary) RNA molecules. Such promiscuous RNA cleavage could potentially cause cellular toxicity, or otherwise affect cellular physiology or cell status.

[0398] Accordingly, in certain embodiments, the non-naturally occurring or engineered composition, vector system, or delivery systems as described herein are used for or are for use in induction of cell dormancy. In certain embodiments, the non-naturally occurring or engineered composition, vector system, or delivery systems as described herein are used for or are for use in induction of cell cycle arrest. In certain embodiments, the non-naturally occurring or engineered composition, vector system, or delivery systems as described herein are used for or are for use in reduction of cell growth and/or cell proliferation, In certain embodiments, the non-naturally occurring or engineered composition, vector system, or delivery systems as described herein are used for or are for use in induction of cell anergy. In certain embodiments, the non-naturally occurring or engineered composition, vector system, or delivery systems as described herein are used for or are for use in induction of cell apoptosis. In certain embodiments, the non-naturally occurring or engineered composition, vector system, or delivery systems as described herein are used for or are for use in induction of cell necrosis. In certain embodiments, the non-naturally occurring or engineered composition, vector system, or delivery systems as described herein are used for or are for use in induction of cell death. In certain embodiments, the non-naturally occurring or engineered composition, vector system, or delivery systems as described herein are used for or are for use in induction of programmed cell death.

[0399] In certain embodiments, the invention relates to a method for induction of cell dormancy comprising introducing or inducing the non-naturally occurring or engineered composition, vector system, or delivery systems as described herein. In certain embodiments, the invention relates to a method for induction of cell cycle arrest comprising introducing or inducing the non-naturally occurring or engineered composition, vector system, or delivery systems as described herein. In certain embodiments, the invention relates to a method for reduction of cell growth and/or cell proliferation comprising introducing or inducing the non-naturally occurring or engineered composition, vector system, or delivery systems as described herein. In certain embodiments, the invention relates to a method for induction of cell anergy comprising introducing or inducing the non-naturally occurring or engineered composition, vector system, or delivery systems as described herein. In certain embodiments, the invention relates to a method for induction of cell apoptosis comprising introducing or inducing the non-naturally occurring or engineered composition, vector system, or delivery systems as described herein. In certain embodiments, the invention relates to a method for induction of cell necrosis comprising introducing or inducing the non-naturally occurring or engineered composition, vector system, or delivery systems as described herein. In certain embodiments, the invention relates to a method for induction of cell death comprising introducing or inducing the non-naturally occurring or engineered composition, vector system, or delivery systems as described herein. In certain embodiments, the invention relates to a method for induction of programmed cell death comprising introducing or inducing the non-naturally occurring or engineered composition, vector system, or delivery systems as described herein.

[0400] The methods and uses as described herein may be therapeutic or prophylactic and may target particular cells, cell (sub)populations, or cell/tissue types. In particular, the methods and uses as described herein may be therapeutic or prophylactic and may target particular cells, cell (sub)populations, or cell/tissue types expressing one or more target sequences, such as one or more particular target RNA (e.g., ss RNA). Without limitation, target cells may for instance be cancer cells expressing a particular transcript, e.g. neurons of a given class, (immune) cells causing e.g. autoimmunity, or cells infected by a specific (e.g., viral) pathogen, etc.

[0401] Accordingly, in certain embodiments, the invention relates to a method for treating a pathological condition characterized by the presence of undesirable cells (host cells), comprising introducing or inducing the non-naturally occurring or engineered composition, vector system, or delivery systems as described herein. In certain embodiments, the invention relates the use of the non-naturally occurring or engineered composition, vector system, or delivery systems as described herein for treating a pathological condition characterized by the presence of undesirable cells (host cells). In certain embodiments, the invention relates the non-naturally occurring or engineered composition, vector system, or delivery systems as described herein for use in treating a pathological condition characterized by the presence of undesirable cells (host cells). It is to be understood that preferably the CRISPR-Cas system targets a target specific for the undesirable cells. In certain embodiments, the invention relates to the use of the non-naturally occurring or engineered composition, vector system, or delivery systems as described herein for treating, preventing, or alleviating cancer. In certain embodiments, the invention relates to the non-naturally occurring or engineered composition, vector system, or delivery systems as described herein for use in treating, preventing, or alleviating cancer. In certain embodiments, the invention relates to a method for treating, preventing, or alleviating cancer comprising introducing or inducing the non-naturally occurring or engineered composition, vector system, or delivery systems as described herein. It is to be understood that preferably the CRISPR-Cas system targets a target specific for the cancer cells. In certain embodiments, the invention relates to the use of the non-naturally occurring or engineered composition, vector system, or delivery systems as described herein for treating, preventing, or alleviating infection of cells by a pathogen. In certain embodiments, the invention relates to the non-naturally occurring or engineered composition, vector system, or delivery systems as described herein for use in treating, preventing, or alleviating infection of cells by a pathogen. In certain embodiments, the invention relates to a method for treating, preventing, or alleviating infection of cells by a pathogen comprising introducing or inducing the non-naturally occurring or engineered composition, vector system, or delivery systems as described herein. It is to be understood that preferably the CRISPR-Cas system targets a target specific for the cells infected by the pathogen (e.g. a pathogen derived target). In certain embodiments, the invention relates to the use of the non-naturally occurring or engineered composition, vector system, or delivery systems as described herein for treating, preventing, or alleviating an autoimmune disorder. In certain embodiments, the invention relates to the non-naturally occurring or engineered composition, vector system, or delivery systems as described herein for use in treating, preventing, or alleviating an autoimmune disorder. In certain embodiments, the invention relates to a method for treating, preventing, or alleviating an autoimmune disorder comprising introducing or inducing the non-naturally occurring or engineered composition, vector system, or delivery systems as described herein. It is to be understood that preferably the CRISPR-Cas system targets a target specific for the cells responsible for the autoimmune disorder (e.g. specific immune cells).

### In Vitro Apex Labeling

[0402] Cellular processes depend on a network of molecular interactions among protein, RNA, and DNA. Accurate detection of protein—DNA and protein—RNA interactions is key to understanding such processes. In vitro proximity labeling technology employs an affinity tag combined with e.g. a photoactivatable probe to label polypeptides and RNAs in the vicinity of a protein or RNA of interest in vitro. After UV irradiation the photoactivatable group reacts with proteins and other molecules that are in close proximity to the tagged molecule, thereby labelling them. Labelled interacting molecules can subsequently be recovered and identified. The Cas protein of the invention can for instance be used to target a probe to a selected RNA sequence.

[0403] These applications could also be applied in animal models for in vivo imaging of disease relevant applications or difficult-to culture cell types.

### Synthetic Biology

[0404] The development of biological systems has a wide utility, including in clinical applications. It is envisaged that the programmable Cas proteins of the invention can be used fused to split proteins of toxic domains for targeted cell death, for instance using cancer-linked RNA as target transcript. Further, pathways involving protein-protein interaction can be influenced in synthetic biological systems with e.g. fusion complexes with the appropriate effectors such as kinases or other enzymes.

### Protein Splicing: Inteins

[0405] Protein splicing is a post-translational process in which an intervening polypeptide, referred to as an intein, catalyzes its own excision from the polypeptides flacking it, referred to as exteins, as well as subsequent ligation of the exteins. The assembly of two or more Cas proteins as described herein on a target transcript could be used to direct the release of a split intein (Topilina and Mills Mob DNA. 2014 Feb. 4; 5(1):5), thereby allowing for direct computation of the existence of a mRNA transcript and subsequent release of a protein product, such as a metabolic enzyme or a transcription factor (for downstream actuation of transcription pathways). This application may have significant relevance in synthetic biology (see above) or large-scale bioproduction (only produce product under certain conditions).

### Inducible, Dosed and Self-Inactivating Systems

[0406] In one embodiment, fusion complexes comprising an Cas protein of the invention and an effector component are designed to be inducible, for instance light inducible or chemically inducible. Such inducibility allows for activation of the effector component at a desired moment in time.

[0407] Light inducibility is for instance achieved by designing a fusion complex wherein CRY2 PHR/CIBN pairing is used for fusion. This system is particularly useful for light induction of protein interactions in living cells (Konermann S, et al. Nature. 2013; 500:472-476).

[0408] Chemical inducibility is for instance provided for by designing a fusion complex wherein FKBP/FRB (FK506 binding protein/FKBP rapamycin binding) pairing is used for fusion. Using this system rapamycin is required for binding of proteins (Zetsche et al. Nat Biotechnol. 2015; 33(2):139-42 describes the use of this system for Cas).

[0409] Further, when introduced in the cell as DNA, the Cas protein of the inventions can be modulated by inducible promoters, such as tetracycline or doxycycline controlled transcriptional activation (Tet-On and Tet-Off expression system), hormone inducible gene expression system such as for instance an ecdysone inducible gene expression system and an arabinose-inducible gene expression system. When delivered as RNA, expression of the Cas protein can be modulated via a riboswitch, which can sense a small molecule like tetracycline (as described in Goldfless et al. Nucleic Acids Res. 2012; 40(9):e64).

[0410] In one embodiment, the delivery of the Cas protein of the invention can be modulated to change the amount of protein or crRNA in the cell, thereby changing the magnitude of the desired effect or any undesired off-target effects.

[0411] In one embodiment, the Cas proteins described herein can be designed to be self-inactivating. When delivered to a cell as RNA, either mRNA or as a replication RNA therapeutic (Wrobleska et al Nat Biotechnol. 2015 August; 33(8): 839-841), they can self-inactivate expression and subsequent effects by destroying the own RNA, thereby reducing residency and potential undesirable effects.

[0412] For further in vivo applications of Cas proteins as described herein, reference is made to Mackay J P et al (Nat Struct Mol Biol. 2011 March; 18(3):256-61), Nelles et al (Bioessays. 2015 July; 37(7):732-9) and Abil Z and Zhao H (Mol Biosyst. 2015 October; 11(10):2658-65), which are incorporated herein by reference. In particular, the following applications are envisaged in certain embodiments of the invention, preferably in certain embodiments by using catalytically inactive CRISPR-Cas: enhancing translation (e.g. CRISPR-Cas—translation promotion factor fusions (e.g. eIF4 fusions)); repressing translation (e.g. gRNA targeting ribosome binding sites); exon skipping (e.g. gRNAs targeting splice donor and/or acceptor sites); exon inclusion (e.g. gRNA targeting a particular exon splice donor and/or acceptor site to be included or CRISPR-Cas fused to or recruiting spliceosome components (e.g. U1 snRNA)); accessing RNA localization (e.g. CRISPR-Cas—marker fusions (e.g. EGFP fusions)); altering RNA localization (e.g. CRISPR-Cas—localization signal fusions (e.g. NLS or NES fusions)); RNA degradation (in this case no catalytically inactive CRISPR-Cas is to be used if relied on the activity of CRISPR-Cas, alternatively and for increased specificity, a split CRISPR-Cas may be used); inhibition of non-coding RNA function (e.g. miRNA), such as by degradation or binding of gRNA to functional sites (possibly titrating out at specific sites by relocalization by CRISPR-Cas-signal sequence fusions).

[0413] As described herein before and demonstrated in the Examples, CRISPR-Cas function is robust to 5′ or 3′ extensions of the crRNA and to extension of the crRNA loop. It is therefore envisaging that MS2 loops and other recruitment domains can be added to the crRNA without affecting complex formation and binding to target transcripts. Such modifications to the crRNA for recruitment of various effector domains are applicable in the uses of a RNA targeted effector proteins described above.

[0414] CRISPR-Cas is capable of mediating resistance to RNA phages. It is therefore envisaged that CRISPR-Cas can be used to immunize, e.g. animals, humans and plants, against RNA-only pathogens, including but not limited to Ebola virus and Zika virus.

[0415] In certain embodiments, CRISPR-Cas can process (cleave) its own array. This applies to both the wildtype Cas protein and the mutated Cas protein containing one or more mutated amino acid residues as herein discussed. It is therefore envisaged that multiple crRNAs designed for different target transcripts and/or applications can be delivered as a single pre-crRNA or as a single transcript driven by one promotor. Such method of delivery has the advantages that it is substantially more compact, easier to synthesize and easier to delivery in viral systems. It will be understood that exact amino acid positions may vary for orthologues of a herein CRISPR-Cas can be adequately determined by protein alignment, as is known in the art, and as described herein elsewhere. Aspects of the invention also encompass methods and uses of the compositions and systems described herein in genome engineering, e.g. for altering or manipulating the expression of one or more genes or the one or more gene products, in prokaryotic or eukaryotic cells, in vitro, in vivo or ex vivo.

[0416] In an aspect, the invention provides methods and compositions for modulating, e.g., reducing, expression of a target RNA in cells. In the subject methods, a CRISPR-Cas system of the invention is provided that interferes with transcription, stability, and/or translation of an RNA.

[0417] In certain embodiments, an effective amount of CRISPR-Cas system is used to cleave RNA or otherwise inhibit RNA expression. In this regard, the system has uses similar to siRNA and shRNA, thus can also be substituted for such methods. The method includes, without limitation, use of a CRISPR-Cas system as a substitute for e.g., an interfering ribonucleic acid (such as an siRNA or shRNA) or a transcription template thereof, e.g., a DNA encoding an shRNA. The CRISPR-Cas system is introduced into a target cell, e.g., by being administered to a mammal that includes the target cell.

[0418] Advantageously, a CRISPR-Cas system of the invention is specific. For example, whereas interfering ribonucleic acid (such as an siRNA or shRNA) polynucleotide systems are plagued by design and stability issues and off-target binding, a CRISPR-Cas system of the invention can be designed with high specificity.

[0419] In an aspect of the invention, novel systems also referred to as RNA- or CRISPR systems of the present application are based on herein-identified Cas proteins which do not require the generation of customized proteins to target specific RNA sequences but rather a single enzyme can be programmed by a RNA molecule to recognize a specific RNA target, in other words the enzyme can be recruited to a specific RNA target using said RNA molecule.

[0420] In some embodiments, one or more elements of a nucleic acid-targeting system is derived from a particular organism comprising an endogenous CRISPR system. In certain embodiments, the CRISPR system is found in Eubacterium and Ruminococcus. In certain embodiments, the effector protein comprises targeted and collateral ssRNA cleavage activity.

[0421] In certain embodiments, the effector protein locus structures include a WYL domain containing accessory protein (so denoted after three amino acids that were conserved in the originally identified group of these domains; see, e.g., WYL domain IPRO26881). In certain embodiments, the WYL domain accessory protein comprises at least one helix-turn-helix (HTH) or ribbon-helix-helix (RHH) DNA-binding domain. In certain embodiments, the WYL domain containing accessory protein increases both the targeted and the collateral ssRNA cleavage activity of the Cas protein. In certain embodiments, the WYL domain containing accessory protein comprises an N-terminal RHH domain, as well as a pattern of primarily hydrophobic conserved residues, including an invariant tyrosine-leucine doublet corresponding to the original WYL motif. In certain embodiments, the WYL domain containing accessory protein is WYL1. WYL1 is a single WYL-domain protein associated primarily with Ruminococcus.

### Genome-Wide Knock-Out Screening

[0422] The Cas proteins and systems described herein can be used to perform efficient and cost effective functional genomic screens. Such screens can utilize CRISPR-Cas genome wide libraries. Such screens and libraries can provide for determining the function of genes, cellular pathways genes are involved in, and how any alteration in gene expression can result in a particular biological process. An advantage of the present invention is that the CRISPR system avoids off-target binding and its resulting side effects. This is achieved using systems arranged to have a high degree of sequence specificity for the target DNA.

[0423] A genome wide library may comprise a plurality of CRISPR-Cas system guide RNAs, as described herein, comprising guide sequences that are capable of targeting a plurality of target sequences in a plurality of genomic loci in a population of eukaryotic cells. The population of cells may be a population of embryonic stem (ES) cells. The target sequence in the genomic locus may be a non-coding sequence. The non-coding sequence may be an intron, regulatory sequence, splice site, 3′ UTR, 5′ UTR, or polyadenylation signal. Gene function of one or more gene products may be altered by said targeting. The targeting may result in a knockout of gene function. The targeting of a gene product may comprise more than one guide RNA. A gene product may be targeted by 2, 3, 4, 5, 6, 7, 8, 9, or 10 guide RNAs, preferably 3 to 4 per gene. Off-target modifications may be minimized (See, e.g., DNA targeting specificity of RNA-guided Cas9 nucleases. Hsu, P., Scott, D., Weinstein, J., Ran, F A., Konermann, S., Agarwala, V., Li, Y., Fine, E., Wu, X., Shalem, O., Cradick, T J., Marraffini, L A., Bao, G., & Zhang, F. Nat Biotechnol doi:10.1038/nbt.2647 (2013)), incorporated herein by reference. The targeting may be of about 100 or more sequences. The targeting may be of about 1000 or more sequences. The targeting may be of about 20,000 or more sequences. The targeting may be of the entire genome. The targeting may be of a panel of target sequences focused on a relevant or desirable pathway. The pathway may be an immune pathway. The pathway may be a cell division pathway.

[0424] One aspect of the invention comprehends a genome wide library that may comprise a plurality of CRISPR-Cas system guide RNAs that may comprise guide sequences that are capable of targeting a plurality of target sequences in a plurality of genomic loci, wherein said targeting results in a knockout of gene function. This library may potentially comprise guide RNAs that target each and every gene in the genome of an organism.

[0425] In some embodiments of the invention the organism or subject is a eukaryote (including mammal including human) or a non-human eukaryote or a non-human animal or a non-human mammal. In some embodiments, the organism or subject is a non-human animal, and may be an arthropod, for example, an insect, or may be a nematode. In some methods of the invention the organism or subject is a plant. In some methods of the invention the organism or subject is a mammal or a non-human mammal. A non-human mammal may be for example a rodent (preferably a mouse or a rat), an ungulate, or a primate. In some methods of the invention the organism or subject is algae, including microalgae, or is a fungus.

[0426] The knockout of gene function may comprise: introducing into each cell in the population of cells a vector system of one or more vectors comprising an engineered, non-naturally occurring CRISPR-Cas system comprising I. a Cas protein, and II. one or more guide RNAs, wherein components I and II may be same or on different vectors of the system, integrating components I and II into each cell, wherein the guide sequence targets a unique gene in each cell, wherein the Cas protein is operably linked to a regulatory element, wherein when transcribed, the guide RNA comprising the guide sequence directs sequence-specific binding of a CRISPR-Cas system to a target sequence in the genomic loci of the unique gene, inducing cleavage of the genomic loci by the Cas protein, and confirming different knockout mutations in a plurality of unique genes in each cell of the population of cells thereby generating a gene knockout cell library. The invention comprehends that the population of cells is a population of eukaryotic cells, and in a preferred embodiment, the population of cells is a population of embryonic stem (ES) cells.

[0427] The one or more vectors may be plasmid vectors. The vector may be a single vector comprising Cas, a sgRNA, and optionally, a selection marker into target cells. Not being bound by a theory, the ability to simultaneously deliver Cas and sgRNA through a single vector enables application to any cell type of interest, without the need to first generate cell lines that express Cas. The regulatory element may be an inducible promoter. The inducible promoter may be a doxycycline inducible promoter. In some methods of the invention the expression of the guide sequence is under the control of the T7 promoter and is driven by the expression of T7 polymerase. The confirming of different knockout mutations may be by whole exome sequencing. The knockout mutation may be achieved in 100 or more unique genes. The knockout mutation may be achieved in 1000 or more unique genes. The knockout mutation may be achieved in 20,000 or more unique genes. The knockout mutation may be achieved in the entire genome. The knockout of gene function may be achieved in a plurality of unique genes which function in a particular physiological pathway or condition. The pathway or condition may be an immune pathway or condition. The pathway or condition may be a cell division pathway or condition.

[0428] The invention also provides kits that comprise the genome wide libraries mentioned herein. The kit may comprise a single container comprising vectors or plasmids comprising the library of the invention. The kit may also comprise a panel comprising a selection of unique CRISPR-Cas system guide RNAs comprising guide sequences from the library of the invention, wherein the selection is indicative of a particular physiological condition. The invention comprehends that the targeting is of about 100 or more sequences, about 1000 or more sequences or about 20,000 or more sequences or the entire genome. Furthermore, a panel of target sequences may be focused on a relevant or desirable pathway, such as an immune pathway or cell division.

### Applications in Plants and Fungi

[0429] in general, the term “plant” relates to any various photosynthetic, eukaryotic, unicellular or multicellular organism of the kingdom Plantae characteristically growing by cell division, containing chloroplasts, and having cell walls comprised of cellulose. The term plant encompasses monocotyledonous and dicotyledonous plants. Specifically, the plants are intended to comprise without limitation angiosperm and gymnosperm plants such as acacia, alfalfa, amaranth, apple, apricot, artichoke, ash tree, asparagus, avocado, banana, barley, beans, beet, birch, beech, blackberry, blueberry, broccoli, Brussel's sprouts, cabbage, canola, cantaloupe, carrot, cassava, cauliflower, cedar, a cereal, celery, chestnut, cherry, Chinese cabbage, citrus, clementine, clover, coffee, corn, cotton, cowpea, cucumber, cypress, eggplant, elm, endive, Eucalyptus, fennel, figs, fir, geranium, grape, grapefruit, groundnuts, ground cherry, gum hemlock, hickory, kale, kiwifruit, kohlrabi, larch, lettuce, leek, lemon, lime, locust, pine, maidenhair, maize, mango, maple, melon, millet, mushroom, mustard, nuts, oak, oats, oil palm, okra, onion, orange, an ornamental plant or flower or tree, Papaya, palm, parsley, parsnip, pea, peach, peanut, pear, peat, pepper, persimmon, pigeon pea, pine, pineapple, plantain, plum, pomegranate, potato, pumpkin, radicchio, radish, rapeseed, raspberry, rice, rye, sorghum, safflower, sallow, soybean, spinach, spruce, squash, strawberry, sugar beet, sugarcane, sunflower, sweet potato, sweet corn, tangerine, tea, tobacco, tomato, trees, triticale, turf grasses, turnips, vine, walnut, watercress, watermelon, wheat, yams, yew, and zucchini. The term plant also encompasses Algae, which are mainly photoautotrophs unified primarily by their lack of roots, leaves and other organs that characterize higher plants.

[0430] The methods for modulating gene expression using the system as described herein can be used to confer desired traits on essentially any plant. A wide variety of plants and plant cell systems may be engineered for the desired physiological and agronomic characteristics described herein using the nucleic acid constructs of the present disclosure and the various transformation methods mentioned above. In preferred embodiments, target plants and plant cells for engineering include, but are not limited to, those monocotyledonous and dicotyledonous plants, such as crops including grain crops (e.g., wheat, maize, rice, millet, barley), fruit crops (e.g., tomato, apple, pear, strawberry, orange), forage crops (e.g., alfalfa), root vegetable crops (e.g., carrot, potato, sugar beets, yam), leafy vegetable crops (e.g., lettuce, spinach); flowering plants (e.g., Petunia, rose, Chrysanthemum), conifers and pine trees (e.g., pine fir, spruce); plants used in phytoremediation (e.g., heavy metal accumulating plants); oil crops (e.g., sunflower, rape seed) and plants used for experimental purposes (e.g., Arabidopsis). Thus, the methods and CRISPR-Cas systems can be used over a broad range of plants, such as for example with dicotyledonous plants belonging to the orders Magniolales, Illiciales, Laurales, Piperales, Aristochiales, Nymphaeales, Ranunculales, Papeverales, Sarraceniaceae, Trochodendrales, Hamamelidales, Eucomiales, Leitneriales, Myricales, Fagales, Casuarinales, Caryophyllales, Batales, Polygonales, Plumbaginales, Dilleniales, Theales, Malvales, Urticales, Lecythidales, Violales, Salicales, Capparales, Ericales, Diapensales, Ebenales, Primulales, Rosales, Fabales, Podostemales, Haloragales, Myrtales, Cornales, Proteales, San tales, Rafflesiales, Celastrales, Euphorbiales, Rhamnales, Sapindales, Juglandales, Geraniales, Polygalales, Umbellales, Gentianales, Polemoniales, Lamiales, Plantaginales, Scrophulariales, Campanulales, Rubiales, Dipsacales, and Asterales; the methods and CRISPR-Cas systems can be used with monocotyledonous plants such as those belonging to the orders Alismatales, Hydrocharitales, Najadales, Triuridales, Commelinales, Eriocaulales, Restionales, Poales, Juncales, Cyperales, Typhales, Bromeliales, Zingiberales, Arecales, Cyclanthales, Pandanales, Arales, Lilliales, and Orchid ales, or with plants belonging to Gymnospermae, e.g those belonging to the orders Pinales, Ginkgoales, Cycadales, Araucariales, Cupressales and Gnetales.

[0431] The systems and methods of use described herein can be used over a broad range of plant species, included in the non-limitative list of dicot, monocot or gymnosperm genera hereunder: Atropa, Alseodaphne, Anacardium, Arachis, Beilschmiedia, Brassica, Carthamus, Cocculus, Croton, Cucumis, Citrus, Citrullus, Capsicum, Catharanthus, Cocos, Coffea, Cucurbita, Daucus, Duguetia, Eschscholzia, Ficus, Fragaria, Glaucium, Glycine, Gossypium, Helianthus, Hevea, Hyoscyamus, Lactuca, Landolphia, Linum, Litsea, Lycopersicon, Lupinus, Manihot, Majorana, Malta, Medicago, Nicotiana, Olea, Parthenium, Papaver, Persea, Phaseolus, Pistacia, Pisum, Pyrus, Prunus, Raphanus, Ricinus, Senecio, Sinomenium, Stephania, Sinapis, Solanum, Theobroma, Trifolium, Trigonella, Vicia, Vinca, Vilis, and Vigna; and the genera Allium, Andropogon, Aragrostis, Asparagus, Avena, Cynodon, Elaeis, Festuca, Festulolium, Heterocallis, Hordeum, Lemna, Lolium, Musa, Oryza, Panicum, Pannesetum, Phleum, Poa, Secale, Sorghum, Triticum, Zea, Abies, Cunninghamia, Ephedra, Picea, Pinus, and Pseudotsuga.

[0432] The systems and methods of use can also be used over a broad range of “algae” or “algae cells”; including for example algea selected from several eukaryotic phyla, including the Rhodophyta (red algae), Chlorophyta (green algae), Phaeophyta (brown algae), Bacillariophyta (diatoms), Eustigmatophyta and dinoflagellates as well as the prokaryotic phylum Cyanobacteria (blue-green algae). The term “algae” includes for example algae selected from: Amphora, Anabaena, Anikstrodesmis, Botryococcus, Chaetoceros, Chlamydomonas, Chlorella, Chlorococcum, Cyclotella, Cylindrotheca, Dunaliella, Emiliana, Euglena, Hematococcus, Isochrysis, Monochrysis, Monoraphidium, Nannochloris, Nannnochloropsis, Navicula, Nephrochloris, Nephroselmis, Nitzschia, Nodularia, Nostoc, Oochromonas, Oocystis, Oscillartoria, Pavlova, Phaeodactylum, Playtmonas, Pleurochrysis, Porhyra, Pseudoanabaena, Pyramimonas, Stichococcus, Synechococcus, Synechocystis, Tetraselmis, Thalassiosira, and Trichodesmium.

[0433] A part of a plant, e.g., a “plant tissue” may be treated according to the methods of the present invention to produce an improved plant. Plant tissue also encompasses plant cells. The term “plant cell” as used herein refers to individual units of a living plant, either in an intact whole plant or in an isolated form grown in in vitro tissue cultures, on media or agar, in suspension in a growth media or buffer or as a part of higher organized unites, such as, for example, plant tissue, a plant organ, or a whole plant.

[0434] A “protoplast” refers to a plant cell that has had its protective cell wall completely or partially removed using, for example, mechanical or enzymatic means resulting in an intact biochemical competent unit of living plant that can reform their cell wall, proliferate and regenerate grow into a whole plant under proper growing conditions.

[0435] The term “transformation” broadly refers to the process by which a plant host is genetically modified by the introduction of DNA by means of Agrobacteria or one of a variety of chemical or physical methods. As used herein, the term “plant host” refers to plants, including any cells, tissues, organs, or progeny of the plants. Many suitable plant tissues or plant cells can be transformed and include, but are not limited to, protoplasts, somatic embryos, pollen, leaves, seedlings, stems, calli, stolons, microtubers, and shoots. A plant tissue also refers to any clone of such a plant, seed, progeny, propagule whether generated sexually or asexually, and descendants of any of these, such as cuttings or seed.

[0436] The term “transformed” as used herein, refers to a cell, tissue, organ, or organism into which a foreign DNA molecule, such as a construct, has been introduced. The introduced DNA molecule may be integrated into the genomic DNA of the recipient cell, tissue, organ, or organism such that the introduced DNA molecule is transmitted to the subsequent progeny. In these embodiments, the “transformed” or “transgenic” cell or plant may also include progeny of the cell or plant and progeny produced from a breeding program employing such a transformed plant as a parent in a cross and exhibiting an altered phenotype resulting from the presence of the introduced DNA molecule. Preferably, the transgenic plant is fertile and capable of transmitting the introduced DNA to progeny through sexual reproduction.

[0437] The term “progeny”, such as the progeny of a transgenic plant, is one that is born of, begotten by, or derived from a plant or the transgenic plant. The introduced DNA molecule may also be transiently introduced into the recipient cell such that the introduced DNA molecule is not inherited by subsequent progeny and thus not considered “transgenic”. Accordingly, as used herein, a “non-transgenic” plant or plant cell is a plant which does not contain a foreign DNA stably integrated into its genome.

[0438] The term “plant promoter” as used herein is a promoter capable of initiating transcription in plant cells, whether or not its origin is a plant cell. Exemplary suitable plant promoters include, but are not limited to, those that are obtained from plants, plant viruses, and bacteria such as Agrobacterium or Rhizobium which comprise genes expressed in plant cells.

[0439] As used herein, a “fungal cell” refers to any type of eukaryotic cell within the kingdom of fungi. Phyla within the kingdom of fungi include Ascomycota, Basidiomycota, Blastocladiomycota, Chytridiomycota, Glomeromycota, Microsporidia, and Neocallimastigomycota. Fungal cells may include yeasts, molds, and filamentous fungi. In some embodiments, the fungal cell is a yeast cell.

[0440] As used herein, the term “yeast cell” refers to any fungal cell within the phyla Ascomycota and Basidiomycota. Yeast cells may include budding yeast cells, fission yeast cells, and mold cells. Without being limited to these organisms, many types of yeast used in laboratory and industrial settings are part of the phylum Ascomycota. In some embodiments, the yeast cell is an S. cerevisiae, Kluyveromyces marxianus, or Issatchenkia orientalis cell. Other yeast cells may include without limitation Candida spp. (e.g., Candida albicans), Yarrowia spp. (e.g., Yarrowia hpolytica), Pichia spp. (e.g., Pichia pastoris), Kluyveromyces spp. (e.g., Kluyveromyces lactis and Kluyveromyces marxianus), Neurospora spp. (e.g., Neurospora crassa), Fusarium spp. (e.g., Fusarium oxysporum), and Issatchenkia spp. (e.g., Issatchenkia orientalis, a.k.a. Pichia kudriavzevii and Candida acidothermophilum). In some embodiments, the fungal cell is a filamentous fungal cell. As used herein, the term “filamentous fungal cell” refers to any type of fungal cell that grows in filaments, i.e., hyphae or mycelia. Examples of filamentous fungal cells may include without limitation Aspergillus spp. (e.g., Aspergillus niger), Trichoderma spp. (e.g., Trichoderma reesei), Rhizopus spp. (e.g., Rhizopus oryzae), and Mortierella spp. (e.g., Mortierella isabellina).

[0441] In some embodiments, the fungal cell is an industrial strain. As used herein, “industrial strain” refers to any strain of fungal cell used in or isolated from an industrial process, e.g., production of a product on a commercial or industrial scale. Industrial strain may refer to a fungal species that is typically used in an industrial process, or it may refer to an isolate of a fungal species that may be also used for non-industrial purposes (e.g., laboratory research). Examples of industrial processes may include fermentation (e.g., in production of food or beverage products), distillation, biofuel production, production of a compound, and production of a polypeptide. Examples of industrial strains may include, without limitation, JAY270 and ATCC4124.

[0442] In some embodiments, the fungal cell is a polyploid cell. As used herein, a “polyploid” cell may refer to any cell whose genome is present in more than one copy. A polyploid cell may refer to a type of cell that is naturally found in a polyploid state, or it may refer to a cell that has been induced to exist in a polyploid state (e.g., through specific regulation, alteration, inactivation, activation, or modification of meiosis, cytokinesis, or DNA replication). A polyploid cell may refer to a cell whose entire genome is polyploid, or it may refer to a cell that is polyploid in a particular genomic locus of interest. Without wishing to be bound to theory, it is thought that the abundance of guide RNA may more often be a rate-limiting component in genome engineering of polyploid cells than in haploid cells, and thus the methods using the CRISPR-Cas CRISPR system described herein may take advantage of using a certain fungal cell type.

[0443] In some embodiments, the fungal cell is a diploid cell. As used herein, a “diploid” cell may refer to any cell whose genome is present in two copies. A diploid cell may refer to a type of cell that is naturally found in a diploid state, or it may refer to a cell that has been induced to exist in a diploid state (e.g., through specific regulation, alteration, inactivation, activation, or modification of meiosis, cytokinesis, or DNA replication). For example, the S. cerevisiae strain S228C may be maintained in a haploid or diploid state. A diploid cell may refer to a cell whose entire genome is diploid, or it may refer to a cell that is diploid in a particular genomic locus of interest. In some embodiments, the fungal cell is a haploid cell. As used herein, a “haploid” cell may refer to any cell whose genome is present in one copy. A haploid cell may refer to a type of cell that is naturally found in a haploid state, or it may refer to a cell that has been induced to exist in a haploid state (e.g., through specific regulation, alteration, inactivation, activation, or modification of meiosis, cytokinesis, or DNA replication). For example, the S. cerevisiae strain S228C may be maintained in a haploid or diploid state. A haploid cell may refer to a cell whose entire genome is haploid, or it may refer to a cell that is haploid in a particular genomic locus of interest.

[0444] As used herein, a “yeast expression vector” refers to a nucleic acid that contains one or more sequences encoding an RNA and/or polypeptide and may further contain any desired elements that control the expression of the nucleic acid(s), as well as any elements that enable the replication and maintenance of the expression vector inside the yeast cell. Many suitable yeast expression vectors and features thereof are known in the art; for example, various vectors and techniques are illustrated in in Yeast Protocols, 2nd edition, Xiao, W., ed. (Humana Press, New York, 2007) and Buckholz, R. G. and Gleeson, M. A. (1991) Biotechnology (NY) 9(11): 1067-72. Yeast vectors may contain, without limitation, a centromeric (CEN) sequence, an autonomous replication sequence (ARS), a promoter, such as an RNA Polymerase III promoter, operably linked to a sequence or gene of interest, a terminator such as an RNA polymerase III terminator, an origin of replication, and a marker gene (e.g., auxotrophic, antibiotic, or other selectable markers). Examples of expression vectors for use in yeast may include plasmids, yeast artificial chromosomes, 2μ plasmids, yeast integrative plasmids, yeast replicative plasmids, shuttle vectors, and episomal plasmids.

### Stable Integration of Systems in the Genome of Plants and Plant Cells

[0445] In particular embodiments, it is envisaged that the polynucleotides encoding the components of the CRISPR system are introduced for stable integration into the genome of a plant cell. In these embodiments, the design of the transformation vector or the expression system can be adjusted depending on when, where and under what conditions the guide RNA and/or the gene(s) are expressed.

[0446] In particular embodiments, it is envisaged to introduce the components of the CRISPR system stably into the genomic DNA of a plant cell. Additionally or alternatively, it is envisaged to introduce the components of the CRISPR system for stable integration into the DNA of a plant organelle such as, but not limited to a plastid, e mitochondrion or a chloroplast.

[0447] The expression system for stable integration into the genome of a plant cell may contain one or more of the following elements: a promoter element that can be used to express the guide RNA and/or Cas protein in a plant cell; a 5′ untranslated region to enhance expression; an intron element to further enhance expression in certain cells, such as monocot cells; a multiple-cloning site to provide convenient restriction sites for inserting the one or more guide RNAs and/or the gene sequences and other desired elements; and a 3′ untranslated region to provide for efficient termination of the expressed transcript.

[0448] The elements of the expression system may be on one or more expression constructs which are either circular such as a plasmid or transformation vector, or non-circular such as linear double stranded DNA.

[0449] In a particular embodiment, a CRISPR expression system comprises at least:
[0450] (a) a nucleotide sequence encoding a guide RNA (gRNA) that hybridizes with a target sequence in a plant, and wherein the guide RNA comprises a guide sequence and a direct repeat sequence, and
[0451] (b) a nucleotide sequence encoding a Cas protein,
   wherein components (a) or (b) are located on the same or on different constructs, and whereby the different nucleotide sequences can be under control of the same or a different regulatory element operable in a plant cell.

[0452] DNA construct(s) containing the components of the CRISPR system, may be introduced into the genome of a plant, plant part, or plant cell by a variety of conventional techniques. The process generally comprises the steps of selecting a suitable host cell or host tissue, introducing the construct(s) into the host cell or host tissue, and regenerating plant cells or plants therefrom.

[0453] In particular embodiments, the DNA construct may be introduced into the plant cell using techniques such as but not limited to electroporation, microinjection, aerosol beam injection of plant cell protoplasts, or the DNA constructs can be introduced directly to plant tissue using biolistic methods, such as DNA particle bombardment (see also Fu et al., Transgenic Res. 2000 February; 9(1):11-9). The basis of particle bombardment is the acceleration of particles coated with gene/s of interest toward cells, resulting in the penetration of the protoplasm by the particles and typically stable integration into the genome. (see e.g. Klein et al, Nature (1987), Klein et al, Bio/Technology (1992), Casas et al, Proc. Natl. Acad. Sci. USA (1993).).

[0454] In particular embodiments, the DNA constructs containing components of the CRISPR system may be introduced into the plant by Agrobacterium-mediated transformation. The DNA constructs may be combined with suitable T-DNA flanking regions and introduced into a conventional Agrobacterium tumefaciens host vector. The foreign DNA can be incorporated into the genome of plants by infecting the plants or by incubating plant protoplasts with Agrobacterium bacteria, containing one or more Ti (tumor-inducing) plasmids. (see e.g. Fraley et al., (1985), Rogers et al., (1987) and U.S. Pat. No. 5,563,055).

### Plant Promoters

[0455] In order to ensure appropriate expression in a plant cell, the components of the CRISPR-Cas CRISPR system described herein are typically placed under control of a plant promoter, i.e. a promoter operable in plant cells. The use of different types of promoters is envisaged.

[0456] A constitutive plant promoter is a promoter that is able to express the open reading frame (ORF) that it controls in all or nearly all of the plant tissues during all or nearly all developmental stages of the plant (referred to as “constitutive expression”). One non-limiting example of a constitutive promoter is the cauliflower mosaic virus 35S promoter. The present invention envisages methods for modifying RNA sequences and as such also envisages regulating expression of plant biomolecules. In particular embodiments of the present invention it is thus advantageous to place one or more elements of the CRISPR system under the control of a promoter that can be regulated. “Regulated promoter” refers to promoters that direct gene expression not constitutively, but in a temporally- and/or spatially-regulated manner, and includes tissue-specific, tissue-preferred and inducible promoters. Different promoters may direct the expression of a gene in different tissues or cell types, or at different stages of development, or in response to different environmental conditions. In particular embodiments, one or more of the CRISPR components are expressed under the control of a constitutive promoter, such as the cauliflower mosaic virus 35S promoter issue-preferred promoters can be utilized to target enhanced expression in certain cell types within a particular plant tissue, for instance vascular cells in leaves or roots or in specific cells of the seed. Examples of particular promoters for use in the CRISPR system-are found in Kawamata et al., (1997) Plant Cell Physiol 38:792-803; Yamamoto et al., (1997) Plant J 12:255-65; Hire et al, (1992) Plant Mol Biol 20:207-18, Kuster et al, (1995) Plant Mol Biol 29:759-72, and Capana et al., (1994) Plant Mol Biol 25:681-91.

[0457] Examples of promoters that are inducible and that allow for spatiotemporal control of gene editing or gene expression may use a form of energy. The form of energy may include but is not limited to sound energy, electromagnetic radiation, chemical energy and/or thermal energy. Examples of inducible systems include tetracycline inducible promoters (Tet-On or Tet-Off), small molecule two-hybrid transcription activations systems (FKBP, ABA, etc), or light inducible systems (Phytochrome, LOV domains, or cryptochrome)., such as a Light Inducible Transcriptional Effector (LITE) that direct changes in transcriptional activity in a sequence-specific manner. The components of a light inducible system may include a CRISPR-Cas, a light-responsive cytochrome heterodimer (e.g. from Arabidopsis thaliana), and a transcriptional activation/repression domain. Further examples of inducible DNA binding proteins and methods for their use are provided in U.S. 61/736,465 and U.S. 61/721,283, which is hereby incorporated by reference in its entirety.

[0458] In particular embodiments, transient or inducible expression can be achieved by using, for example, chemical-regulated promotors, i.e. whereby the application of an exogenous chemical induces gene expression. Modulating of gene expression can also be obtained by a chemical-repressible promoter, where application of the chemical represses gene expression. Chemical-inducible promoters include, but are not limited to, the maize ln2-2 promoter, activated by benzene sulfonamide herbicide safeners (De Veylder et al., (1997) Plant Cell Physiol 38:568-77), the maize GST promoter (GST-11-27, WO93/01294), activated by hydrophobic electrophilic compounds used as pre-emergent herbicides, and the tobacco PR-1 a promoter (Ono et al., (2004) Biosci Biotechnol Biochem 68:803-7) activated by salicylic acid. Promoters which are regulated by antibiotics, such as tetracycline-inducible and tetracycline-repressible promoters (Gatz et al., (1991) Mol Gen Genet 227:229-37; U.S. Pat. Nos. 5,814,618 and 5,789,156) can also be used herein.

Translocation to and/or Expression in Specific Plant Organelles

[0459] The expression system may comprise elements for translocation to and/or expression in a specific plant organelle.

### Chloroplast Targeting

[0460] In particular embodiments, it is envisaged that the CRISPR system is used to specifically modify expression and/or translation of chloroplast genes or to ensure expression in the chloroplast. For this purpose use is made of chloroplast transformation methods or compartmentalization of the CRISPR components to the chloroplast. For instance, the introduction of genetic modifications in the plastid genome can reduce biosafety issues such as gene flow through pollen.

[0461] Methods of chloroplast transformation are known in the art and include Particle bombardment, PEG treatment, and microinjection. Additionally, methods involving the translocation of transformation cassettes from the nuclear genome to the plastid can be used as described in WO2010061186.

[0462] Alternatively, it is envisaged to target one or more of the CRISPR components to the plant chloroplast. This is achieved by incorporating in the expression construct a sequence encoding a chloroplast transit peptide (CTP) or plastid transit peptide, operably linked to the 5′ region of the sequence encoding the protein. The CTP is removed in a processing step during translocation into the chloroplast. Chloroplast targeting of expressed proteins is well known to the skilled artisan (see for instance Protein Transport into Chloroplasts, 2010, Annual Review of Plant Biology, Vol. 61: 157-180). In such embodiments it is also desired to target the one or more guide RNAs to the plant chloroplast. Methods and constructs which can be used for translocating guide RNA into the chloroplast by means of a chloroplast localization sequence are described, for instance, in US 20040142476, incorporated herein by reference. Such variations of constructs can be incorporated into the expression systems of the invention to efficiently translocate the RNA targeting-guide RNA(s).

### Introduction of Polynucleotides Encoding the Systems in Algal Cells.

[0463] Transgenic algae (or other plants such as rape) may be particularly useful in the production of vegetable oils or biofuels such as alcohols (especially methanol and ethanol) or other products. These may be engineered to express or overexpress high levels of oil or alcohols for use in the oil or biofuel industries.

[0464] U.S. Pat. No. 8,945,839 describes a method for engineering Micro-Algae (Chlamydomonas reinhardtii cells) species) using Cas. Using similar tools, the methods of the CRISPR system described herein can be applied on Chlamydomonas species and other algae. In particular embodiments, protein and guide RNA(s) are introduced in algae expressed using a vector that expresses protein under the control of a constitutive promoter such as Hsp70A-Rbc S2 or Beta2-tubulin. Guide RNA is optionally delivered using a vector containing T7 promoter. Alternatively, mRNA and in vitro transcribed guide RNA can be delivered to algal cells. Electroporation protocols are available to the skilled person such as the standard recommended protocol from the GeneArt Chlamydomonas Engineering kit.

### Introduction of Polynucleotides Encoding the Systems in Yeast Cells

[0465] In particular embodiments, the invention relates to the use of the CRISPR system for RNA editing in yeast cells. Methods for transforming yeast cells which can be used to introduce polynucleotides encoding the CRISPR system components are well known to the artisan and are reviewed by Kawai et al., 2010, Bioeng Bugs. 2010 November-December; 1(6): 395-403). Non-limiting examples include transformation of yeast cells by lithium acetate treatment (which may further include carrier DNA and PEG treatment), bombardment or by electroporation.

### Transient Expression of Systems in Plants and Plant Cell

[0466] In particular embodiments, it is envisaged that the guide RNA and/or gene are transiently expressed in the plant cell. In these embodiments, the CRISPR system can ensure modification of RNA target molecules only when both the guide RNA and the Cas protein is present in a cell, such that gene expression can further be controlled. As the expression of the Cas protein is transient, plants regenerated from such plant cells typically contain no foreign DNA. In particular embodiments the Cas protein is stably expressed by the plant cell and the guide sequence is transiently expressed.

[0467] In particularly preferred embodiments, the CRISPR system components can be introduced in the plant cells using a plant viral vector (Scholthof et al. 1996, Annu Rev Phytopathol. 1996; 34:299-323). In further particular embodiments, said viral vector is a vector from a DNA virus. For example, geminivirus (e.g., cabbage leaf curl virus, bean yellow dwarf virus, wheat dwarf virus, tomato leaf curl virus, maize streak virus, tobacco leaf curl virus, or tomato golden mosaic virus) or nanovirus (e.g., Faba bean necrotic yellow virus). In other particular embodiments, said viral vector is a vector from an RNA virus. For example, tobravirus (e.g., tobacco rattle virus, tobacco mosaic virus), potexvirus (e.g., potato virus X), or hordeivirus (e.g., barley stripe mosaic virus). The replicating genomes of plant viruses are non-integrative vectors, which is of interest in the context of avoiding the production of GMO plants.

[0468] In particular embodiments, the vector used for transient expression of CRISPR constructs is for instance a pEAQ vector, which is tailored for Agrobacterium-mediated transient expression (Sainsbury F. et al., Plant Biotechnol J. 2009 September; 7(7):682-93) in the protoplast. Precise targeting of genomic locations was demonstrated using a modified Cabbage Leaf Curl virus (CaLCuV) vector to express gRNAs in stable transgenic plants expressing a Cas (see Scientific Reports 5, Article number: 14926 (2015), doi:10.1038/srep14926).

[0469] In particular embodiments, double-stranded DNA fragments encoding the guide RNA or crRNA and/or the Cas gene can be transiently introduced into the plant cell. In such embodiments, the introduced double-stranded DNA fragments are provided in sufficient quantity to modify RNA molecule(s) in the cell but do not persist after a contemplated period of time has passed or after one or more cell divisions. Methods for direct DNA transfer in plants are known by the skilled artisan (see for instance Davey et al. Plant Mol Biol. 1989 September; 13(3):273-85.)

[0470] In other embodiments, an RNA polynucleotide encoding the Cas protein is introduced into the plant cell, which is then translated and processed by the host cell generating the protein in sufficient quantity to modify the RNA molecule(s) cell (in the presence of at least one guide RNA) but which does not persist after a contemplated period of time has passed or after one or more cell divisions. Methods for introducing mRNA to plant protoplasts for transient expression are known by the skilled artisan (see for instance in Gallie, Plant Cell Reports (1993), 13; 119-122). Combinations of the different methods described above are also envisaged.

### Delivery of Crispr Components to the Plant Cell

[0471] In particular embodiments, it is of interest to deliver one or more components of the CRISPR system directly to the plant cell. This is of interest, inter alia, for the generation of non-transgenic plants. In particular embodiments, one or more of the components is prepared outside the plant or plant cell and delivered to the cell. For instance in particular embodiments, the Cas protein is prepared in vitro prior to introduction to the plant cell. Cas protein can be prepared by various methods known by one of skill in the art and include recombinant production. After expression, the Cas protein is isolated, refolded if needed, purified and optionally treated to remove any purification tags, such as a His-tag. Once crude, partially purified, or more completely purified Cas protein is obtained, the protein may be introduced to the plant cell.

[0472] In particular embodiments, the Cas protein is mixed with guide RNA targeting the nucleic acid of interest to form a pre-assembled ribonucleoprotein.

[0473] The individual components or pre-assembled ribonucleoprotein can be introduced into the plant cell via electroporation, by bombardment with nucleic acid targeting-associated gene product coated particles, by chemical transfection or by some other means of transport across a cell membrane. For instance, transfection of a plant protoplast with a pre-assembled CRISPR ribonucleoprotein has been demonstrated to ensure targeted modification of the plant genome (as described by Woo et al. Nature Biotechnology, 2015; DOI: 10.1038/nbt.3389). These methods can be modified to achieve targeted modification of RNA molecules in the plants.

[0474] In particular embodiments, the CRISPR system components are introduced into the plant cells using nanoparticles. The components, either as protein or nucleic acid or in a combination thereof, can be uploaded onto or packaged in nanoparticles and applied to the plants (such as for instance described in WO 2008042156 and US 20130185823). In particular, embodiments of the invention comprise nanoparticles uploaded with or packed with DNA molecule(s) encoding the Cas protein, DNA molecules encoding the guide RNA and/or isolated guide RNA as described in WO2015089419.

[0475] Further means of introducing one or more components of the CRISPR system to the plant cell is by using cell penetrating peptides (CPP). Accordingly, in particular, embodiments the invention comprises compositions comprising a cell penetrating peptide linked to an Cas protein. In particular embodiments of the present invention, an RNA targeting protein and/or guide RNA(s) is coupled to one or more CPPs to effectively transport them inside plant protoplasts (Ramakrishna (2014, Genome Res. 2014 June; 24(6):1020-7 for Cas9 in human cells). In other embodiments, the Cas gene and/or guide RNA(s) are encoded by one or more circular or non-circular DNA molecule(s) which are coupled to one or more CPPs for plant protoplast delivery. The plant protoplasts are then regenerated to plant cells and further to plants. CPPs are generally described as short peptides of fewer than 35 amino acids either derived from proteins or from chimeric sequences which are capable of transporting biomolecules across cell membrane in a receptor independent manner. CPP can be cationic peptides, peptides having hydrophobic sequences, amphipatic peptides, peptides having proline-rich and anti-microbial sequence, and chimeric or bipartite peptides (Pooga and Langel 2005). CPPs are able to penetrate biological membranes and as such trigger the movement of various biomolecules across cell membranes into the cytoplasm and to improve their intracellular routing, and hence facilitate interaction of the biolomolecule with the target. Examples of CPP include amongst others: Tat, a nuclear transcriptional activator protein required for viral replication by HIV type 1, penetratin, Kaposi fibroblast growth factor (FGF) signal peptide sequence, integrin (33 signal peptide sequence; polyarginine peptide Args sequence, Guanine rich-molecular transporters, sweet arrow peptide, etc.

### Further Applications in Plants and Yeasts

### Biofuel Production

[0476] The term “biofuel” as used herein is an alternative fuel made from plant and plant-derived resources. Renewable biofuels can be extracted from organic matter whose energy has been obtained through a process of carbon fixation or are made through the use or conversion of biomass. This biomass can be used directly for biofuels or can be converted to convenient energy containing substances by thermal conversion, chemical conversion, and biochemical conversion. This biomass conversion can result in fuel in solid, liquid, or gas form. There are two types of biofuels: bioethanol and biodiesel. Bioethanol is mainly produced by the sugar fermentation process of cellulose (starch), which is mostly derived from maize and sugar cane. Biodiesel on the other hand is mainly produced from oil crops such as rapeseed, palm, and soybean. Biofuels are used mainly for transportation.

### Enhancing Plant Properties for Biofuel Production

[0477] In particular embodiments, the methods using the CRISPR system as described herein are used to alter the properties of the cell wall in order to facilitate access by key hydrolysing agents for a more efficient release of sugars for fermentation. In particular embodiments, the biosynthesis of cellulose and/or lignin are modified. Cellulose is the major component of the cell wall. The biosynthesis of cellulose and lignin are co-regulated. By reducing the proportion of lignin in a plant the proportion of cellulose can be increased. In particular embodiments, the methods described herein are used to downregulate lignin biosynthesis in the plant so as to increase fermentable carbohydrates. More particularly, the methods described herein are used to downregulate at least a first lignin biosynthesis gene selected from the group consisting of 4-coumarate 3-hydroxylase (C3H), phenylalanine ammonia-lyase (PAL), cinnamate 4-hydroxylase (C4H), hydroxycinnamoyl transferase (HCT), caffeic acid O-methyltransferase (COMT), caffeoyl CoA 3-O-methyltransferase (CCoAOMT), ferulate 5-hydroxylase (F5H), cinnamyl alcohol dehydrogenase (CAD), cinnamoyl CoA-reductase (CCR), 4-coumarate-CoA ligase (4CL), monolignol-lignin-specific glycosyltransferase, and aldehyde dehydrogenase (ALDH) as disclosed in WO 2008064289 A2.

[0478] In particular embodiments, the methods described herein are used to produce plant mass that produces lower levels of acetic acid during fermentation (see also WO 2010096488).

### Modifying Yeast for Biofuel Production

[0479] In particular embodiments, the Cas protein provided herein is used for bioethanol production by recombinant micro-organisms. For instance, Cas proteins can be used to engineer micro-organisms, such as yeast, to generate biofuel or biopolymers from fermentable sugars and optionally to be able to degrade plant-derived lignocellulose derived from agricultural waste as a source of fermentable sugars. More particularly, the invention provides methods whereby the CRISPR complex is used to modify the expression of endogenous genes required for biofuel production and/or to modify endogenous genes why may interfere with the biofuel synthesis. More particularly the methods involve stimulating the expression in a micro-organism such as a yeast of one or more nucleotide sequence encoding enzymes involved in the conversion of pyruvate to ethanol or another product of interest. In particular embodiments the methods ensure the stimulation of expression of one or more enzymes which allows the micro-organism to degrade cellulose, such as a cellulase. In yet further embodiments, the CRISPR complex is used to suppress endogenous metabolic pathways which compete with the biofuel production pathway.

### Modifying Algae and Plants for Production of Vegetable Oils or Biofuels

[0480] Transgenic algae or other plants such as rape may be particularly useful in the production of vegetable oils or biofuels such as alcohols (especially methanol and ethanol), for instance. These may be engineered to express or overexpress high levels of oil or alcohols for use in the oil or biofuel industries.

[0481] U.S. Pat. No. 8,945,839 describes a method for engineering Micro-Algae (Chlamydomonas reinhardtii cells) species) using Cas. Using similar tools, the methods of the CRISPR system described herein can be applied on Chlamydomonas species and other algae. In particular embodiments, the Cas protein and guide RNA are introduced in algae expressed using a vector that expresses the Cas protein under the control of a constitutive promoter such as Hsp70A-Rbc S2 or Beta2-tubulin. Guide RNA will be delivered using a vector containing T7 promoter. Alternatively, in vitro transcribed guide RNA can be delivered to algae cells. Electroporation protocol follows standard recommended protocol from the GeneArt Chlamydomonas Engineering kit.

### Particular Applications of the Cas Proteins in Plants

[0482] In particular embodiments, present invention can be used as a therapy for virus removal in plant systems as it is able to cleave viral RNA. Previous studies in human systems have demonstrated the success of utilizing CRISPR in targeting the single strand RNA virus, hepatitis C (A. Price, et al., Proc. Natl. Acad. Sci, 2015). These methods may also be adapted for using the CRISPR system in plants.

### Improved Plants

[0483] The present invention also provides plants and yeast cells obtainable and obtained by the methods provided herein. The improved plants obtained by the methods described herein may be useful in food or feed production through the modified expression of genes which, for instance ensure tolerance to plant pests, herbicides, drought, low or high temperatures, excessive water, etc.

[0484] The improved plants obtained by the methods described herein, especially crops and algae may be useful in food or feed production through expression of, for instance, higher protein, carbohydrate, nutrient or vitamin levels than would normally be seen in the wildtype. In this regard, improved plants, especially pulses and tubers are preferred.

[0485] Improved algae or other plants such as rape may be particularly useful in the production of vegetable oils or biofuels such as alcohols (especially methanol and ethanol), for instance. These may be engineered to express or overexpress high levels of oil or alcohols for use in the oil or biofuel industries.

[0486] The invention also provides for improved parts of a plant. Plant parts include, but are not limited to, leaves, stems, roots, tubers, seeds, endosperm, ovule, and pollen. Plant parts as envisaged herein may be viable, nonviable, regeneratable, and/or non-regeneratable.

[0487] It is also encompassed herein to provide plant cells and plants generated according to the methods of the invention. Gametes, seeds, embryos, either zygotic or somatic, progeny or hybrids of plants comprising the genetic modification, which are produced by traditional breeding methods, are also included within the scope of the present invention. Such plants may contain a heterologous or foreign DNA sequence inserted at or instead of a target sequence. Alternatively, such plants may contain only an alteration (mutation, deletion, insertion, substitution) in one or more nucleotides. As such, such plants will only be different from their progenitor plants by the presence of the particular modification.

[0488] In an embodiment of the invention, a CRISPR-Cas system is used to engineer pathogen resistant plants, for example by creating resistance against diseases caused by bacteria, fungi or viruses. In certain embodiments, pathogen resistance can be accomplished by engineering crops to produce a CRISPR-Cas system that will be ingested by an insect pest, leading to mortality. In an embodiment of the invention, a CRISPR-Cas system is used to engineer abiotic stress tolerance. In another embodiment, a CRISPR-Cas system is used to engineer drought stress tolerance or salt stress tolerance, or cold or heat stress tolerance. Younis et al. 2014, Int. J. Biol. Sci. 10; 1150 reviewed potential targets of plant breeding methods, all of which are amenable to correction or improvement through use of a CRISPR-Cas system described herein. Some non-limiting target crops include Arabidops Zea mays is thaliana, Oryza sativa L, Prunus domestica L., Gossypium hirsutum, Nicotiana rustica, Zea mays, Medicago sativa, Nicotiana benthamiana and Arabidopsis thaliana

[0489] In an embodiment of the invention, a CRISPR-Cas system is used for management of crop pests. For example, a CRISPR-Cas system operable in a crop pest can be expressed from a plant host or transferred directly to the target, for example using a viral vector.

[0490] In an embodiment, the invention provides a method of efficiently producing homozygous organisms from a heterozygous non-human starting organism. In an embodiment, the invention is used in plant breeding. In another embodiment, the invention is used in animal breeding. In such embodiments, a homozygous organism such as a plant or animal is made by preventing or suppressing recombination by interfering with at least one target gene involved in double strand breaks, chromosome pairing and/or strand exchange.

[0491] The invention in some embodiments comprehends a method of modifying an cell or organism. The cell may be a prokaryotic cell or a eukaryotic cell. The cell may be a mammalian cell. The mammalian cell many be a non-human primate, bovine, porcine, rodent or mouse cell. The cell may be a non-mammalian eukaryotic cell such as poultry, fish or shrimp. The cell may also be a plant cell. The plant cell may be of a crop plant such as cassava, corn, sorghum, wheat, or rice. The plant cell may also be of an algae, tree or vegetable. The modification introduced to the cell by the present invention may be such that the cell and progeny of the cell are altered for improved production of biologic products such as an antibody, starch, alcohol or other desired cellular output. The modification introduced to the cell by the present invention may be such that the cell and progeny of the cell include an alteration that changes the biologic product produced. The system may comprise one or more different vectors. In an aspect of the invention, the effector protein is codon optimized for expression the desired cell type, preferentially a eukaryotic cell, preferably a mammalian cell or a human cell. CRISPR-Cas system(s) (e.g., single or multiplexed) can be used in conjunction with recent advances in crop genomics. Such CRISPR system(s) can be used to perform efficient and cost effective plant gene or genome or transcriptome interrogation or editing or manipulation—for instance, for rapid investigation and/or selection and/or interrogations and/or comparison and/or manipulations and/or transformation of plant genes or genomes; e.g., to create, identify, develop, optimize, or confer trait(s) or characteristic(s) to plant(s) or to transform a plant genome. There can accordingly be improved production of plants, new plants with new combinations of traits or characteristics or new plants with enhanced traits. Such CRISPR system(s) can be used with regard to plants in Site-Directed Integration (SDI) or Gene Editing (GE) or any Near Reverse Breeding (NRB) or Reverse Breeding (RB) techniques. Accordingly, reference herein to animal cells may also apply, mutatis mutandis, to plant cells unless otherwise apparent; and, the enzymes herein having reduced off-target effects and systems employing such enzymes can be used in plant applications, including those mentioned herein. Engineered plants modified by the effector protein and suitable guide (crRNA), and progeny thereof, as provided. These may include disease or drought resistant crops, such as wheat, barley, rice, soybean or corn; plants modified to remove or reduce the ability to self-pollinate (but which can instead, optionally, hybridise instead); and allergenic foods such as peanuts and nuts where the immunogenic proteins have been disabled, destroyed or disrupted by targeting via a effector protein and suitable guide. Any aspect of using classical CRISPR-Cas systems may be adapted to use in CRISPR systems that are Cas protein agnostic.

### Models of Conditions

[0492] A method of the invention may be used to create a plant, an animal or cell that may be used to model and/or study genetic or epigenetic conditions of interest, such as a through a model of mutations of interest or a disease model. As used herein, “disease” refers to a disease, disorder, or indication in a subject. For example, a method of the invention may be used to create an animal or cell that comprises a modification in one or more nucleic acid sequences associated with a disease, or a plant, animal or cell in which expression of one or more nucleic acid sequences associated with a disease are altered. Such a nucleic acid sequence may encode or be translated a disease associated protein sequence or may be a disease associated control sequence. Accordingly, it is understood that in embodiments of the invention, a plant, subject, patient, organism or cell can be a non-human subject, patient, organism or cell. Thus, the invention provides a plant, animal or cell, produced by the present methods, or a progeny thereof. The progeny may be a clone of the produced plant or animal, or may result from sexual reproduction by crossing with other individuals of the same species to introgress further desirable traits into their offspring. The cell may be in vivo or ex vivo in the cases of multicellular organisms, particularly animals or plants. In the instance where the cell is in cultured, a cell line may be established if appropriate culturing conditions are met and preferably if the cell is suitably adapted for this purpose (for instance a stem cell). Bacterial cell lines produced by the invention are also envisaged. Hence, cell lines are also envisaged. In some methods, the disease model can be used to study the effects of mutations, or more general altered, such as reduced, expression of genes or gene products on the animal or cell and development and/or progression of the disease using measures commonly used in the study of the disease. Alternatively, such a disease model is useful for studying the effect of a pharmaceutically active compound on the disease. In some methods, the disease model can be used to assess the efficacy of a potential gene therapy strategy. That is, a disease-associated RNA can be modified such that the disease development and/or progression is displayed or inhibited or reduced and then effects of a compound on the progression or inhibition or reduction are tested.

[0493] Useful in the practice of the instant invention utilizing CRISPR-Cas proteins and complexes thereof and nucleic acid molecules encoding same and methods using same, reference is made to: Genome-Scale CRISPR-Cas9 Knockout Screening in Human Cells. Shalem, O., Sanjana, N E., Hartenian, E., Shi, X., Scott, D A., Mikkelson, T., Heckl, D., Ebert, B L., Root, D E., Doench, J G., Zhang, F. Science Dec 12. (2013); Published in final edited form as: Science. 2014 Jan. 3; 343(6166): 84-87. Shalem et al. involves a new way to interrogate gene function on a genome-wide scale. Their studies showed that delivery of a genome-scale CRISPR-Cas9 knockout (GeCKO) library targeted 18,080 genes with 64,751 unique guide sequences enabled both negative and positive selection screening in human cells. First, the authors showed use of the GeCKO library to identify genes essential for cell viability in cancer and pluripotent stem cells. Next, in a melanoma model, the authors screened for genes whose loss is involved in resistance to vemurafenib, a therapeutic that inhibits mutant protein kinase BRAF. Their studies showed that the highest-ranking candidates included previously validated genes NF1 and MED12 as well as novel hits NF2, CUL3, TADA2B, and TADA1. The authors observed a high level of consistency between independent guide RNAs targeting the same gene and a high rate of hit confirmation, and thus demonstrated the promise of genome-scale screening with Cas9. Reference is also made to US patent publication number US20140357530; and PCT Patent Publication WO2014093701, hereby incorporated herein by reference.

[0494] The term “associated with” is used here in relation to the association of the functional domain to the CRISPR-Cas protein or the adaptor protein. It is used in respect of how one molecule ‘associates’ with respect to another, for example between an adaptor protein and a functional domain, or between the CRISPR-Cas protein and a functional domain. In the case of such protein-protein interactions, this association may be viewed in terms of recognition in the way an antibody recognizes an epitope. Alternatively, one protein may be associated with another protein via a fusion of the two, for instance one subunit being fused to another subunit. Fusion typically occurs by addition of the amino acid sequence of one to that of the other, for instance via splicing together of the nucleotide sequences that encode each protein or subunit. Alternatively, this may essentially be viewed as binding between two molecules or direct linkage, such as a fusion protein. In any event, the fusion protein may include a linker between the two subunits of interest (i.e. between the enzyme and the functional domain or between the adaptor protein and the functional domain). Thus, in some embodiments, the CRISPR-Cas protein or adaptor protein is associated with a functional domain by binding thereto. In other embodiments, the CRISPR-Cas protein or adaptor protein is associated with a functional domain because the two are fused together, optionally via an intermediate linker.

### Applications in Non-Human Animals

[0495] In an aspect, the invention provides a non-human eukaryotic organism; preferably a multicellular eukaryotic organism, comprising a eukaryotic host cell according to any of the described embodiments. In other aspects, the invention provides a eukaryotic organism; preferably a multicellular eukaryotic organism, comprising a eukaryotic host cell according to any of the described embodiments. The organism in some embodiments of these aspects may be an animal; for example a mammal. Also, the organism may be an arthropod such as an insect. The present invention may also be extended to other agricultural applications such as, for example, farm and production animals. For example, pigs have many features that make them attractive as biomedical models, especially in regenerative medicine. In particular, pigs with severe combined immunodeficiency (SCID) may provide useful models for regenerative medicine, xenotransplantation (discussed also elsewhere herein), and tumor development and will aid in developing therapies for human SCID patients. Lee et al., (Proc Natl Acad Sci USA. 2014 May 20; 111(20):7260-5) utilized a reporter-guided transcription activator-like effector nuclease (TALEN) system to generated targeted modifications of recombination activating gene (RAG) 2 in somatic cells at high efficiency, including some that affected both alleles.

[0496] The methods of Lee et al., (Proc Natl Acad Sci USA. 2014 May 20; 111(20):7260-5) may be applied to the present invention analogously as follows. Mutated pigs are produced by targeted modification of RAG2 in fetal fibroblast cells followed by SCNT and embryo transfer. Constructs coding for CRISPR Cas and a reporter are electroporated into fetal-derived fibroblast cells. After 48 h, transfected cells expressing the green fluorescent protein are sorted into individual wells of a 96-well plate at an estimated dilution of a single cell per well. Targeted modification of RAG2 are screened by amplifying a genomic DNA fragment flanking any CRISPR Cas cutting sites followed by sequencing the PCR products. After screening and ensuring lack of off-site mutations, cells carrying targeted modification of RAG2 are used for SCNT. The polar body, along with a portion of the adjacent cytoplasm of oocyte, presumably containing the metaphase II plate, are removed, and a donor cell are placed in the perivitelline. The reconstructed embryos are then electrically porated to fuse the donor cell with the oocyte and then chemically activated. The activated embryos are incubated in Porcine Zygote Medium 3 (PZM3) with 0.5 μM Scriptaid (S7817; Sigma-Aldrich) for 14-16 h. Embryos are then washed to remove the Scriptaid and cultured in PZM3 until they were transferred into the oviducts of surrogate pigs.

[0497] The present invention is also applicable to modifying SNPs of other animals, such as cows. Tan et al. (Proc Natl Acad Sci USA. 2013 Oct 8; 110(41): 16526-16531) expanded the livestock gene editing toolbox to include transcription activator-like (TAL) effector nuclease (TALEN)- and clustered regularly interspaced short palindromic repeats (CRISPR)/Cas9-stimulated homology-directed repair (HDR) using plasmid, rAAV, and oligonucleotide templates. Gene specific gRNA sequences were cloned into the Church lab gRNA vector (Addgene ID: 41824) according to their methods (Mali P, et al. (2013) RNA-Guided Human Genome Engineering via Cas9. Science 339(6121):823-826). The Cas9 nuclease was provided either by co-transfection of the hCas9 plasmid (Addgene ID: 41815) or mRNA synthesized from RCIScript-hCas9. This RCIScript-hCas9 was constructed by sub-cloning the XbaI-AgeI fragment from the hCas9 plasmid (encompassing the hCas9 cDNA) into the RCIScript plasmid.

[0498] Heo et al. (Stem Cells Dev. 2015 Feb. 1; 24(3):393-402. doi: 10.1089/scd.2014.0278. Epub 2014 Nov. 3) reported highly efficient gene targeting in the bovine genome using bovine pluripotent cells and clustered regularly interspaced short palindromic repeat (CRISPR)/Cas9 nuclease. First, Heo et al. generate induced pluripotent stem cells (iPSCs) from bovine somatic fibroblasts by the ectopic expression of yamanaka factors and GSK3β and MEK inhibitor (2i) treatment. Heo et al. observed that these bovine iPSCs are highly similar to naïve pluripotent stem cells with regard to gene expression and developmental potential in teratomas. Moreover, CRISPR-Cas nuclease, which was specific for the bovine NANOG locus, showed highly efficient editing of the bovine genome in bovine iPSCs and embryos.

[0499] Igenity® provides a profile analysis of animals, such as cows, to perform and transmit traits of economic traits of economic importance, such as carcass composition, carcass quality, maternal and reproductive traits and average daily gain. The analysis of a comprehensive Igenity® profile begins with the discovery of DNA markers (most often single nucleotide polymorphisms or SNPs). All the markers behind the Igenity® profile were discovered by independent scientists at research institutions, including universities, research organizations, and government entities such as USDA. Markers are then analyzed at Igenity® in validation populations. Igenity® uses multiple resource populations that represent various production environments and biological types, often working with industry partners from the seedstock, cow-calf, feedlot and/or packing segments of the beef industry to collect phenotypes that are not commonly available. Cattle genome databases are widely available, see, e.g., the NAGRP Cattle Genome Coordination Program (www.animalgenome.org/cattle/maps/db.html). Thus, the present invention maybe applied to target bovine SNPs. One of skill in the art may utilize the above protocols for targeting SNPs and apply them to bovine SNPs as described, for example, by Tan et al. or Heo et al.

[0500] Qingjian Zou et al. (Journal of Molecular Cell Biology Advance Access published Oct. 12, 2015) demonstrated increased muscle mass in dogs by targeting targeting the first exon of the dog Myostatin (MSTN) gene (a negative regulator of skeletal muscle mass). First, the efficiency of the sgRNA was validated, using cotransfection of the the sgRNA targeting MSTN with a Cas vector into canine embryonic fibroblasts (CEFs). Thereafter, MSTN KO dogs were generated by micro-injecting embryos with normal morphology with a mixture of Cas mRNA and MSTN sgRNA and auto-transplantation of the zygotes into the oviduct of the same female dog. The knock-out puppies displayed an obvious muscular phenotype on thighs compared with its wild-type littermate sister.

### Livestock—Pigs

[0501] Viral targets in livestock may include, in some embodiments, porcine CD163, for example on porcine macrophages. CD163 is associated with infection (thought to be through viral cell entry) by PRRSv (Porcine Reproductive and Respiratory Syndrome virus, an arterivirus). Infection by PRRSv, especially of porcine alveolar macrophages (found in the lung), results in a previously incurable porcine syndrome (“Mystery swine disease” or “blue ear disease”) that causes suffering, including reproductive failure, weight loss and high mortality rates in domestic pigs. Opportunistic infections, such as enzootic pneumonia, meningitis and ear oedema, are often seen due to immune deficiency through loss of macrophage activity. It also has significant economic and environmental repercussions due to increased antibiotic use and financial loss (an estimated $660 m per year).

[0502] As reported by Kristin M Whitworth and Dr Randall Prather et al. (Nature Biotech 3434 published online 7 Dec. 2015) at the University of Missouri and in collaboration with Genus Plc, CD163 was targeted using CRISPR-Cas and the offspring of edited pigs were resistant when exposed to PRRSv. One founder male and one founder female, both of whom had mutations in exon 7 of CD163, were bred to produce offspring. The founder male possessed an 11-bp deletion in exon 7 on one allele, which results in a frameshift mutation and missense translation at amino acid 45 in domain 5 and a subsequent premature stop codon at amino acid 64. The other allele had a 2-bp addition in exon 7 and a 377-bp deletion in the preceding intron, which were predicted to result in the expression of the first 49 amino acids of domain 5, followed by a premature stop code at amino acid 85. The sow had a 7 bp addition in one allele that when translated was predicted to express the first 48 amino acids of domain 5, followed by a premature stop codon at amino acid 70. The sow's other allele was unamplifiable. Selected offspring were predicted to be a null animal (CD163−/−), i.e. a CD163 knock out.

[0503] Accordingly, in some embodiments, porcine alveolar macrophages may be targeted by the CRISPR protein. In some embodiments, porcine CD163 may be targeted by the CRISPR protein. In some embodiments, porcine CD163 may be knocked out through induction of a DSB or through insertions or deletions, for example targeting deletion or modification of exon 7, including one or more of those described above, or in other regions of the gene, for example deletion or modification of exon 5.

[0504] An edited pig and its progeny are also envisaged, for example a CD163 knock out pig. This may be for livestock, breeding or modelling purposes (i.e. a porcine model). Semen comprising the gene knock out is also provided.

[0505] CD163 is a member of the scavenger receptor cysteine-rich (SRCR) superfamily. Based on in vitro studies SRCR domain 5 of the protein is the domain responsible for unpackaging and release of the viral genome. As such, other members of the SRCR superfamily may also be targeted in order to assess resistance to other viruses. PRRSV is also a member of the mammalian arterivirus group, which also includes murine lactate dehydrogenase-elevating virus, simian hemorrhagic fever virus and equine arteritis virus. The arteriviruses share important pathogenesis properties, including macrophage tropism and the capacity to cause both severe disease and persistent infection. Accordingly, arteriviruses, and in particular murine lactate dehydrogenase-elevating virus, simian hemorrhagic fever virus and equine arteritis virus, may be targeted, for example through porcine CD163 or homologues thereof in other species, and murine, simian and equine models and knockout also provided.

[0506] Indeed, this approach may be extended to viruses or bacteria that cause other livestock diseases that may be transmitted to humans, such as Swine Influenza Virus (SIV) strains which include influenza C and the subtypes of influenza A known as H1N1, H1N2, H2N1, H3N1, H3N2, and H2N3, as well as pneumonia, meningitis and oedema mentioned above.

[0507] The methods for genome editing using the Cas system as described herein can be used to confer desired traits on essentially any plant, algae, fungus, yeast, etc. A wide variety of plants, algae, fungus, yeast, etc and plant algae, fungus, yeast cell or tissue systems may be engineered for the desired physiological and agronomic characteristics described herein using the nucleic acid constructs of the present disclosure and the various transformation methods mentioned above.

[0508] In particular embodiments, the methods described herein are used to modify endogenous genes or to modify their expression without the permanent introduction into the genome of the plant, algae, fungus, yeast, etc of any foreign gene, including those encoding CRISPR components, so as to avoid the presence of foreign DNA in the genome of the plant. This can be of interest as the regulatory requirements for non-transgenic plants are less rigorous.

[0509] The CRISPR systems provided herein can be used to introduce targeted double-strand or single-strand breaks and/or to introduce gene activator and or repressor systems and without being limitative, can be used for gene targeting, gene replacement, targeted mutagenesis, targeted deletions or insertions, targeted inversions and/or targeted translocations. By co-expression of multiple targeting RNAs directed to achieve multiple modifications in a single cell, multiplexed genome modification can be ensured. This technology can be used to high-precision engineering of plants with improved characteristics, including enhanced nutritional quality, increased resistance to diseases and resistance to biotic and abiotic stress, and increased production of commercially valuable plant products or heterologous compounds.

[0510] The methods described herein generally result in the generation of “improved plants, algae, fungi, yeast, etc” in that they have one or more desirable traits compared to the wildtype plant. In particular embodiments, the plants, algae, fungi, yeast, etc., cells or parts obtained are transgenic plants, comprising an exogenous DNA sequence incorporated into the genome of all or part of the cells. In particular embodiments, non-transgenic genetically modified plants, algae, fungi, yeast, etc., parts or cells are obtained, in that no exogenous DNA sequence is incorporated into the genome of any of the cells of the plant. In such embodiments, the improved plants, algae, fungi, yeast, etc. are non-transgenic. Where only the modification of an endogenous gene is ensured and no foreign genes are introduced or maintained in the plant, algae, fungi, yeast, etc. genome, the resulting genetically modified crops contain no foreign genes and can thus basically be considered non-transgenic. The different applications of the CRISPR-Cas system for plant, algae, fungi, yeast, etc. genome editing include, but are not limited to: introduction of one or more foreign genes to confer an agricultural trait of interest; editing of endogenous genes to confer an agricultural trait of interest; modulating of endogenous genes by the CRISPR-Cas system to confer an agricultural trait of interest. Exemplary genes conferring agronomic traits include, but are not limited to genes that confer resistance to pests or diseases; genes involved in plant diseases, such as those listed in WO 2013046247; genes that confer resistance to herbicides, fungicides, or the like; genes involved in (abiotic) stress tolerance. Other aspects of the use of the CRISPR-Cas system include, but are not limited to: create (male) sterile plants; increasing the fertility stage in plants/algae etc.; generate genetic variation in a crop of interest; affect fruit-ripening; increasing storage life of plants/algae etc.; reducing allergen in plants/algae etc.; ensure a value added trait (e.g. nutritional improvement); Screening methods for endogenous genes of interest; biofuel, fatty acid, organic acid, etc. production.

### Therapeutic Applications

[0511] The systems of the invention can be applied in various therapeutic applications, e.g., in areas of former RNA cutting technologies, without undue experimentation, from this disclosure, including therapeutic, assay and other applications, because the present application provides the foundation for informed engineering of the system. The present invention provides for therapeutic treatment of a disease caused by overexpression of nucleic acids, toxic nucleic acids and/or mutated nucleic acids (such as, for example, splicing defects or truncations). Expression of the toxic RNA may be associated with formation of nuclear inclusions and late-onset degenerative changes in brain, heart or skeletal muscle. In the best studied example, myotonic dystrophy, it appears that the main pathogenic effect of the toxic RNA is to sequester binding proteins and compromise the regulation of alternative splicing (Hum. Mol. Genet. (2006) 15 (suppl 2): R162-R169). Myotonic dystrophy [dystrophia myotonica (DM)] is of particular interest to geneticists because it produces an extremely wide range of clinical features. A partial listing would include muscle wasting, cataracts, insulin resistance, testicular atrophy, slowing of cardiac conduction, cutaneous tumors and effects on cognition. The classical form of DM, which is now called DM type 1 (DM1), is caused by an expansion of CTG repeats in the 3′-untranslated region (UTR) of DMPK, a gene encoding a cytosolic protein kinase.

[0512] In some examples, the disease is caused by a G→A or C→T point mutation or a pathogenic SNP. In some examples, the disease caused by a T→C or A→G point mutation or a pathogenic SNP. For example, the disease may be cancer, haemophilia, beta-thalassemia, Marfan syndrome and Wiskott-Aldrich syndrome.

### Exemplary Therapies

[0513] The present invention also contemplates use of the CRISPR-Cas system and the base editor described herein, for treatment in a variety of diseases and disorders. In some embodiments, the invention described herein relates to a method for therapy in which cells are edited ex vivo by CRISPR or the base editor to modulate at least one gene, with subsequent administration of the edited cells to a patient in need thereof. In some embodiments, the editing involves knocking in, knocking out or knocking down expression of at least one target gene in a cell. In particular embodiments, the editing inserts an exogenous, gene, minigene or sequence, which may comprise one or more exons and introns or natural or synthetic introns into the locus of a target gene, a hot-spot locus, a safe harbor locus of the gene genomic locations where new genes or genetic elements can be introduced without disrupting the expression or regulation of adjacent genes, or correction by insertions or deletions one or more mutations in DNA sequences that encode regulatory elements of a target gene. In some embodiment, the editing comprise introducing one or more point mutations in a nucleic acid (e.g., a genomic DNA) in a target cell.

[0514] In embodiments, the treatment is for disease/disorder of an organ, including liver disease, eye disease, muscle disease, heart disease, blood disease, brain disease, kidney disease, or may comprise treatment for an autoimmune disease, central nervous system disease, cancer and other proliferative diseases, neurodegenerative disorders, inflammatory disease, metabolic disorder, musculoskeletal disorder and the like.

[0515] Particular diseases/disorders include chondroplasia, achromatopsia, acid maltase deficiency, adrenoleukodystrophy, aicardi syndrome, alpha-1 antitrypsin deficiency, alpha-thalassemia, androgen insensitivity syndrome, apert syndrome, arrhythmogenic right ventricular, dysplasia, ataxia telangictasia, barth syndrome, beta-thalassemia, blue rubber bleb nevus syndrome, canavan disease, chronic granulomatous diseases (CGD), cri du chat syndrome, cystic fibrosis, dercum's disease, ectodermal dysplasia, fanconi anemia, fibrodysplasia ossificans progressive, fragile X syndrome, galactosemis, Gaucher's disease, generalized gangliosidoses (e.g., GM1), hemochromatosis, the hemoglobin C mutation in the 6th codon of beta-globin (HbC), hemophilia, Huntington's disease, Hurler Syndrome, hypophosphatasia, Klinefleter syndrome, Krabbes Disease, Langer-Giedion Syndrome, leukodystrophy, long QT syndrome, Marfan syndrome, Moebius syndrome, mucopolysaccharidosis (MPS), nail patella syndrome, nephrogenic diabetes insipdius, neurofibromatosis, Neimann-Pick disease, osteogenesis imperfecta, porphyria, Prader-Willi syndrome, progeria, Proteus syndrome, retinoblastoma, Rett syndrome, Rubinstein-Taybi syndrome, Sanfilippo syndrome, severe combined immunodeficiency (SCID), Shwachman syndrome, sickle cell disease (sickle cell anemia), Smith-Magenis syndrome, Stickler syndrome, Tay-Sachs disease, Thrombocytopenia Absent Radius (TAR) syndrome, Treacher Collins syndrome, trisomy, tuberous sclerosis, Turner's syndrome, urea cycle disorder, von Hippel-Landau disease, Waardenburg syndrome, Williams syndrome, Wilson's disease, and Wiskott-Aldrich syndrome.

[0516] In embodiments, the disease is associated with expression of a tumor antigen, e.g., a proliferative disease, a precancerous condition, a cancer, or a non-cancer related indication associated with expression of the tumor antigen, which may in some embodiments comprise a target selected from B2M, CD247, CD3D, CD3E, CD3G, TRAC, TRBC1, TRBC2, HLA-A, HLA-B, HLA-C, DCK, CD52, FKBP1A, CIITA, NLRC5, RFXANK, RFX5, RFXAP, or NR3C1, HAVCR2, LAG3, PDCD1, PD-L2, CTLA4, CEACAM (CEACAM-1, CEACAM-3 and/or CEACAM-5), VISTA, BTLA, TIGIT, LAIR1, CD160, 2B4, CD80, CD86, B7-H3 (CD113), B7-H4 (VTCN1), HVEM (TNFRSF14 or CD107), KIR, A2aR, MEW class I, MHC class II, GALS, adenosine, and TGF beta, or PTPN11 DCK, CD52, NR3C1, LILRB1, CD19; CD123; CD22; CD30; CD171; CS-1 (also referred to as CD2 subset 1, CRACC, SLAMF7, CD319, and 19A24); C-type lectin-like molecule-1 (CLL-1 or CLECL1); CD33; epidermal growth factor receptor variant III (EGFRvIII); ganglioside G2 (GD2); ganglioside GD3 (aNeu5Ac(2-8)aNeu5Ac(2-3)bDGalp(1-4)bDG1cp(1-1)Cer); TNF receptor family member B cell maturation (BCMA); Tn antigen ((Tn Ag) or (GalNAca-Ser/Thr)); prostate-specific membrane antigen (PSMA); Receptor tyrosine kinase-like orphan receptor 1 (ROR1); Fms-Like Tyrosine Kinase 3 (FLT3); Tumor-associated glycoprotein 72 (TAG72); CD38; CD44v6; Carcinoembryonic antigen (CEA); Epithelial cell adhesion molecule (EPCAM); B7H3 (CD276); KIT (CD117); Interleukin-13 receptor subunit alpha-2 (IL-13Ra2 or CD213A2); Mesothelin; Interleukin 11 receptor alpha (IL-11Ra); prostate stem cell antigen (PSCA); Protease Serine 21 (Testisin or PRSS21); vascular endothelial growth factor receptor 2 (VEGFR2); Lewis(Y) antigen; CD24; Platelet-derived growth factor receptor beta (PDGFR-beta); Stage-specific embryonic antigen-4 (SSEA-4); CD20; Folate receptor alpha; Receptor tyrosine-protein kinase ERBB2 (Her2/neu); n kinase ERBB2 (Her2/neu); Mucin 1, cell surface associated (MUC1); epidermal growth factor receptor (EGFR); neural cell adhesion molecule (NCAM); Prostase; prostatic acid phosphatase (PAP); elongation factor 2 mutated (ELF2M); Ephrin B2; fibroblast activation protein alpha (FAP); insulin-like growth factor 1 receptor (IGF-I receptor), carbonic anhydrase IX (CAIX); Proteasome (Prosome, Macropain) Subunit, Beta Type, 9 (LMP2); glycoprotein 100 (gp100); oncogene fusion protein consisting of breakpoint cluster region (BCR) and Abelson murine leukemia viral oncogene homolog 1 (Abl) (bcr-abl); tyrosinase; ephrin type-A receptor 2 (EphA2); Fucosyl GM1; sialyl Lewis adhesion molecule (sLe); ganglioside GM3 (aNeu5Ac(2-3)bDGalp(1-4)bDG1cp(1-1)Cer); transglutaminase 5 (TGS5); high molecular weight-melanoma-associated antigen (HMWMAA); o-acetyl-GD2 ganglioside (OAcGD2); Folate receptor beta; tumor endothelial marker 1 (TEM1/CD248); tumor endothelial marker 7-related (TEM7R); claudin 6 (CLDN6); thyroid stimulating hormone receptor (TSHR); G protein-coupled receptor class C group 5, member D (GPRC5D); chromosome X open reading frame 61 (CXORF61); CD97; CD179a; anaplastic lymphoma kinase (ALK); Polysialic acid; placenta-specific 1 (PLAC1); hexasaccharide portion of globoH glycoceramide (GloboH); mammary gland differentiation antigen (NY-BR-1); uroplakin 2 (UPK2); Hepatitis A virus cellular receptor 1 (HAVCR1); adrenoceptor beta 3 (ADRB3); pannexin 3 (PANX3); G protein-coupled receptor 20 (GPR20); lymphocyte antigen 6 complex, locus K 9 (LY6K); Olfactory receptor 51E2 (OR51E2); TCR Gamma Alternate Reading Frame Protein (TARP); Wilms tumor protein (WT1); Cancer/testis antigen 1 (NY-ESO-1); Cancer/testis antigen 2 (LAGE-1a); Melanoma-associated antigen 1 (MAGE-A1); ETS translocation-variant gene 6, located on chromosome 12p (ETV6-AML); sperm protein 17 (SPA17); X Antigen Family, Member 1A (XAGE1); angiopoietin-binding cell surface receptor 2 (Tie 2); melanoma cancer testis antigen-1 (MAD-CT-1); melanoma cancer testis antigen-2 (MAD-CT-2); Fos-related antigen 1; tumor protein p53 (p53); p53 mutant; prostein; surviving; telomerase; prostate carcinoma tumor antigen-1 (PCTA-1 or Galectin 8), melanoma antigen recognized by T cells 1 (MelanA or MART1); Rat sarcoma (Ras) mutant; human Telomerase reverse transcriptase (hTERT); sarcoma translocation breakpoints; melanoma inhibitor of apoptosis (ML-IAP); ERG (transmembrane protease, serine 2 (TMPRSS2) ETS fusion gene); N-Acetyl glucosaminyl-transferase V (NA17); paired box protein Pax-3 (PAX3); Androgen receptor; Cyclin B 1; v-myc avian myelocytomatosis viral oncogene neuroblastoma derived homolog (MYCN); Ras Homolog Family Member C (RhoC); Tyrosinase-related protein 2 (TRP-2); Cytochrome P450 1B1 (CYP1B1); CCCTC-Binding Factor (Zinc Finger Protein)-Like (BORIS or Brother of the Regulator of Imprinted Sites), Squamous Cell Carcinoma Antigen Recognized By T Cells 3 (SART3); Paired box protein Pax-5 (PAX5); proacrosin binding protein sp32 (OY-TES1); lymphocyte-specific protein tyrosine kinase (LCK); A kinase anchor protein 4 (AKAP-4); synovial sarcoma, X breakpoint 2 (SSX2); Receptor for Advanced Glycation Endproducts (RAGE-1); renal ubiquitous 1 (RU1); renal ubiquitous 2 (RU2); legumain; human papilloma virus E6 (HPV E6); human papilloma virus E7 (HPV E7); intestinal carboxyl esterase; heat shock protein 70-2 mutated (mut hsp70-2); CD79a; CD79b; CD72; Leukocyte-associated immunoglobulin-like receptor 1 (LAIR1); Fc fragment of IgA receptor (FCAR or CD89); Leukocyte immunoglobulin-like receptor subfamily A member 2 (LILRA2); CD300 molecule-like family member f (CD300LF); C-type lectin domain family 12 member A (CLEC12A); bone marrow stromal cell antigen 2 (BST2); EGF-like module-containing mucin-like hormone receptor-like 2 (EMR2); lymphocyte antigen 75 (LY75); Glypican-3 (GPC3); Fc receptor-like 5 (FCRLS); and immunoglobulin lambda-like polypeptide 1 (IGLL1), CD19, BCMA, CD70, G6PC, Dystrophin, including modification of exon 51 by deletion or excision, DMPK, CFTR (cystic fibrosis transmembrane conductance regulator). In embodiments, the targets comprise CD70, or a Knock-in of CD33 and Knock-out of B2M. In embodiments, the targets comprise a knockout of TRAC and B2M, or TRAC B2M and PD1, with or without additional target genes. In certain embodiments, the disease is cystic fibrosis with targeting of the SCNN1A gene, e.g., the non-coding or coding regions, e.g., a promoter region, or a transcribed sequence, e.g., intronic or exonic sequence, targeted knock-in at CFTR sequence within intron 2, into which, e.g., can be introduced CFTR sequence that codes for CFTR exons 3-27; and sequence within CFTR intron 10, into which sequence that codes for CFTR exons 11-27 can be introduced.

[0517] In embodiments, the disease is Metachromatic Leukodystrophy, and the target is Arylsulfatase A, the disease is Wiskott-Aldrich Syndrome and the target is Wiskott-Aldrich Syndrome protein, the disease is Adreno leukodystrophy and the target is ATP-binding cassette DI, the disease is Human Immunodeficiency Virus and the target is receptor type 5-C-C chemokine or CXCR4 gene, the disease is Beta-thalassemia and the target is Hemoglobin beta subunit, the disease is X-linked Severe Combined ID receptor subunit gamma and the target is interelukin-2 receptor subunit gamma, the disease is Multisystemic Lysosomal Storage Disorder cystinosis and the target is cystinosin, the disease is Diamon-Blackfan anemia and the target is Ribosomal protein S19, the disease is Fanconi Anemia and the target is Fanconi anemia complementation groups (e.g. FNACA, FNACB, FANCC, FANCD1, FANCD2, FANCE, FANCF, RAD51C), the disease is Shwachman-Bodian-Diamond Bodian-Diamond syndrome and the target is Shwachman syndrome gene, the disease is Gaucher's disease and the target is Glucocerebrosidase, the disease is Hemophilia A and the target is Anti-hemophiliac factor OR Factor VIII, Christmas factor, Serine protease, Factor Hemophilia B IX, the disease is Adenosine deaminase deficiency (ADA-SCID) and the target is Adenosine deaminase, the disease is GM1 gangliosidoses and the target is beta-galactosidase, the disease is Glycogen storage disease type II, Pompe disease, the disease is acid maltase deficiency acid and the target is alpha-glucosidase, the disease is Niemann-Pick disease, SMPD1-associated (Types Sphingomyelin phosphodiesterase 1 OR A and B) acid and the target is sphingomyelinase, the disease is Krabbe disease, globoid cell leukodystrophy and the target is Galactosylceramidase or galactosylceramide lipidosis and the target is galactercerebrosidease, Human leukocyte antigens DR-15, DQ-6, the disease is Multiple Sclerosis (MS) DRB1, the disease is Herpes Simplex Virus 1 or 2 and the target is knocking down of one, two or three of RS1, RL2 and/or LAT genes. In embodiments, the disease is an HPV associated cancer with treatment including edited cells comprising binding molecules, such as TCRs or antigen binding fragments thereof and antibodies and antigen-binding fragments thereof, such as those that recognize or bind human papilloma virus. The disease can be Hepatitis B with a target of one or more of PreC, C, X, PreS1, PreS2, S, P and/or SP gene(s).

[0518] In embodiments, the immune disease is severe combined immunodeficiency (SCID), Omenn syndrome, and in one aspect the target is Recombination Activating Gene 1 (RAG1) or an interleukin-7 receptor (IL7R). In particular embodiments, the disease is Transthyretin Amyloidosis (ATTR), Familial amyloid cardiomyopathy, and in one aspect, the target is the TTR gene, including one or more mutations in the TTR gene. In embodiments, the disease is Alpha-1 Antitrypsin Deficiency (AATD) or another disease in which Alpha-1 Antitrypsin is implicated, for example GvHD, Organ transplant rejection, diabetes, liver disease, COPD, Emphysema and Cystic Fibrosis, in particular embodiments, the target is SERPINA1.

[0519] In embodiments, the disease is primary hyperoxaluria, which, in certain embodiments, the target comprises one or more of Lactate dehydrogenase A (LDHA) and hydroxy Acid Oxidase 1 (HAO 1). In embodiments, the disease is primary hyperoxaluria type 1 (ph1) and other alanine-glyoxylate aminotransferase (agxt) gene related conditions or disorders, such as Adenocarcinoma, Chronic Alcoholic Intoxication, Alzheimer's Disease, Cooley's anemia, Aneurysm, Anxiety Disorders, Asthma, Malignant neoplasm of breast, Malignant neoplasm of skin, Renal Cell Carcinoma, Cardiovascular Diseases, Malignant tumor of cervix, Coronary Arteriosclerosis, Coronary heart disease, Diabetes, Diabetes Mellitus, Diabetes Mellitus Non-Insulin-Dependent, Diabetic Nephropathy, Eclampsia, Eczema, Subacute Bacterial Endocarditis, Glioblastoma, Glycogen storage disease type II, Sensorineural Hearing Loss (disorder), Hepatitis, Hepatitis A, Hepatitis B, Homocystinuria, Hereditary Sensory Autonomic Neuropathy Type 1, Hyperaldosteronism, Hypercholesterolemia, Hyperoxaluria, Primary Hyperoxaluria, Hypertensive disease, Inflammatory Bowel Diseases, Kidney Calculi, Kidney Diseases, Chronic Kidney Failure, leiomyosarcoma, Metabolic Diseases, Inborn Errors of Metabolism, Mitral Valve Prolapse Syndrome, Myocardial Infarction, Neoplasm Metastasis, Nephrotic Syndrome, Obesity, Ovarian Diseases, Periodontitis, Polycystic Ovary Syndrome, Kidney Failure, Adult Respiratory Distress Syndrome, Retinal Diseases, Cerebrovascular accident, Turner Syndrome, Viral hepatitis, Tooth Loss, Premature Ovarian Failure, Essential Hypertension, Left Ventricular Hypertrophy, Migraine Disorders, Cutaneous Melanoma, Hypertensive heart disease, Chronic glomerulonephritis, Migraine with Aura, Secondary hypertension, Acute myocardial infarction, Atherosclerosis of aorta, Allergic asthma, pineoblastoma, Malignant neoplasm of lung, Primary hyperoxaluria type I, Primary hyperoxaluria type 2, Inflammatory Breast Carcinoma, Cervix carcinoma, Restenosis, Bleeding ulcer, Generalized glycogen storage disease of infants, Nephrolithiasis, Chronic rejection of renal transplant, Urolithiasis, pricking of skin, Metabolic Syndrome X, Maternal hypertension, Carotid Atherosclerosis, Carcinogenesis, Breast Carcinoma, Carcinoma of lung, Nephronophthisis, Microalbuminuria, Familial Retinoblastoma, Systolic Heart Failure Ischemic stroke, Left ventricular systolic dysfunction, Cauda Equina Paraganglioma, Hepatocarcinogenesis, Chronic Kidney Diseases, Glioblastoma Multiforme, Non-Neoplastic Disorder, Calcium Oxalate Nephrolithiasis, Ablepharon-Macrostomia Syndrome, Coronary Artery Disease, Liver carcinoma, Chronic kidney disease stage 5, Allergic rhinitis (disorder), Crigler Najjar syndrome type 2, and Ischemic Cerebrovascular Accident. In certain embodiments, treatment is targeted to the liver. In embodiments, the gene is AGXT, with a cytogenetic location of 2q37.3 and the genomic coordinate are on Chromosome 2 on the forward strand at position 240,868,479-240,880,502.

[0520] Treatment can also target collagen type vii alpha 1 chain (col7a1) gene related conditions or disorders, such as Malignant neoplasm of skin, Squamous cell carcinoma, Colorectal Neoplasms, Crohn Disease, Epidermolysis Bullosa, Indirect Inguinal Hernia, Pruritus, Schizophrenia, Dermatologic disorders, Genetic Skin Diseases, Teratoma, Cockayne-Touraine Disease, Epidermolysis Bullosa Acquisita, Epidermolysis Bullosa Dystrophica, Junctional Epidermolysis Bullosa, Hallopeau-Siemens Disease, Bullous Skin Diseases, Agenesis of corpus callosum, Dystrophia unguium, Vesicular Stomatitis, Epidermolysis Bullosa With Congenital Localized Absence Of Skin And Deformity Of Nails, Juvenile Myoclonic Epilepsy, Squamous cell carcinoma of esophagus, Poikiloderma of Kindler, pretibial Epidermolysis bullosa, Dominant dystrophic epidermolysis bullosa albopapular type (disorder), Localized recessive dystrophic epidermolysis bullosa, Generalized dystrophic epidermolysis bullosa, Squamous cell carcinoma of skin, Epidermolysis Bullosa Pruriginosa, Mammary Neoplasms, Epidermolysis Bullosa Simplex Superficialis, Isolated Toenail Dystrophy, Transient bullous dermolysis of the newborn, Autosomal Recessive Epidermolysis Bullosa Dystrophica Localisata Variant, and Autosomal Recessive Epidermolysis Bullosa Dystrophica Inversa.

[0521] In embodiments, the disease is acute myeloid leukemia (AML), targeting Wilms Tumor I (WTI) and HLA expressing cells. In embodiments, the therapy is T cell therapy, as described elsewhere herein, comprising engineered T cells with WTI specific TCRs. In certain embodiments, the target is CD157 in AML.

[0522] In embodiments, the disease is a blood disease. In certain embodiments, the disease is hemophilia, in one aspect the target is Factor XI. In other embodiments, the disease is a hemoglobinopathy, such as sickle cell disease, sickle cell trait, hemoglobin C disease, hemoglobin C trait, hemoglobin S/C disease, hemoglobin D disease, hemoglobin E disease, a thalassemia, a condition associated with hemoglobin with increased oxygen affinity, a condition associated with hemoglobin with decreased oxygen affinity, unstable hemoglobin disease, methemoglobinemia. Hemostasis and Factor X and XII deficiencies can also be treated. In embodiments, the target is BCL11A gene (e.g., a human BCL11a gene), a BCL11a enhancer (e.g., a human BCL11a enhancer), or a HFPH region (e.g., a human HPFH region), beta globulin, fetal hemoglobin, γ-globin genes (e.g., HBG1, HBG2, or HBG1 and HBG2), the erythroid specific enhancer of the BCL11A gene (BCL11Ae), or a combination thereof

[0523] In embodiments, the target locus can be one or more of RAC, TRBC1, TRBC2, CD3E, CD3G, CD3D, B2M, CIITA, CD247, HLA-A, HLA-B, HLA-C, DCK, CD52, FKBP1A, NLRC5, RFXANK, RFX5, RFXAP, NR3C1, CD274, HAVCR2, LAG3, PDCD1, PD-L2, HCF2, PAI, TFPI, PLAT, PLAU, PLG, RPOZ, F7, F8, F9, F2, F5, F7, F10, F11, F12, F13A1, F13B, STAT1, FOXP3, IL2RG, DCLRE1C, ICOS, MHC2TA, GALNS, HGSNAT, ARSB, RFXAP, CD20, CD81, TNFRSF13B, SEC23B, PKLR, IFNG, SPTB, SPTA, SLC4A1, EPO, EPB42, CSF2 CSF3, VFW, SERPINCA1, CTLA4, CEACAM (e.g., CEACAM-1, CEACAM-3 and/or CEACAM-5), VISTA, BTLA, TIGIT, LAIR1, CD160, 2B4, CD80, CD86, B7-H3 (CD113), B7-H4 (VTCN1), HVEM (TNFRSF14 or CD107), KIR, A2aR, MHC class I, MEW class II, GALS, adenosine, and TGF beta, PTPN11, and combinations thereof. In embodiments, the target sequence within the genomic nucleic acid sequence at Chrl 1:5,250,094-5,250,237, —strand, hg38; Chrl 1:5,255,022-5,255,164, —strand, hg38; nondeletional HFPH region; Chrl 1:5,249,833 to Chrl 1:5,250,237, —strand, hg38; Chrl 1:5,254,738 to Chrl 1:5,255, 164, —strand, hg38; Chrl 1:5,249,833-5,249,927, —strand, hg3; Chrl 1: 5,254,738-5,254,851, —strand, hg38; Chrl 1:5,250, 139-5,250,237, —strand, hg38.

[0524] In embodiments, the disease is associated with high cholesterol, and regulation of cholesterol is provided, in some embodiments, regulation is affected by modification in the target PCSK9. Other diseases in which PCSK9 can be implicated, and thus would be a target for the systems and methods described herein include Abetaiipoproteinemia, Adenoma, Arteriosclerosis, Atherosclerosis, Cardiovascular Diseases, Cholelithiasis, Coronary Arteriosclerosis, Coronary heart disease, Non-Insulin-Dependent Diabetes Meliitus, Hypercholesterolemia, Familial Hypercholesterolemia, Hyperinsuiinism, Hyperlipidemia, Familial Combined Hyperlipidemia, Hypobetalipoproteinemias, Chronic Kidney Failure, Liver diseases, Liver neoplasms, melanoma, Myocardial Infarction, Narcolepsy, Neoplasm Metastasis, Nephroblastoma, Obesity, Peritonitis, Pseudoxanthoma Elasticum, Cerebrovascular accident, Vascular Diseases, Xanthomatosis, Peripheral Vascular Diseases, Myocardial Ischemia, Dyslipidemias, Impaired glucose tolerance, Xanthoma, Polygenic hypercholesterolemia, Secondary malignant neoplasm of liver, Dementia, Overweight, Hepatitis C, Chronic, Carotid Atherosclerosis, Hyperlipoproteinemia Type Ha, Intracranial Atherosclerosis, Ischemic stroke, Acute Coronary Syndrome, Aortic calcification, Cardiovascular morbidity, Hyperlipoproteinemia Type lib, Peripheral Arterial Diseases, Familial Hyperaldosteronism Type II, Familial hypobetalipoproteinemia, Autosomal Recessive Hypercholesterolemia, Autosomal Dominant Hypercholesterolemia 3, Coronary Artery Disease, Liver carcinoma, Ischemic Cerebrovascular Accident, and Arteriosclerotic cardiovascular disease NOS. In embodiments, the treatment can be targeted to the liver, the primary location of activity of PCSK9.

[0525] In embodiments, the disease or disorder is Hyper IGM syndrome or a disorder characterized by defective CD40 signaling. In certain embodiments, the insertion of CD40L exons are used to restore proper CD40 signaling and B cell class switch recombination. In particular embodiments, the target is CD40 ligand (CD40L)-edited at one or more of exons 2-5 of the CD40L gene, in cells, e.g., T cells or hematopoietic stem cells (HSCs).

[0526] In embodiments, the disease is merosin-deficient congenital muscular dystrophy (mdcmd) and other laminin, alpha 2 (lama2) gene related conditions or disorders. The therapy can be targeted to the muscle, for example, skeletal muscle, smooth muscle, and/or cardiac muscle. In certain embodiments, the target is Laminin, Alpha 2 (LAMA2) which may also be referred to as Laminin-12 Subunit Alpha, Laminin-2 Subunit Alpha, Laminin-4 Subunit Alpha 3, Merosin Heavy Chain, Laminin M Chain, LAMM, Congenital Muscular Dystrophy and Merosin. LAMA2 has a cytogenetic location of 6q22.33 and the genomic coordinate are on Chromosome 6 on the forward strand at position 128,883, 141-129,516,563. In embodiments, the disease treated can be Merosin-Deficient Congenital Muscular Dystrophy (MDCMD), Amyotrophic Lateral Sclerosis, Bladder Neoplasm, Charcot-Marie-Tooth Disease, Colorectal Carcinoma, Contracture, Cyst, Duchenne Muscular Dystrophy, Fatigue, Hyperopia, Renovascular Hypertension, melanoma, Mental Retardation, Myopathy, Muscular Dystrophy, Myopia, Myositis, Neuromuscular Diseases, Peripheral Neuropathy, Refractive Errors, Schizophrenia, Severe mental retardation (I.Q. 20-34), Thyroid Neoplasm, Tobacco Use Disorder, Severe Combined Immunodeficiency, Synovial Cyst, Adenocarcinoma of lung (disorder), Tumor Progression, Strawberry nevus of skin, Muscle degeneration, Microdontia (disorder), Walker-Warburg congenital muscular dystrophy, Chronic Periodontitis, Leukoencephalopathies, Impaired cognition, Fukuyama Type Congenital Muscular Dystrophy, Scleroatonic muscular dystrophy, Eichsfeld type congenital muscular dystrophy, Neuropathy, Muscle eye brain disease, Limb-Muscular Dystrophies, Girdle, Congenital muscular dystrophy (disorder), Muscle fibrosis, cancer recurrence, Drug Resistant Epilepsy, Respiratory Failure, Myxoid cyst, Abnormal breathing, Muscular dystrophy congenital merosin negative, Colorectal Cancer, Congenital Muscular Dystrophy due to Partial LAMA2 Deficiency, and Autosomal Dominant Craniometaphyseal Dysplasia.

[0527] In certain embodiments, the target is an AAVS1 (PPPIR12C), an ALB gene, an Angptl3 gene, an ApoC3 gene, an ASGR2 gene, a CCR5 gene, a FIX (F9) gene, a G6PC gene, a Gys2 gene, an HGD gene, a Lp(a) gene, a Pcsk9 gene, a Serpinal gene, a TF gene, and a TTR gene). Assessment of efficiency of HDR/NHEJ mediated knock-in of cDNA into the first exon can utilize cDNA knock-in into “safe harbor” sites such as: single-stranded or double-stranded DNA having homologous arms to one of the following regions, for example: ApoC3 (chr11:116829908-116833071), Angptl3 (chr1:62,597,487-62,606,305), Serpinal (chr14:94376747-94390692), Lp(a) (chr6:160531483-160664259), Pcsk9 (chr1:55,039,475-55,064,852), FIX (chrX:139,530,736-139,563,458), ALB (chr4:73,404,254-73,421,411), TTR (chr1 8:31,591,766-31,599,023), TF (chr3:133,661,997-133,779,005), G6PC (chr17:42,900,796-42,914,432), Gys2 (chr12:21,536,188-21,604,857), AAVS1 (PPP1R12C) (chr19:55,090,912-55,117,599), HGD (chr3:120,628,167-120,682,570), CCR5 (chr3:46,370,854-46,376,206), or ASGR2 (chr17:7,101,322-7,114,310).

[0528] In one aspect, the target is superoxide dismutase 1, soluble (SOD1), which can aid in treatment of a disease or disorder associated with the gene. In particular embodiments, the disease or disorder is associated with SOD1, and can be, for example, Adenocarcinoma, Albuminuria, Chronic Alcoholic Intoxication, Alzheimer's Disease, Amnesia, Amyloidosis, Amyotrophic Lateral Sclerosis, Anemia, Autoimmune hemolytic anemia, Sickle Cell Anemia, Anoxia, Anxiety Disorders, Aortic Diseases, Arteriosclerosis, Rheumatoid Arthritis, Asphyxia Neonatorum, Asthma, Atherosclerosis, Autistic Disorder, Autoimmune Diseases, Barrett Esophagus, Behcet Syndrome, Malignant neoplasm of urinary bladder, Brain Neoplasms, Malignant neoplasm of breast, Oral candidiasis, Malignant tumor of colon, Bronchogenic Carcinoma, Non-Small Cell Lung Carcinoma, Squamous cell carcinoma, Transitional Cell Carcinoma, Cardiovascular Diseases, Carotid Artery Thrombosis, Neoplastic Cell Transformation, Cerebral Infarction, Brain Ischemia, Transient Ischemic Attack, Charcot-Marie-Tooth Disease, Cholera, Colitis, Colorectal Carcinoma, Coronary Arteriosclerosis, Coronary heart disease, Infection by Cryptococcus neoformans, Deafness, Cessation of life, Deglutition Disorders, Presenile dementia, Depressive disorder, Contact Dermatitis, Diabetes, Diabetes Mellitus, Experimental Diabetes Mellitus, Insulin-Dependent Diabetes Mellitus, Non-Insulin-Dependent Diabetes Mellitus, Diabetic Angiopathies, Diabetic Nephropathy, Diabetic Retinopathy, Down Syndrome, Dwarfism, Edema, Japanese Encephalitis, Toxic Epidermal Necrolysis, Temporal Lobe Epilepsy, Exanthema, Muscular fasciculation, Alcoholic Fatty Liver, Fetal Growth Retardation, Fibromyalgia, Fibrosarcoma, Fragile X Syndrome, Giardiasis, Glioblastoma, Glioma, Headache, Partial Hearing Loss, Cardiac Arrest, Heart failure, Atrial Septal Defects, Helminthiasis, Hemochromatosis, Hemolysis (disorder), Chronic Hepatitis, HIV Infections, Huntington Disease, Hypercholesterolemia, Hyperglycemia, Hyperplasia, Hypertensive disease, Hyperthyroidism, Hypopituitarism, Hypoproteinemia, Hypotension, natural Hypothermia, Hypothyroidism, Immunologic Deficiency Syndromes, Immune System Diseases, Inflammation, Inflammatory Bowel Diseases, Influenza, Intestinal Diseases, Ischemia, Kearns-Sayre syndrome, Keratoconus, Kidney Calculi, Kidney Diseases, Acute Kidney Failure, Chronic Kidney Failure, Polycystic Kidney Diseases, leukemia, Myeloid Leukemia, Acute Promyelocytic Leukemia, Liver Cirrhosis, Liver diseases, Liver neoplasms, Locked-In Syndrome, Chronic Obstructive Airway Disease, Lung Neoplasms, Systemic Lupus Erythematosus, Non-Hodgkin Lymphoma, Machado-Joseph Disease, Malaria, Malignant neoplasm of stomach, Animal Mammary Neoplasms, Marfan Syndrome, Meningomyelocele, Mental Retardation, Mitral Valve Stenosis, Acquired Dental Fluorosis, Movement Disorders, Multiple Sclerosis, Muscle Rigidity, Muscle Spasticity, Muscular Atrophy, Spinal Muscular Atrophy, Myopathy, Mycoses, Myocardial Infarction, Myocardial Reperfusion Injury, Necrosis, Nephrosis, Nephrotic Syndrome, Nerve Degeneration, nervous system disorder, Neuralgia, Neuroblastoma, Neuroma, Neuromuscular Diseases, Obesity, Occupational Diseases, Ocular Hypertension, Oligospermia, Degenerative polyarthritis, Osteoporosis, Ovarian Carcinoma, Pain, Pancreatitis, Papillon-Lefevre Disease, Paresis, Parkinson Disease, Phenylketonurias, Pituitary Diseases, Pre-Eclampsia, Prostatic Neoplasms, Protein Deficiency, Proteinuria, Psoriasis, Pulmonary Fibrosis, Renal Artery Obstruction, Reperfusion Injury, Retinal Degeneration, Retinal Diseases, Retinoblastoma, Schistosomiasis, Schistosomiasis mansoni, Schizophrenia, Scrapie, Seizures, Age-related cataract, Compression of spinal cord, Cerebrovascular accident, Subarachnoid Hemorrhage, Progressive supranuclear palsy, Tetanus, Trisomy, Turner Syndrome, Unipolar Depression, Urticaria, Vitiligo, Vocal Cord Paralysis, Intestinal Volvulus, Weight Gain, HMN (Hereditary Motor Neuropathy) Proximal Type I, Holoprosencephaly, Motor Neuron Disease, Neurofibrillary degeneration (morphologic abnormality), Burning sensation, Apathy, Mood swings, Synovial Cyst, Cataract, Migraine Disorders, Sciatic Neuropathy, Sensory neuropathy, Atrophic condition of skin, Muscle Weakness, Esophageal carcinoma, Lingual-Facial-Buccal Dyskinesia, Idiopathic pulmonary hypertension, Lateral Sclerosis, Migraine with Aura, Mixed Conductive-Sensorineural Hearing Loss, Iron deficiency anemia, Malnutrition, Prion Diseases, Mitochondrial Myopathies, MELAS Syndrome, Chronic progressive external ophthalmoplegia, General Paralysis, Premature aging syndrome, Fibrillation, Psychiatric symptom, Memory impairment, Muscle degeneration, Neurologic Symptoms, Gastric hemorrhage, Pancreatic carcinoma, Pick Disease of the Brain, Liver Fibrosis, Malignant neoplasm of lung, Age related macular degeneration, Parkinsonian Disorders, Disease Progression, Hypocupremia, Cytochrome-c Oxidase Deficiency, Essential Tremor, Familial Motor Neuron Disease, Lower Motor Neuron Disease, Degenerative myelopathy, Diabetic Polyneuropathies, Liver and Intrahepatic Biliary Tract Carcinoma, Persian Gulf Syndrome, Senile Plaques, Atrophic, Frontotemporal dementia, Semantic Dementia, Common Migraine, Impaired cognition, Malignant neoplasm of liver, Malignant neoplasm of pancreas, Malignant neoplasm of prostate, Pure Autonomic Failure, Motor symptoms, Spastic, Dementia, Neurodegenerative Disorders, Chronic Hepatitis C, Guam Form Amyotrophic Lateral Sclerosis, Stiff limbs, Multisystem disorder, Loss of scalp hair, Prostate carcinoma, Hepatopulmonary Syndrome, Hashimoto Disease, Progressive Neoplastic Disease, Breast Carcinoma, Terminal illness, Carcinoma of lung, Tardive Dyskinesia, Secondary malignant neoplasm of lymph node, Colon Carcinoma, Stomach Carcinoma, Central neuroblastoma, Dissecting aneurysm of the thoracic aorta, Diabetic macular edema, Microalbuminuria, Middle Cerebral Artery Occlusion, Middle Cerebral Artery Infarction, Upper motor neuron signs, Frontotemporal Lobar Degeneration, Memory Loss, Classical phenylketonuria, CADASIL Syndrome, Neurologic Gait Disorders, Spinocerebellar Ataxia Type 2, Spinal Cord Ischemia, Lewy Body Disease, Muscular Atrophy, Spinobulbar, Chromosome 21 monosomy, Thrombocytosis, Spots on skin, Drug-Induced Liver Injury, Hereditary Leber Optic Atrophy, Cerebral Ischemia, ovarian neoplasm, Tauopathies, Macroangiopathy, Persistent pulmonary hypertension, Malignant neoplasm of ovary, Myxoid cyst, Drusen, Sarcoma, Weight decreased, Major Depressive Disorder, Mild cognitive disorder, Degenerative disorder, Partial Trisomy, Cardiovascular morbidity, hearing impairment, Cognitive changes, Ureteral Calculi, Mammary Neoplasms, Colorectal Cancer, Chronic Kidney Diseases, Minimal Change Nephrotic Syndrome, Non-Neoplastic Disorder, X-Linked Bulbo-Spinal Atrophy, Mammographic Density, Normal Tension Glaucoma Susceptibility To Finding), Vitiligo-Associated Multiple Autoimmune Disease Susceptibility 1 (Finding), Amyotrophic Lateral Sclerosis And/Or Frontotemporal Dementia 1, Amyotrophic Lateral Sclerosis 1, Sporadic Amyotrophic Lateral Sclerosis, monomelic Amyotrophy, Coronary Artery Disease, Transformed migraine, Regurgitation, Urothelial Carcinoma, Motor disturbances, Liver carcinoma, Protein Misfolding Disorders, TDP-43 Proteinopathies, Promyelocytic leukemia, Weight Gain Adverse Event, Mitochondrial cytopathy, Idiopathic pulmonary arterial hypertension, Progressive cGVHD, Infection, GRN-related frontotemporal dementia, Mitochondrial pathology, and Hearing Loss.

[0529] In particular embodiments, the disease is associated with the gene ATXN1, ATXN2, or ATXN3, which may be targeted for treatment. In some embodiments, the CAG repeat region located in exon 8 of ATXN1, exon 1 of ATXN2, or exon 10 of the ATXN3 is targeted. In embodiments, the disease is spinocerebellar ataxia 3 (sca3), sca1, or sca2 and other related disorders, such as Congenital Abnormality, Alzheimer's Disease, Amyotrophic Lateral Sclerosis, Ataxia, Ataxia Telangiectasia, Cerebellar Ataxia, Cerebellar Diseases, Chorea, Cleft Palate, Cystic Fibrosis, Mental Depression, Depressive disorder, Dystonia, Esophageal Neoplasms, Exotropia, Cardiac Arrest, Huntington Disease, Machado-Joseph Disease, Movement Disorders, Muscular Dystrophy, Myotonic Dystrophy, Narcolepsy, Nerve Degeneration, Neuroblastoma, Parkinson Disease, Peripheral Neuropathy, Restless Legs Syndrome, Retinal Degeneration, Retinitis Pigmentosa, Schizophrenia, Shy-Drager Syndrome, Sleep disturbances, Hereditary Spastic Paraplegia, Thromboembolism, Stiff-Person Syndrome, Spinocerebellar Ataxia, Esophageal carcinoma, Polyneuropathy, Effects of heat, Muscle twitch, Extrapyramidal sign, Ataxic, Neurologic Symptoms, Cerebral atrophy, Parkinsonian Disorders, Protein S Deficiency, Cerebellar degeneration, Familial Amyloid Neuropathy Portuguese Type, Spastic syndrome, Vertical Nystagmus, Nystagmus End-Position, Antithrombin III Deficiency, Atrophic, Complicated hereditary spastic paraplegia, Multiple System Atrophy, Pallidoluysian degeneration, Dystonia Disorders, Pure Autonomic Failure, Thrombophilia, Protein C, Deficiency, Congenital Myotonic Dystrophy, Motor symptoms, Neuropathy, Neurodegenerative Disorders, Malignant neoplasm of esophagus, Visual disturbance, Activated Protein C Resistance, Terminal illness, Myokymia, Central neuroblastoma, Dyssomnias, Appendicular Ataxia, Narcolepsy-Cataplexy Syndrome, Machado-Joseph Disease Type I, Machado-Joseph Disease Type II, Machado-Joseph Disease Type III, Dentatorubral-Pallidoluysian Atrophy, Gait Ataxia, Spinocerebellar Ataxia Type 1, Spinocerebellar Ataxia Type 2, Spinocerebellar Ataxia Type 6 (disorder), Spinocerebellar Ataxia Type 7, Muscular Spinobulbar Atrophy, Genomic Instability, Episodic ataxia type 2 (disorder), Bulbo-Spinal Atrophy X-Linked, Fragile X Tremor/Ataxia Syndrome, Thrombophilia Due to Activated Protein C Resistance (Disorder), Amyotrophic Lateral Sclerosis 1, Neuronal Intranuclear Inclusion Disease, Hereditary Antithrombin Iii Deficiency, and Late-Onset Parkinson Disease.

[0530] In embodiments, the disease is associated with expression of a tumor antigen-cancer or non-cancer related indication, for example acute lymphoid leukemia, diffuse large B cell lymphoma, follicular lymphoma, chronic lymphocytic leukemia, Hodgkin lymphoma, non-Hodgkin lymphoma. In embodiments, the target can be TET2 intron, a TET2 intron-exon junction, a sequence within a genomic region of chr4.

[0531] In embodiments, neurodegenerative diseases can be treated. In particular embodiments, the target is Synuclein, Alpha (SNCA). In certain embodiments, the disorder treated is a pain related disorder, including congenital pain insensitivity, Compressive Neuropathies, Paroxysmal Extreme Pain Disorder, High grade atrioventricular block, Small Fiber Neuropathy, and Familial Episodic Pain Syndrome 2. In certain embodiments, the target is Sodium Channel, Voltage Gated, Type X Alpha Subunit (SCNIOA).

[0532] In certain embodiments, hematopoietic stem cells and progenitor stem cells are edited, including knock-ins. In particular embodiments, the knock-in is for treatment of lysosomal storage diseases, glycogen storage diseases, mucopolysaccharoidoses, or any disease in which the secretion of a protein will ameliorate the disease. In one embodiment, the disease is sickle cell disease (SCD). In another embodiment, the disease is β-thalassemia.

[0533] In certain embodiments, the T cell or NK cell is used for cancer treatment and may include T cells comprising the recombinant receptor (e.g. CAR) and one or more phenotypic markers selected from CCR7+, 4-1BB+(CD137+), TIM3+, CD27+, CD62L+, CD127+, CD45RA+, CD45RO−, t-betl'w, IL-7Ra+, CD95+, IL-2RP+, CXCR3+ or LFA-1+. In certain embodiments the editing of a T cell for caner immunotherapy comprises altering one or more T-cell expressed gene, e.g., one or more of FAS, BID, CTLA4, PDCD1, CBLB, PTPN6, B2M, TRAC and TRBC gene. In some embodiments, editing includes alterations introduced into, or proximate to, the CBLB target sites to reduce CBLB gene expression in T cells for treatment of proliferative diseases and may include larger insertions or deletions at one or more CBLB target sites. T cell editing of TGFBR2 target sequence can be, for example, located in exon 3, 4, or 5 of the TGFBR2 gene and utilized for cancers and lymphoma treatment.

[0534] Cells for transplantation can be edited and may include allele-specific modification of one or more immunogenicity genes (e.g., an HLA gene) of a cell, e.g., HLA-A, HLA-B, HLA-C, HLA-DRB 1, HLA-DRB3/4/5, HLA-DQ, and HLA-DP MiHAs, and any other MHC Class I or Class II genes or loci, which may include delivery of one or more matched recipient HLA alleles into the original position(s) where the one or more mismatched donor HLA alleles are located, and may include inserting one or more matched recipient HLA alleles into a “safe harbor” locus. In an embodiment, the method further includes introducing a chemotherapy resistance gene for in vivo selection in a gene.

[0535] Methods and systems can target Dystrophia Myotonica-Protein Kinase (DMPK) for editing, in particular embodiments, the target is the CTG trinucleotide repeat in the 3′ untranslated region (UTR) of the DMPK gene. Disorders or diseases associated with DMPK include Atherosclerosis, Azoospermia, Hypertrophic Cardiomyopathy, Celiac Disease, Congenital chromosomal disease, Diabetes Mellitus, Focal glomerulosclerosis, Huntington Disease, Hypogonadism, Muscular Atrophy, Myopathy, Muscular Dystrophy, Myotonia, Myotonic Dystrophy, Neuromuscular Diseases, Optic Atrophy, Paresis, Schizophrenia, Cataract, Spinocerebellar Ataxia, Muscle Weakness, Adrenoleukodystrophy, Centronuclear myopathy, Interstitial fibrosis, myotonic muscular dystrophy, Abnormal mental state, X-linked Charcot-Marie-Tooth disease 1, Congenital Myotonic Dystrophy, Bilateral cataracts (disorder), Congenital Fiber Type Disproportion, Myotonic Disorders, Multisystem disorder, 3-Methylglutaconic aciduria type 3, cardiac event, Cardiogenic Syncope, Congenital Structural Myopathy, Mental handicap, Adrenomyeloneuropathy, Dystrophia myotonica 2, and Intellectual Disability.

[0536] In embodiments, the disease is an inborn error of metabolism. The disease may be selected from Disorders of Carbohydrate Metabolism (glycogen storage disease, G6PD deficiency), Disorders of Amino Acid Metabolism (phenylketonuria, maple syrup urine disease, glutaric acidemia type 1), Urea Cycle Disorder or Urea Cycle Defects (carbamoyl phosphate synthease I deficiency), Disorders of Organic Acid Metabolism (alkaptonuria, 2-hydroxyglutaric acidurias), Disorders of Fatty Acid Oxidation/Mitochondrial Metabolism (Medium-chain acyl-coenzyme A dehydrogenase deficiency), Disorders of Porphyrin metabolism (acute intermittent porphyria), Disorders of Purine/Pyrimidine Metabolism (Lesch-Nynan syndrome), Disorders of Steroid Metabolism (lipoid congenital adrenal hyperplasia, congenital adrenal hyperplasia), Disorders of Mitochondrial Function (Kearns-Sayre syndrome), Disorders of Peroxisomal function (Zellweger syndrome), or Lysosomal Storage Disorders (Gaucher's disease, Niemann-Pick disease).

[0537] In embodiments, the target can comprise Recombination Activating Gene 1 (RAG1), BCL11 A, PCSK9, laminin, alpha 2 (lama2), ATXN3, alanine-glyoxylate aminotransferase (AGXT), collagen type vii alpha 1 chain (COL7a1), spinocerebellar ataxia type 1 protein (ATXN1), Angiopoietin-like 3 (ANGPTL3), Frataxin (FXN), Superoxidase Dismutase 1, soluble (SOD1), Synuclein, Alpha (SNCA), Sodium Channel, Voltage Gated, Type X Alpha Subunit (SCN10A), Spinocerebellar Ataxia Type 2 Protein (ATXN2), Dystrophia Myotonica-Protein Kinase (DMPK), beta globin locus on chromosome 11, acyl-coenzyme A dehydrogenase for medium chain fatty acids (ACADM), long-chain 3-hydroxyl-coenzyme A dehydrogenase for long chain fatty acids (HADHA), acyl-coenzyme A dehydrogenase for very long-chain fatty acids (ACADVL), Apolipoprotein C3 (APOCIII), Transthyretin (TTR), Angiopoietin-like 4 (ANGPTL4), Sodium Voltage-Gated Channel Alpha Subunit 9 (SCN9A), Interleukin-7 receptor (IL7R), glucose-6-phosphatase, catalytic (G6PC), haemochromatosis (HFE), SERPINA1, C90RF72, β-globin, dystrophin, γ-globin.

[0538] In certain embodiments, the disease or disorder is associated with Apolipoprotein C3 (APOCIII), which can be targeted for editing. In embodiments, the disease or disorder may be Dyslipidemias, Hyperalphalipoproteinemia Type 2, Lupus Nephritis, Wilms Tumor 5, Morbid obesity and spermatogenic, Glaucoma, Diabetic Retinopathy, Arthrogryposis renal dysfunction cholestasis syndrome, Cognition Disorders, Altered response to myocardial infarction, Glucose Intolerance, Positive regulation of triglyceride biosynthetic process, Renal Insufficiency, Chronic, Hyperlipidemias, Chronic Kidney Failure, Apolipoprotein C-III Deficiency, Coronary Disease, Neonatal Diabetes Mellitus, Neonatal, with Congenital Hypothyroidism, Hypercholesterolemia Autosomal Dominant 3, Hyperlipoproteinemia Type III, Hyperthyroidism, Coronary Artery Disease, Renal Artery Obstruction, Metabolic Syndrome X, Hyperlipidemia, Familial Combined, Insulin Resistance, Transient infantile hypertriglyceridemia, Diabetic Nephropathies, Diabetes Mellitus (Type 1), Nephrotic Syndrome Type 5 with or without ocular abnormalities, and Hemorrhagic Fever with renal syndrome.

[0539] In certain embodiments, the target is Angiopoietin-like 4(ANGPTL4). Diseases or disorders associated with ANGPTL4 that can be treated include ANGPTL4 is associated with dyslipidemias, low plasma triglyceride levels, regulator of angiogenesis and modulate tumorigenesis, and severe diabetic retinopathy. both proliferative diabetic retinopathy and non-proliferative diabetic retinopathy.

[0540] In embodiments, editing can be used for the treatment of fatty acid disorders. In certain embodiments, the target is one or more of ACADM, HADHA, ACADVL. In embodiments, the targeted edit is the activity of a gene in a cell selected from the acyl-coenzyme A dehydrogenase for medium chain fatty acids (ACADM) gene, the long-chain 3-hydroxyl-coenzyme A dehydrogenase for long chain fatty acids (HADHA) gene, and the acyl-coenzyme A dehydrogenase for very long-chain fatty acids (ACADVL) gene. In one aspect, the disease is medium chain acyl-coenzyme A dehydrogenase deficiency (MCADD), long-chain 3-hydroxyl-coenzyme A dehydrogenase deficiency (LCHADD), and/or very long-chain acyl-coenzyme A dehydrogenase deficiency (VLCADD).

### Immune Orthogonal Orthologs

[0541] In some embodiments, when CRISPR enzymes need to be expressed or administered in a subject, immunogenicity of CRISPR enzymes may be reduced by sequentially expressing or administering immune orthogonal orthologs of the CRISPR enzymes to the subject. As used herein, the term “immune orthogonal orthologs” refer to orthologous proteins that have similar or substantially the same function or activity, but have no or low cross-reactivity with the immune response generated by one another. In some embodiments, sequential expression or administration of such orthologs elicits low or no secondary immune response. The immune orthogonal orthologs can avoid being neutralized by antibodies (e.g., existing antibodies in the host before the orthologs are expressed or administered). Cells expressing the orthologs can avoid being cleared by the host's immune system (e.g., by activated CTLs). In some examples, CRISPR enzyme orthologs from different species may be immune orthogonal orthologs.

[0542] Immune orthogonal orthologs may be identified by analyzing the sequences, structures, and/or immunogenicity of a set of candidates orthologs. In an example method, a set of immune orthogonal orthologs may be identified by a) comparing the sequences of a set of candidate orthologs (e.g., orthologs from different species) to identify a subset of candidates that have low or no sequence similarity; b) assessing immune overlap among the members of the subset of candidates to identify candidates that have no or low immune overlap. In some cases, immune overlap among candidates may be assessed by determining the binding (e.g., affinity) between a candidate ortholog and MHC (e.g., MHC type I and/or MHC II) of the host. Alternatively or additionally, immune overlap among candidates may be assessed by determining B-cell epitopes for the candidate orthologs. In one example, immune orthogonal orthologs may be identified using the method described in Moreno A M et al., BioRxiv, published online Jan. 10, 2018, doi: doi.org/10.1101/245985.

[0543] As will be apparent, it is envisaged that the present system can be used to target any polynucleotide sequence of interest. The invention provides a non-naturally occurring or engineered composition, or one or more polynucleotides encoding components of said composition, or vector or delivery systems comprising one or more polynucleotides encoding components of said composition for use in a modifying a target cell in vivo, ex vivo or in vitro and, may be conducted in a manner alters the cell such that once modified the progeny or cell line of the CRISPR modified cell retains the altered phenotype. The modified cells and progeny may be part of a multi-cellular organism such as a plant or animal with ex vivo or in vivo application of CRISPR system to desired cell types. The CRISPR invention may be a therapeutic method of treatment. The therapeutic method of treatment may comprise gene or genome editing, or gene therapy.

[0544] Treating pathogens, like bacterial, fungal and parasitic pathogens

[0545] The present invention may also be applied to treat bacterial, fungal and parasitic pathogens. Most research efforts have focused on developing new antibiotics, which once developed, would nevertheless be subject to the same problems of drug resistance. The invention provides novel CRISPR-based alternatives which overcome those difficulties. Furthermore, unlike existing antibiotics, CRISPR-based treatments can be made pathogen specific, inducing bacterial cell death of a target pathogen while avoiding beneficial bacteria.

[0546] Jiang et al. (“RNA-guided editing of bacterial genomes using CRISPR-Cas systems,” Nature Biotechnology vol. 31, p. 233-9, March 2013) used a CRISPR-Cas system to mutate or kill S. pneumoniae and E. coli. The work, which introduced precise mutations into the genomes, relied on dual-RNA:Cas-directed cleavage at the targeted genomic site to kill unmutated cells and circumvented the need for selectable markers or counter-selection systems. CRISPR systems have be used to reverse antibiotic resistance and eliminate the transfer of resistance between strains. Bickard et al. showed that Cas9, reprogrammed to target virulence genes, kills virulent, but not avirulent, S. aureus. Reprogramming the nuclease to target antibiotic resistance genes destroyed staphylococcal plasmids that harbor antibiotic resistance genesand immunized against the spread of plasmid-borne resistance genes. (see, Bikard et al., “Exploiting CRISPR-Cas nucleases to produce sequence-specific antimicrobials,” Nature Biotechnology vol. 32, 1146-1150, doi:10.1038/nbt.3043, published online 5 Oct. 2014.) Bikard showed that CRISPR-Cas9 antimicrobials function in vivo to kill S. aureus in a mouse skin colonization model. Similarly, Yosef et al used a CRISPR system to target genes encoding enzymes that confer resistance to β-lactam antibiotics (see Yousef et al., “Temperate and lytic bacteriophages programmed to sensitize and kill antibiotic-resistant bacteria,” Proc. Natl. Acad. Sci. USA, vol. 112, p. 7267-7272, doi: 10.1073/pnas.1500107112 published online May 18, 2015).

[0547] CRISPR systems can be used to edit genomes of parasites that are resistant to other genetic approaches. For example, a CRISPR-Cas system was shown to introduce double-stranded breaks into the in the Plasmodium yoelii genome (see, Zhang et al., “Efficient Editing of Malaria Parasite Genome Using the CRISPR/Cas9 System,” mBio. vol. 5, e01414-14, July-August 2014). Ghorbal et al. (“Genome editing in the human malaria parasite Plasmodium falciparum using the CRISPR-Cas9 system,” Nature Biotechnology, vol. 32, p. 819-821, doi: 10.1038/nbt.2925, published online Jun. 1, 2014) modified the sequences of two genes, orc1 and kelch13, which have putative roles in gene silencing and emerging resistance to artemisinin, respectively. Parasites that were altered at the appropriate sites were recovered with very high efficiency, despite there being no direct selection for the modification, indicating that neutral or even deleterious mutations can be generated using this system. CRISPR-Cas is also used to modify the genomes of other pathogenic parasites, including Toxoplasma gondii (see Shen et al., “Efficient gene disruption in diverse strains of Toxoplasma gondii using CRISPR/CAS9,” mBio vol. 5:e01114-14, 2014; and Sidik et al., “Efficient Genome Engineering of Toxoplasma gondii Using CRISPR/Cas9,” PLoS One vol. 9, e100450, doi: 10.1371/journal.pone.0100450, published online Jun. 27, 2014).

[0548] Vyas et al. (“A Candida albicans CRISPR system permits genetic engineering of essential genes and gene families,” Science Advances, vol. 1, e1500248, DOI: 10.1126/sciadv.1500248, Apr. 3, 2015) employed a CRISPR system to overcome long-standing obstacles to genetic engineering in C. albicans and efficiently mutate in a single experiment both copies of several different genes. In an organism where several mechanisms contribute to drug resistance, Vyas produced homozygous double mutants that no longer displayed the hyper-resistance to fluconazole or cycloheximide displayed by the parental clinical isolate Can90. Vyas also obtained homozygous loss-of-function mutations in essential genes of C. albicans by creating conditional alleles. Null alleles of DCR1, which is required for ribosomal RNA processing, are lethal at low temperature but viable at high temperature. Vyas used a repair template that introduced a nonsense mutation and isolated dcr1/dcr1 mutants that failed to grow at 16° C.

[0549] The CRISPR system of the present invention for use in P. falciparum by disrupting chromosomal loci. Ghorbal et al. (“Genome editing in the human malaria parasite Plasmodium falciparum using the CRISPR-Cas9 system”, Nature Biotechnology, 32, 819-821 (2014), DOI: 10.1038/nbt.2925, Jun. 1, 2014) employed a CRISPR system to introduce specific gene knockouts and single-nucleotide substitutions in the malaria genome. To adapt the CRISPR-Cas system to P. falciparum, Ghorbal et al. generated expression vectors for under the control of plasmodial regulatory elements in the pUF1-Cas episome that also carries the drug-selectable marker ydhodh, which gives resistance to DSM1, a P. falciparum dihydroorotate dehydrogenase (PfDHODH) inhibitor and for transcription of the sgRNA, used P. falciparum U6 small nuclear (sn)RNA regulatory elements placing the guide RNA and the donor DNA template for homologous recombination repair on the same plasmid, pL7. See also, Zhang C. et al. (“Efficient editing of malaria parasite genome using the CRISPR/Cas9 system”, MBio, 2014 Jul 1; 5(4):E01414-14, doi: 10.1128/MbIO.01414-14) and Wagner et al. (“Efficient CRISPR-Cas9-mediated genome editing in Plasmodium falciparum, Nature Methods 11, 915-918 (2014), DOI: 10.1038/nmeth.3063).

[0550] Treating pathogens, like viral pathogens such as HIV

[0551] Cas-mediated genome editing might be used to introduce protective mutations in somatic tissues to combat nongenetic or complex diseases. For example, NHEJ-mediated inactivation of the CCR5 receptor in lymphocytes (Lombardo et al., Nat Biotechnol. 2007 November; 25(11):1298-306) may be a viable strategy for circumventing HIV infection, whereas deletion of PCSK9 (Cohen et al., Nat Genet. 2005 February; 37(2):161-5) orangiopoietin (Musunuru et al., N Engl J Med. 2010 Dec 2; 363(23):2220-7) may provide therapeutic effects against statin-resistant hypercholesterolemia or hyperlipidemia. Although these targets may be also addressed using siRNA-mediated protein knockdown, a unique advantage of NHEJ-mediated gene inactivation is the ability to achieve permanent therapeutic benefit without the need for continuing treatment. As with all gene therapies, it will of course be important to establish that each proposed therapeutic use has a favorable benefit-risk ratio.

[0552] Hydrodynamic delivery of plasmid DNA encoding Cas and guide RNA along with a repair template into the liver of an adult mouse model of tyrosinemia was shown to be able to correct the mutant Fah gene and rescue expression of the wild-type Fah protein in 1 out of 250 cells (Nat Biotechnol. 2014 June; 32(6):551-3). In addition, clinical trials successfully used ZF nucleases to combat HIV infection by ex vivo knockout of the CCR5 receptor. In all patients, HIV DNA levels decreased, and in one out of four patients, HIV RNA became undetectable (Tebas et al., N Engl J Med. 2014 Mar. 6; 370(10):901-10). Both of these results demonstrate the promise of programmable nucleases as a new therapeutic platform.

[0553] In another embodiment, self-inactivating lentiviral vectors with an siRNA targeting a common exon shared by HIV tat/rev, a nucleolar-localizing TAR decoy, and an anti-CCR5-specific hammerhead ribozyme (see, e.g., DiGiusto et al. (2010) Sci Transl Med 2:36ra43) may be used/and or adapted to the CRISPR-Cas system of the present invention. A minimum of 2.5×106 CD34+ cells per kilogram patient weight may be collected and prestimulated for 16 to 20 hours in X-VIVO 15 medium (Lonza) containing 2 μmol/L-glutamine, stem cell factor (100 ng/ml), Flt-3 ligand (Flt-3L) (100 ng/ml), and thrombopoietin (10 ng/ml) (CellGenix) at a density of 2×106 cells/ml. Prestimulated cells may be transduced with lentiviral at a multiplicity of infection of 5 for 16 to 24 hours in 75-cm2 tissue culture flasks coated with fibronectin (25 mg/cm2) (RetroNectin, Takara Bio Inc.).

[0554] With the knowledge in the art and the teachings in this disclosure the skilled person can correct HSCs as to immunodeficiency condition such as HIV/AIDS comprising contacting an HSC with a CRISPR-Cas system that targets and knocks out CCR5. An guide RNA (and advantageously a dual guide approach, e.g., a pair of different guide RNAs; for instance, guide RNAs targeting of two clinically relevant genes, B2M and CCR5, in primary human CD4+ T cells and CD34+ hematopoietic stem and progenitor cells (HSPCs)) that targets and knocks out CCR5-and-Cas protein containing particle is contacted with HSCs. The so contacted cells can be administered; and optionally treated/expanded; cf. Cartier. See also Kiem, “Hematopoietic stem cell-based gene therapy for HIV disease,” Cell Stem Cell. Feb. 3, 2012; 10(2): 137-147; incorporated herein by reference along with the documents it cites; Mandal et al, “Efficient Ablation of Genes in Human Hematopoietic Stem and Effector Cells using CRISPR/Cas9,” Cell Stem Cell, Volume 15, Issue 5, p643-652, 6 Nov. 2014; incorporated herein by reference along with the documents it cites. Mention is also made of Ebina, “CRISPR/Cas9 system to suppress HIV-1 expression by editing HIV-1 integrated proviral DNA” SCIENTIFIC REPORTS|3:2510|DOI: 10.1038/srep02510, incorporated herein by reference along with the documents it cites, as another means for combatting HIV/AIDS using a CRISPR-Cas system.

[0555] The rationale for genome editing for HIV treatment originates from the observation that individuals homozygous for loss of function mutations in CCR5, a cellular co-receptor for the virus, are highly resistant to infection and otherwise healthy, suggesting that mimicking this mutation with genome editing could be a safe and effective therapeutic strategy [Liu, R., et al. Cell 86, 367-377 (1996)]. This idea was clinically validated when an HIV infected patient was given an allogeneic bone marrow transplant from a donor homozygous for a loss of function CCR5 mutation, resulting in undetectable levels of HIV and restoration of normal CD4 T-cell counts [Hutter, G., et al. The New England journal of medicine 360, 692-698 (2009)]. Although bone marrow transplantation is not a realistic treatment strategy for most HIV patients, due to cost and potential graft vs. host disease, HIV therapies that convert a patient's own T-cells into CCR5 are desirable.

[0556] Early studies using ZFNs and NHEJ to knockout CCR5 in humanized mouse models of HIV showed that transplantation of CCR5 edited CD4 T cells improved viral load and CD4 T-cell counts [Perez, E. E., et al. Nature biotechnology 26, 808-816 (2008)]. Importantly, these models also showed that HIV infection resulted in selection for CCR5 null cells, suggesting that editing confers a fitness advantage and potentially allowing a small number of edited cells to create a therapeutic effect.

[0557] As a result of this and other promising preclinical studies, genome editing therapy that knocks out CCR5 in patient T cells has now been tested in humans [Holt, N., et al. Nature biotechnology 28, 839-847 (2010); Li, L., et al. Molecular therapy: the journal of the American Society of Gene Therapy 21, 1259-1269 (2013)]. In a recent phase I clinical trial, CD4+ T cells from patients with HIV were removed, edited with ZFNs designed to knockout the CCR5 gene, and autologously transplanted back into patients [Tebas, P., et al. The New England journal of medicine 370, 901-910 (2014)].

[0558] In another study (Mandal et al., Cell Stem Cell, Volume 15, Issue 5, p643-652, 6 Nov. 2014), CRISPR-Cas9 has targeted two clinically relevant genes, B2M and CCR5, in human CD4+ T cells and CD34+ hematopoietic stem and progenitor cells (HSPCs). Use of single RNA guides led to highly efficient mutagenesis in HSPCs but not in T cells. A dual guide approach improved gene deletion efficacy in both cell types. HSPCs that had undergone genome editing with CRISPR-Cas retained multilineage potential. Predicted on- and off-target mutations were examined via target capture sequencing in HSPCs and low levels of off-target mutagenesis were observed at only one site. These results demonstrate that CRISPR-Cas9 can efficiently ablate genes in HSPCs with minimal off-target mutagenesis, which have broad applicability for hematopoietic cell-based therapy.

[0559] Wang et al. (PLoS One. 2014 Dec 26; 9(12):e115987. doi: 10.1371/journal.pone.0115987) silenced CCR5 via CRISPR associated protein 9 (Cas9) and single guided RNAs (guide RNAs) with lentiviral vectors expressing Cas9 and CCR5 guide RNAs. Wang et al. showed that a single round transduction of lentiviral vectors expressing Cas9 and CCR5 guide RNAs into HIV-1 susceptible human CD4+ cells yields high frequencies of CCR5 gene disruption. CCR5 gene-disrupted cells are not only resistant to R5-tropic HIV-1, including transmitted/founder (T/F) HIV-1 isolates, but also have selective advantage over CCR5 gene-undisrupted cells during R5-tropic HIV-1 infection. Genome mutations at potential off-target sites that are highly homologous to these CCR5 guide RNAs in stably transduced cells even at 84 days post transduction were not detected by a T7 endonuclease I assay.

[0560] Fine et al. (Sci Rep. 2015 Jul. 1; 5:10777. doi: 10.1038/srep10777) identified a two-cassette system expressing pieces of the S. pyogenes Cas9 (SpCas9) protein which splice together in cellula to form a functional protein capable of site-specific DNA cleavage. With specific CRISPR guide strands, Fine et al. demonstrated the efficacy of this system in cleaving the HBB and CCR5 genes in human HEK-293T cells as a single Cas9 and as a pair of Cas9 nickases. The trans-spliced SpCas9 (tsSpCas9) displayed ˜35% of the nuclease activity compared with the wild-type SpCas9 (wtSpCas9) at standard transfection doses, but had substantially decreased activity at lower dosing levels. The greatly reduced open reading frame length of the tsSpCas9 relative to wtSpCas9 potentially allows for more complex and longer genetic elements to be packaged into an AAV vector including tissue-specific promoters, multiplexed guide RNA expression, and effector domain fusions to SpCas9.

[0561] Li et al. (J Gen Virol. 2015 August; 96(8):2381-93. doi: 10.1099/vir.0.000139. Epub 2015 Apr. 8) demonstrated that CRISPR-Cas can efficiently mediate the editing of the CCR5 locus in cell lines, resulting in the knockout of CCR5 expression on the cell surface. Next-generation sequencing revealed that various mutations were introduced around the predicted cleavage site of CCR5. For each of the three most effective guide RNAs that were analyzed, no significant off-target effects were detected at the 15 top-scoring potential sites. By constructing chimeric Ad5F35 adenoviruses carrying CRISPR-Cas components, Li et al. efficiently transduced primary CD4+ T-lymphocytes and disrupted CCR5 expression, and the positively transduced cells were conferred with HIV-1 resistance.

[0562] One of skill in the art may utilize the above studies of, for example, Holt, N., et al. Nature biotechnology 28, 839-847 (2010), Li, L., et al. Molecular therapy: the journal of the American Society of Gene Therapy 21, 1259-1269 (2013), Mandal et al., Cell Stem Cell, Volume 15, Issue 5, p643-652, 6 Nov. 2014, Wang et al. (PLoS One. 2014 Dec 26; 9(12):e115987. doi: 10.1371/journal.pone.0115987), Fine et al. (Sci Rep. 2015 Jul. 1; 5:10777. doi: 10.1038/srep10777) and Li et al. (J Gen Virol. 2015 August; 96(8):2381-93. doi: 10.1099/vir.0.000139. Epub 2015 Apr 8) for targeting CCR5 with the CRISPR Cas system of the present invention.

[0563] Treating pathogens, like viral pathogens, such as HBV

[0564] The present invention may also be applied to treat hepatitis B virus (HBV). However, the CRISPR Cas system must be adapted to avoid the shortcomings of RNAi, such as the risk of oversatring endogenous small RNA pathways, by for example, optimizing dose and sequence (see, e.g., Grimm et al., Nature vol. 441, 26 May 2006). For example, low doses, such as about 1-10×1014 particles per human are contemplated. In another embodiment, the CRISPR Cas system directed against HBV may be administered in liposomes, such as a stable nucleic-acid-lipid particle (SNALP) (see, e.g., Morrissey et al., Nature Biotechnology, Vol. 23, No. 8, August 2005). Daily intravenous injections of about 1, 3 or 5 mg/kg/day of CRISPR Cas targeted to HBV RNA in a SNALP are contemplated. The daily treatment may be over about three days and then weekly for about five weeks. In another embodiment, the system of Chen et al. (Gene Therapy (2007) 14, 11-19) may be used/and or adapted for the CRISPR Cas system of the present invention. Chen et al. use a double-stranded adeno-associated virus 8-pseudotyped vector (dsAAV2/8) to deliver shRNA. A single administration of dsAAV2/8 vector (1×1012 vector genomes per mouse), carrying HBV-specific shRNA, effectively suppressed the steady level of HBV protein, mRNA and replicative DNA in liver of HBV transgenic mice, leading to up to 2-3 log 10 decrease in HBV load in the circulation. Significant HBV suppression sustained for at least 120 days after vector administration. The therapeutic effect of shRNA was target sequence dependent and did not involve activation of interferon. For the present invention, a CRISPR Cas system directed to HBV may be cloned into an AAV vector, such as a dsAAV2/8 vector and administered to a human, for example, at a dosage of about 1×1015 vector genomes to about 1×1016 vector genomes per human. In another embodiment, the method of Wooddell et al. (Molecular Therapy vol. 21 no. 5, 973-985 May 2013) may be used/and or adapted to the CRISPR Cas system of the present invention. Woodell et al. show that simple coinjection of a hepatocyte-targeted, N-acetylgalactosamine-conjugated melittin-like peptide (NAG-MLP) with a liver-tropic cholesterol-conjugated siRNA (chol-siRNA) targeting coagulation factor VII (F7) results in efficient F7 knockdown in mice and nonhuman primates without changes in clinical chemistry or induction of cytokines. Using transient and transgenic mouse models of HBV infection, Wooddell et al. show that a single coinjection of NAG-MLP with potent chol-siRNAs targeting conserved HBV sequences resulted in multilog repression of viral RNA, proteins, and viral DNA with long duration of effect. Intraveinous coinjections, for example, of about 6 mg/kg of NAG-MLP and 6 mg/kg of HBV specific CRISPR Cas may be envisioned for the present invention. In the alternative, about 3 mg/kg of NAG-MLP and 3 mg/kg of HBV specific CRISPR Cas may be delivered on day one, followed by administration of about 2-3 mg/kg of NAG-MLP and 2-3 mg/kg of HBV specific CRISPR Cas two weeks later.

[0565] In some embodiments, the target sequence is an HBV sequence. In some embodiments, the target sequences is comprised in an episomal viral nucleic acid molecule which is not integrated into the genome of the organism to thereby manipulate the episomal viral nucleic acid molecule. In some embodiments, the episomal nucleic acid molecule is a double-stranded DNA polynucleotide molecule or is a covalently closed circular DNA (cccDNA). In some embodiments, the CRISPR complex is capable of reducing the amount of episomal viral nucleic acid molecule in a cell of the organism compared to the amount of episomal viral nucleic acid molecule in a cell of the organism in the absence of providing the complex, or is capable of manipulating the episomal viral nucleic acid molecule to promote degradation of the episomal nucleic acid molecule. In some embodiments, the target HBV sequence is integrated into the genome of the organism. In some embodiments, when formed within the cell, the CRISPR complex is capable of manipulating the integrated nucleic acid to promote excision of all or part of the target HBV nucleic acid from the genome of the organism. In some embodiments, said at least one target HBV nucleic acid is comprised in a double-stranded DNA polynucleotide cccDNA molecule and/or viral DNA integrated into the genome of the organism and wherein the CRISPR complex manipulates at least one target HBV nucleic acid to cleave viral cccDNA and/or integrated viral DNA. In some embodiments, said cleavage comprises one or more double-strand break(s) introduced into the viral cccDNA and/or integrated viral DNA, optionally at least two double-strand break(s). In some embodiments, said cleavage is via one or more single-strand break(s) introduced into the viral cccDNA and/or integrated viral DNA, optionally at least two single-strand break(s). In some embodiments, said one or more double-strand break(s) or said one or more single-strand break(s) leads to the formation of one or more insertion or deletion mutations (INDELs) in the viral cccDNA sequences and/or integrated viral DNA sequences.

[0566] Lin et al. (Mol Ther Nucleic Acids. 2014 Aug. 19; 3:e186. doi: 10.1038/mtna.2014.38) designed eight gRNAs against HBV of genotype A. With the HBV-specific gRNAs, the CRISPR-Cas system significantly reduced the production of HBV core and surface proteins in Huh-7 cells transfected with an HBV-expression vector. Among eight screened gRNAs, two effective ones were identified. One gRNA targeting the conserved HBV sequence acted against different genotypes. Using a hydrodynamics-HBV persistence mouse model, Lin et al. further demonstrated that this system could cleave the intrahepatic HBV genome-containing plasmid and facilitate its clearance in vivo, resulting in reduction of serum surface antigen levels. These data suggest that the CRISPR-Cas system could disrupt the HBV-expressing templates both in vitro and in vivo, indicating its potential in eradicating persistent HBV infection.

[0567] Dong et al. (Antiviral Res. 2015 June; 118:110-7. doi: 10.1016/j.antiviral1.2015.03.015. Epub 2015 Apr 3) used the CRISPR-Cas system to target the HBV genome and efficiently inhibit HBV infection. Dong et al. synthesized four single-guide RNAs (guide RNAs) targeting the conserved regions of HBV. The expression of these guide RNAS with Cas reduced the viral production in Huh7 cells as well as in HBV-replication cell HepG2.2.15. Dong et al. further demonstrated that CRISPR-Cas direct cleavage and cleavage-mediated mutagenesis occurred in HBV cccDNA of transfected cells. In the mouse model carrying HBV cccDNA, injection of guide RNA-Cas plasmids via rapid tail vein resulted in the low level of cccDNA and HBV protein.

[0568] Liu et al. (J Gen Virol. 2015 August; 96(8):2252-61. doi: 10.1099/vir.0.000159. Epub 2015 Apr 22) designed eight guide RNAs (gRNAs) that targeted the conserved regions of different HBV genotypes, which could significantly inhibit HBV replication both in vitro and in vivo to investigate the possibility of using the CRISPR-Cas system to disrupt the HBV DNA templates. The HBV-specific gRNA/Cas system could inhibit the replication of HBV of different genotypes in cells, and the viral DNA was significantly reduced by a single gRNA/Cas system and cleared by a combination of different gRNA/Cas systems.

[0569] Wang et al. (World J Gastroenterol. 2015 Aug. 28; 21(32):9554-65. doi: 10.3748/wjg.v21.i32.9554) designed 15 gRNAs against HBV of genotypes A-D. Eleven combinations of two above gRNAs (dual-gRNAs) covering the regulatory region of HBV were chosen. The efficiency of each gRNA and 11 dual-gRNAs on the suppression of HBV (genotypes A-D) replication was examined by the measurement of HBV surface antigen (HBsAg) or e antigen (HBeAg) in the culture supernatant. The destruction of HBV-expressing vector was examined in HuH7 cells co-transfected with dual-gRNAs and HBV-expressing vector using polymerase chain reaction (PCR) and sequencing method, and the destruction of cccDNA was examined in HepAD38 cells using KCl precipitation, plasmid-safe ATP-dependent DNase (PSAD) digestion, rolling circle amplification and quantitative PCR combined method. The cytotoxicity of these gRNAs was assessed by a mitochondrial tetrazolium assay. All of gRNAs could significantly reduce HBsAg or HBeAg production in the culture supernatant, which was dependent on the region in which gRNA against. All of dual gRNAs could efficiently suppress HBsAg and/or HBeAg production for HBV of genotypes A-D, and the efficacy of dual gRNAs in suppressing HBsAg and/or HBeAg production was significantly increased when compared to the single gRNA used alone. Furthermore, by PCR direct sequencing we confirmed that these dual gRNAs could specifically destroy HBV expressing template by removing the fragment between the cleavage sites of the two used gRNAs. Most importantly, gRNA-5 and gRNA-12 combination not only could efficiently suppress HBsAg and/or HBeAg production, but also destroy the cccDNA reservoirs in HepAD38 cells.

[0570] Karimova et al. (Sci Rep. 2015 Sep. 3; 5:13734. doi: 10.1038/srep13734) identified cross-genotype conserved HBV sequences in the S and X region of the HBV genome that were targeted for specific and effective cleavage by a Cas nickase. This approach disrupted not only episomal cccDNA and chromosomally integrated HBV target sites in reporter cell lines, but also HBV replication in chronically and de novo infected hepatoma cell lines.

[0571] One of skill in the art may utilize the above studies of, for example, Lin et al. (Mol Ther Nucleic Acids. 2014 Aug. 19; 3:e186. doi: 10.1038/mtna.2014.38), Dong et al. (Antiviral Res. 2015 June; 118:110-7. doi: 10.1016/j.antiviral.2015.03.015. Epub 2015 Apr 3), Liu et al. (J Gen Virol. 2015 August; 96(8):2252-61. doi: 10.1099/vir.0.000159. Epub 2015 Apr 22), Wang et al. (World J Gastroenterol. 2015 Aug. 28; 21(32):9554-65. doi: 10.3748/wjg.v21.i32.9554) and Karimova et al. (Sci Rep. 2015 Sep. 3; 5:13734. doi: 10.1038/srep13734) for targeting HBV with the CRISPR Cas system of the present invention.

[0572] Chronic hepatitis B virus (HBV) infection is prevalent, deadly, and seldom cured due to the persistence of viral episomal DNA (cccDNA) in infected cells. Ramanan et al. (Ramanan V, Shlomai A, Cox D B, Schwartz R E, Michailidis E, Bhatta A, Scott D A, Zhang F, Rice C M, Bhatia S N, Sci Rep. 2015 Jun. 2; 5:10833. doi: 10.1038/srep10833, published online 2 Jun. 2015.) showed that the CRISPR/Cas system can specifically target and cleave conserved regions in the HBV genome, resulting in robust suppression of viral gene expression and replication. Upon sustained expression of Cas and appropriately chosen guide RNAs, they demonstrated cleavage of cccDNA by Cas and a dramatic reduction in both cccDNA and other parameters of viral gene expression and replication. Thus, they showed that directly targeting viral episomal DNA is a novel therapeutic approach to control the virus and possibly cure patients. This is also described in WO2015089465 A1, in the name of The Broad Institute et al., the contents of which are hereby incorporated by reference

[0573] As such targeting viral episomal DNA in HBV is preferred in some embodiments.

[0574] The present invention may also be applied to treat pathogens, e.g. bacterial, fungal and parasitic pathogens. Most research efforts have focused on developing new antibiotics, which once developed, would nevertheless be subject to the same problems of drug resistance. The invention provides novel CRISPR-based alternatives which overcome those difficulties. Furthermore, unlike existing antibiotics, CRISPR-based treatments can be made pathogen specific, inducing bacterial cell death of a target pathogen while avoiding beneficial bacteria.

[0575] The present invention may also be applied to treat hepatitis C virus (HCV). The methods of Roelvinki et al. (Molecular Therapy vol. 20 no. 9, 1737-1749 Sep. 2012) may be applied to the CRISPR Cas system. For example, an AAV vector such as AAV8 may be a contemplated vector and for example a dosage of about 1.25×1011 to 1.25×1013 vector genomes per kilogram body weight (vg/kg) may be contemplated. The present invention may also be applied to treat pathogens, e.g. bacterial, fungal and parasitic pathogens. Most research efforts have focused on developing new antibiotics, which once developed, would nevertheless be subject to the same problems of drug resistance. The invention provides novel CRISPR-based alternatives which overcome those difficulties. Furthermore, unlike existing antibiotics, CRISPR-based treatments can be made pathogen specific, inducing bacterial cell death of a target pathogen while avoiding beneficial bacteria.

[0576] Jiang et al. (“RNA-guided editing of bacterial genomes using CRISPR-Cas systems,” Nature Biotechnology vol. 31, p. 233-9, March 2013) used a CRISPR-Cas system to mutate or kill S. pneumoniae and E. coli. The work, which introduced precise mutations into the genomes, relied on dual-RNA:Cas-directed cleavage at the targeted genomic site to kill unmutated cells and circumvented the need for selectable markers or counter-selection systems. CRISPR systems have be used to reverse antibiotic resistance and eliminate the transfer of resistance between strains. Bickard et al. showed that Cas, reprogrammed to target virulence genes, kills virulent, but not avirulent, S. aureus. Reprogramming the nuclease to target antibiotic resistance genes destroyed staphylococcal plasmids that harbor antibiotic resistance genes and immunized against the spread of plasmid-borne resistance genes. (see, Bikard et al., “Exploiting CRISPR-Cas nucleases to produce sequence-specific antimicrobials,” Nature Biotechnology vol. 32, 1146-1150, doi:10.1038/nbt.3043, published online 5 Oct. 2014.) Bikard showed that CRISPR-Cas antimicrobials function in vivo to kill S. aureus in a mouse skin colonization model. Similarly, Yosef et al used a CRISPR system to target genes encoding enzymes that confer resistance to β-lactam antibiotics (see Yousef et al., “Temperate and lytic bacteriophages programmed to sensitize and kill antibiotic-resistant bacteria,” Proc. Natl. Acad. Sci. USA, vol. 112, p. 7267-7272, doi: 10.1073/pnas.1500107112 published online May 18, 2015).

[0577] CRISPR systems can be used to edit genomes of parasites that are resistant to other genetic approaches. For example, a CRISPR-Cas system was shown to introduce double-stranded breaks into the in the Plasmodium yoelii genome (see, Zhang et al., “Efficient Editing of Malaria Parasite Genome Using the CRISPR/Cas System,” mBio. vol. 5, e01414-14, July-August 2014). Ghorbal et al. (“Genome editing in the human malaria parasite Plasmodium falciparum using the CRISPR-Cas system,” Nature Biotechnology, vol. 32, p. 819-821, doi: 10.1038/nbt.2925, published online Jun. 1, 2014) modified the sequences of two genes, orc1 and kelch13, which have putative roles in gene silencing and emerging resistance to artemisinin, respectively. Parasites that were altered at the appropriate sites were recovered with very high efficiency, despite there being no direct selection for the modification, indicating that neutral or even deleterious mutations can be generated using this system. CRISPR-Cas is also used to modify the genomes of other pathogenic parasites, including Toxoplasma gondii (see Shen et al., “Efficient gene disruption in diverse strains of Toxoplasma gondii using CRISPR/CAS9,” mBio vol. 5:e01114-14, 2014; and Sidik et al., “Efficient Genome Engineering of Toxoplasma gondii Using CRISPR/Cas,” PLoS One vol. 9, e100450, doi: 10.1371/journal.pone.0100450, published online Jun. 27, 2014).

[0578] Vyas et al. (“A Candida albicans CRISPR system permits genetic engineering of essential genes and gene families,” Science Advances, vol. 1, e1500248, DOI: 10.1126/sciadv.1500248, Apr. 3, 2015) employed a CRISPR system to overcome long-standing obstacles to genetic engineering in C. albicans and efficiently mutate in a single experiment both copies of several different genes. In an organism where several mechanisms contribute to drug resistance, Vyas produced homozygous double mutants that no longer displayed the hyper-resistance to fluconazole or cycloheximide displayed by the parental clinical isolate Can90. Vyas also obtained homozygous loss-of-function mutations in essential genes of C. albicans by creating conditional alleles. Null alleles of DCR1, which is required for ribosomal RNA processing, are lethal at low temperature but viable at high temperature. Vyas used a repair template that introduced a nonsense mutation and isolated dcr1/dcr1 mutants that failed to grow at 16° C.

[0579] Treating Diseases with Genetic or Epigenetic Aspects

[0580] The CRISPR-Cas systems of the present invention can be used to correct genetic mutations that were previously attempted with limited success using TALEN and ZFN and have been identified as potential targets for Cas systems, including as in published applications of Editas Medicine describing methods to use Cas systems to target loci to therapeutically address diseases with gene therapy, including, WO 2015/048577 CRISPR-RELATED METHODS AND COMPOSITIONS of Gluckmann et al.; WO 2015/070083 CRISPR-RELATED METHODS AND COMPOSITIONS WITH GOVERNING gRNAS of Glucksmann et al.; In some embodiments, the treatment, prophylaxis or diagnosis of Primary Open Angle Glaucoma (POAG) is provided. The target is preferably the MYOC gene. This is described in WO2015153780, the disclosure of which is hereby incorporated by reference.

[0581] Mention is made of WO2015/134812 CRISPR/CAS-RELATED METHODS AND COMPOSITIONS FOR TREATING USHER SYNDROME AND RETINITIS PIGMENTOSA of Maeder et al. Through the teachings herein the invention comprehends methods and materials of these documents applied in conjunction with the teachings herein. In an aspect of ocular and auditory gene therapy, methods and compositions for treating Usher Syndrome and Retinis-Pigmentosa may be adapted to the CRISPR-Cas system of the present invention (see, e.g., WO 2015/134812). In an embodiment, the WO 2015/134812 involves a treatment or delaying the onset or progression of Usher Syndrome type IIA (USH2A, USH11A) and retinitis pigmentosa 39 (RP39) by gene editing, e.g., using CRISPR-Cas mediated methods to correct the guanine deletion at position 2299 in the USH2A gene (e.g., replace the deleted guanine residue at position 2299 in the USH2A gene). In a related aspect, a mutation is targeted by cleaving with either one or more nuclease, one or more nickase, or a combination thereof, e.g., to induce HDR with a donor template that corrects the point mutation (e.g., the single nucleotide, e.g., guanine, deletion). The alteration or correction of the mutant USH2A gene can be mediated by any mechanism. Exemplary mechanisms that can be associated with the alteration (e.g., correction) of the mutant HSH2A gene include, but are not limited to, non-homologous end joining, microhomology-mediated end joining (MMEJ), homology-directed repair (e.g., endogenous donor template mediated), SDSA (synthesis dependent strand annealing), single-strand annealing or single strand invasion. In an embodiment, the method used for treating Usher Syndrome and Retinis-Pigmentosa can include acquiring knowledge of the mutation carried by the subject, e.g., by sequencing the appropriate portion of the USH2A gene.

[0582] Accordingly, in some embodiments, the treatment, prophylaxis or diagnosis of Retinitis Pigmentosa is provided. A number of different genes are known to be associated with or result in Retinitis Pigmentosa, such as RP1, RP2 and so forth. These genes are targeted in some embodiments and either knocked out or repaired through provision of suitable a template. In some embodiments, delivery is to the eye by injection.

[0583] One or more Retinitis Pigmentosa genes can, in some embodiments, be selected from: RP1 (Retinitis pigmentosa-1), RP2 (Retinitis pigmentosa-2), RPGR (Retinitis pigmentosa-3), PRPH2 (Retinitis pigmentosa-7), RP9 (Retinitis pigmentosa-9), IMPDH1 (Retinitis pigmentosa-10), PRPF31 (Retinitis pigmentosa-11), CRB1 (Retinitis pigmentosa-12, autosomal recessive), PRPF8 (Retinitis pigmentosa-13), TULP1 (Retinitis pigmentosa-14), CA4 (Retinitis pigmentosa-17), HPRPF3 (Retinitis pigmentosa-18), ABCA4 (Retinitis pigmentosa-19), EYS (Retinitis pigmentosa-25), CERKL (Retinitis pigmentosa-26), FSCN2 (Retinitis pigmentosa-30), TOPORS (Retinitis pigmentosa-31), SNRNP200 (Retinitis pigmentosa 33), SEMA4A (Retinitis pigmentosa-35), PRCD (Retinitis pigmentosa-36), NR2E3 (Retinitis pigmentosa-37), MERTK (Retinitis pigmentosa-38), USH2A (Retinitis pigmentosa-39), PROM1 (Retinitis pigmentosa-41), KLHL7 (Retinitis pigmentosa-42), CNGB1 (Retinitis pigmentosa-45), BEST1 (Retinitis pigmentosa-50), TTC8 (Retinitis pigmentosa 51), C2orf71 (Retinitis pigmentosa 54), ARL6 (Retinitis pigmentosa 55), ZNF513 (Retinitis pigmentosa 58), DHDDS (Retinitis pigmentosa 59), BEST1 (Retinitis pigmentosa, concentric), PRPH2 (Retinitis pigmentosa, digenic), LRAT (Retinitis pigmentosa, juvenile), SPATA7 (Retinitis pigmentosa, juvenile, autosomal recessive), CRX (Retinitis pigmentosa, late-onset dominant), and/or RPGR (Retinitis pigmentosa, X-linked, and sinorespiratory infections, with or without deafness).

[0584] In some embodiments, the Retinitis Pigmentosa gene is MERTK (Retinitis pigmentosa-38) or USH2A (Retinitis pigmentosa-39).

[0585] Mention is also made of WO 2015/138510 and through the teachings herein the invention (using a CRISPR-Cas system) comprehends providing a treatment or delaying the onset or progression of Leber's Congenital Amaurosis 10 (LCA 10). LCA 10 is caused by a mutation in the CEP290 gene, e.g., a c.2991+1655, adenine to guanine mutation in the CEP290 gene which gives rise to a cryptic splice site in intron 26. This is a mutation at nucleotide 1655 of intron 26 of CEP290, e.g., an A to G mutation. CEP290 is also known as: CT87; MKS4; POC3; rd16; BBS14; JBTSS; LCAJO; NPHP6; SLSN6; and 3H11Ag (see, e.g., WO 2015/138510). In an aspect of gene therapy, the invention involves introducing one or more breaks near the site of the LCA target position (e.g., c.2991+1655; A to G) in at least one allele of the CEP290 gene. Altering the LCA10 target position refers to (1) break-induced introduction of an indel (also referred to herein as NHEJ-mediated introduction of an indel) in close proximity to or including a LCA10 target position (e.g., c.2991+1655A to G), or (2) break-induced deletion (also referred to herein as NHEJ-mediated deletion) of genomic sequence including the mutation at a LCA10 target position (e.g., c.2991+1655A to G). Both approaches give rise to the loss or destruction of the cryptic splice site resulting from the mutation at the LCA 10 target position. Accordingly, the use of Cas in the treatment of LCA is specifically envisaged.

[0586] Treating Diseases of the Circulatory System

[0587] The present invention also contemplates delivering the CRISPR-Cas system, specifically the novel CRISPR effector protein systems described herein, to the blood or hematopoetic stem cells. The plasma exosomes of Wahlgren et al. (Nucleic Acids Research, 2012, Vol. 40, No. 17 e130) were previously described and may be utilized to deliver the CRISPR Cas system to the blood. The nucleic acid-targeting system of the present invention is also contemplated to treat hemoglobinopathies, such as thalassemias and sickle cell disease. See, e.g., International Patent Publication No. WO 2013/126794 for potential targets that may be targeted by the CRISPR Cas system of the present invention.

[0588] Drakopoulou, “Review Article, The Ongoing Challenge of Hematopoietic Stem Cell-Based Gene Therapy for β-Thalassemia,” Stem Cells International, Volume 2011, Article ID 987980, 10 pages, doi:10.4061/2011/987980, incorporated herein by reference along with the documents it cites, as if set out in full, discuss modifying HSCs using a lentivirus that delivers a gene for β-globin or y-globin. In contrast to using lentivirus, with the knowledge in the art and the teachings in this disclosure, the skilled person can correct HSCs as to β-Thalassemia using a CRISPR-Cas system that targets and corrects the mutation (e.g., with a suitable HDR template that delivers a coding sequence for β-globin or γ-globin, advantageously non-sickling β-globin or γ-globin); specifically, the guide RNA can target mutation that give rise to β-Thalassemia, and the HDR can provide coding for proper expression of β-globin or y-globin. An guide RNA that targets the mutation-and-Cas protein containing particle is contacted with HSCs carrying the mutation. The particle also can contain a suitable HDR template to correct the mutation for proper expression of β-globin or y-globin; or the HSC can be contacted with a second particle or a vector that contains or delivers the HDR template. The so contacted cells can be administered; and optionally treated/expanded; cf. Cartier. In this regard mention is made of: Cavazzana, “Outcomes of Gene Therapy for β-Thalassemia Major via Transplantation of Autologous Hematopoietic Stem Cells Transduced Ex Vivo with a Lentiviral (3A-T87Q-Globin Vector.” Cavazzana-Calvo, “Transfusion independence and HMGA2 activation after gene therapy of human β-thalassemia”, Nature 467, 318-322 (16 Sep. 2010) doi:10.1038/nature09328; Nienhuis, “Development of Gene Therapy for Thalassemia, Cold Spring Harbor Perspectives in Medicine, doi: 10.1101/cshperspect.a011833 (2012), LentiGlobin BB305, a lentiviral vector containing an engineered β-globin gene (βA-T87Q); and Xie et al., “Seamless gene correction of β-thalassaemia mutations in patient-specific iPSCs using CRISPR/Cas9 and piggyback” Genome Research gr.173427.114 (2014) www.genome.org/cgi/doi/10.1101/gr.173427.114 (Cold Spring Harbor Laboratory Press); that is the subject of Cavazzana work involving human β-thalassaemia and the subject of the Xie work, are all incorporated herein by reference, together with all documents cited therein or associated therewith. In the instant invention, the HDR template can provide for the HSC to express an engineered β-globin gene (e.g., βA-T87Q), or β-globin as in Xie.

[0589] Xu et al. (Sci Rep. 2015 Jul. 9; 5:12065. doi: 10.1038/srep12065) have designed TALENs and CRISPR-Cas to directly target the intron2 mutation site IVS2-654 in the globin gene. Xu et al. observed different frequencies of double-strand breaks (DSBs) at IVS2-654 loci using TALENs and CRISPR-Cas, and TALENs mediated a higher homologous gene targeting efficiency compared to CRISPR-Cas when combined with the piggyBac transposon donor. In addition, more obvious off-target events were observed for CRISPR-Cas compared to TALENs. Finally, TALENs-corrected iPSC clones were selected for erythroblast differentiation using the OP9 co-culture system and detected relatively higher transcription of HBB than the uncorrected cells.

[0590] Song et al. (Stem Cells Dev. 2015 May 1; 24(9):1053-65. doi: 10.1089/scd.2014.0347. Epub 2015 Feb. 5) used CRISPR/Cas to correct β-Thal iPSCs; gene-corrected cells exhibit normal karyotypes and full pluripotency as human embryonic stem cells (hESCs) showed no off-targeting effects. Then, Song et al. evaluated the differentiation efficiency of the gene-corrected β-Thal iPSCs. Song et al. found that during hematopoietic differentiation, gene-corrected β-Thal iPSCs showed an increased embryoid body ratio and various hematopoietic progenitor cell percentages. More importantly, the gene-corrected β-Thal iPSC lines restored HBB expression and reduced reactive oxygen species production compared with the uncorrected group. Song et al.'s study suggested that hematopoietic differentiation efficiency of β-Thal iPSCs was greatly improved once corrected by the CRISPR-Cas system. Similar methods may be performed utilizing the CRISPR-Cas systems described herein. Sickle cell anemia is an autosomal recessive genetic disease in which red blood cells become sickle-shaped. It is caused by a single base substitution in the β-globin gene, which is located on the short arm of chromosome 11. As a result, valine is produced instead of glutamic acid causing the production of sickle hemoglobin (HbS). This results in the formation of a distorted shape of the erythrocytes. Due to this abnormal shape, small blood vessels can be blocked, causing serious damage to the bone, spleen and skin tissues. This may lead to episodes of pain, frequent infections, hand-foot syndrome or even multiple organ failure. The distorted erythrocytes are also more susceptible to hemolysis, which leads to serious anemia. As in the case of β-thalassemia, sickle cell anemia can be corrected by modifying HSCs with the CRISPR-Cas system. The system allows the specific editing of the cell's genome by cutting its DNA and then letting it repair itself. The Cas protein is inserted and directed by a RNA guide to the mutated point and then it cuts the DNA at that point. Simultaneously, a healthy version of the sequence is inserted. This sequence is used by the cell's own repair system to fix the induced cut. In this way, the CRISPR-Cas allows the correction of the mutation in the previously obtained stem cells. With the knowledge in the art and the teachings in this disclosure, the skilled person can correct HSCs as to sickle cell anemia using a CRISPR-Cas system that targets and corrects the mutation (e.g., with a suitable HDR template that delivers a coding sequence for β-globin, advantageously non-sickling β-globin); specifically, the guide RNA can target mutation that give rise to sickle cell anemia, and the HDR can provide coding for proper expression of β-globin. An guide RNA that targets the mutation-and-Cas protein containing particle is contacted with HSCs carrying the mutation. The particle also can contain a suitable HDR template to correct the mutation for proper expression of β-globin; or the HSC can be contacted with a second particle or a vector that contains or delivers the HDR template. The so contacted cells can be administered; and optionally treated/expanded; cf. Cartier. The HDR template can provide for the HSC to express an engineered β-globin gene (e.g., (3A-T87Q), or β-globin as in Xie.

[0591] Williams, “Broadening the Indications for Hematopoietic Stem Cell Genetic Therapies,” Cell Stem Cell 13:263-264 (2013), incorporated herein by reference along with the documents it cites, as if set out in full, report lentivirus-mediated gene transfer into HSC/P cells from patients with the lysosomal storage disease metachromatic leukodystrophy disease (MLD), a genetic disease caused by deficiency of arylsulfatase A (ARSA), resulting in nerve demyelination; and lentivirus-mediated gene transfer into HSCs of patients with Wiskott-Aldrich syndrome (WAS) (patients with defective WAS protein, an effector of the small GTPase CDC42 that regulates cytoskeletal function in blood cell lineages and thus suffer from immune deficiency with recurrent infections, autoimmune symptoms, and thrombocytopenia with abnormally small and dysfunctional platelets leading to excessive bleeding and an increased risk of leukemia and lymphoma). In contrast to using lentivirus, with the knowledge in the art and the teachings in this disclosure, the skilled person can correct HSCs as to MLD (deficiency of arylsulfatase A (ARSA)) using a CRISPR-Cas system that targets and corrects the mutation (deficiency of arylsulfatase A (ARSA)) (e.g., with a suitable HDR template that delivers a coding sequence for ARSA); specifically, the guide RNA can target mutation that gives rise to MLD (deficient ARSA), and the HDR can provide coding for proper expression of ARSA. An guide RNA that targets the mutation-and-Cas protein containing particle is contacted with HSCs carrying the mutation. The particle also can contain a suitable HDR template to correct the mutation for proper expression of ARSA; or the HSC can be contacted with a second particle or a vector that contains or delivers the HDR template. The so contacted cells can be administered; and optionally treated/expanded; cf. Cartier. In contrast to using lentivirus, with the knowledge in the art and the teachings in this disclosure, the skilled person can correct HSCs as to WAS using a CRISPR-Cas system that targets and corrects the mutation (deficiency of WAS protein) (e.g., with a suitable HDR template that delivers a coding sequence for WAS protein); specifically, the guide RNA can target mutation that gives rise to WAS (deficient WAS protein), and the HDR can provide coding for proper expression of WAS protein. An guide RNA that targets the mutation-and-Cas protein containing particle is contacted with HSCs carrying the mutation. The particle also can contain a suitable HDR template to correct the mutation for proper expression of WAS protein; or the HSC can be contacted with a second particle or a vector that contains or delivers the HDR template. The so contacted cells can be administered; and optionally treated/expanded; cf. Cartier.

[0592] Watts, “Hematopoietic Stem Cell Expansion and Gene Therapy” Cytotherapy 13(10):1164-1171. doi:10.3109/14653249.2011.620748 (2011), incorporated herein by reference along with the documents it cites, as if set out in full, discusses hematopoietic stem cell (HSC) gene therapy, e.g., virus-mediated HSC gene therapy, as an highly attractive treatment option for many disorders including hematologic conditions, immunodeficiencies including HIV/AIDS, and other genetic disorders like lysosomal storage diseases, including SCID-X1, ADA-SCID, β-thalassemia, X-linked CGD, Wiskott-Aldrich syndrome, Fanconi anemia, adrenoleukodystrophy (ALD), and metachromatic leukodystrophy (MLD).

[0593] US Patent Publication Nos. 20110225664, 20110091441, 20100229252, 20090271881 and 20090222937 assigned to Cellectis, relates to CREI variants, wherein at least one of the two I-CreI monomers has at least two substitutions, one in each of the two functional subdomains of the LAGLIDADG (SEQ ID NO:494) core domain situated respectively from positions 26 to 40 and 44 to 77 of I-CreI, said variant being able to cleave a DNA target sequence from the human interleukin-2 receptor gamma chain (IL2RG) gene also named common cytokine receptor gamma chain gene or gamma C gene. The target sequences identified in US Patent Publication Nos. 20110225664, 20110091441, 20100229252, 20090271881 and 20090222937 may be utilized for the nucleic acid-targeting system of the present invention.

[0594] Severe Combined Immune Deficiency (SCID) results from a defect in lymphocytes T maturation, always associated with a functional defect in lymphocytes B (Cavazzana-Calvo et al., Annu. Rev. Med., 2005, 56, 585-602; Fischer et al., Immunol. Rev., 2005, 203, 98-109). Overall incidence is estimated to 1 in 75 000 births. Patients with untreated SCID are subject to multiple opportunist micro-organism infections, and do generally not live beyond one year. SCID can be treated by allogenic hematopoietic stem cell transfer, from a familial donor. Histocompatibility with the donor can vary widely. In the case of Adenosine Deaminase (ADA) deficiency, one of the SCID forms, patients can be treated by injection of recombinant Adenosine Deaminase enzyme.

[0595] Since the ADA gene has been shown to be mutated in SCID patients (Giblett et al., Lancet, 1972, 2, 1067-1069), several other genes involved in SCID have been identified (Cavazzana-Calvo et al., Annu. Rev. Med., 2005, 56, 585-602; Fischer et al., Immunol. Rev., 2005, 203, 98-109). There are four major causes for SCID: (i) the most frequent form of SCID, SCID-X1 (X-linked SCID or X-SCID), is caused by mutation in the IL2RG gene, resulting in the absence of mature T lymphocytes and NK cells. IL2RG encodes the gamma C protein (Noguchi, et al., Cell, 1993, 73, 147-157), a common component of at least five interleukin receptor complexes. These receptors activate several targets through the JAK3 kinase (Macchi et al., Nature, 1995, 377, 65-68), which inactivation results in the same syndrome as gamma C inactivation; (ii) mutation in the ADA gene results in a defect in purine metabolism that is lethal for lymphocyte precursors, which in turn results in the quasi absence of B, T and NK cells; (iii) V(D)J recombination is an essential step in the maturation of immunoglobulins and T lymphocytes receptors (TCRs). Mutations in Recombination Activating Gene 1 and 2 (RAG1 and RAG2) and Artemis, three genes involved in this process, result in the absence of mature T and B lymphocytes; and (iv) Mutations in other genes such as CD45, involved in T cell specific signaling have also been reported, although they represent a minority of cases (Cavazzana-Calvo et al., Annu. Rev. Med., 2005, 56, 585-602; Fischer et al., Immunol. Rev., 2005, 203, 98-109). Since when their genetic bases have been identified, the different SCID forms have become a paradigm for gene therapy approaches (Fischer et al., Immunol. Rev., 2005, 203, 98-109) for two major reasons. First, as in all blood diseases, an ex vivo treatment can be envisioned. Hematopoietic Stem Cells (HSCs) can be recovered from bone marrow, and keep their pluripotent properties for a few cell divisions. Therefore, they can be treated in vitro, and then reinjected into the patient, where they repopulate the bone marrow. Second, since the maturation of lymphocytes is impaired in SCID patients, corrected cells have a selective advantage. Therefore, a small number of corrected cells can restore a functional immune system. This hypothesis was validated several times by (i) the partial restoration of immune functions associated with the reversion of mutations in SCID patients (Hirschhorn et al., Nat. Genet., 1996, 13, 290-295; Stephan et al., N. Engl. J. Med., 1996, 335, 1563-1567; Bousso et al., Proc. Natl., Acad. Sci. USA, 2000, 97, 274-278; Wada et al., Proc. Natl. Acad. Sci. USA, 2001, 98, 8697-8702; Nishikomori et al., Blood, 2004, 103, 4565-4572), (ii) the correction of SCID-X1 deficiencies in vitro in hematopoietic cells (Candotti et al., Blood, 1996, 87, 3097-3102; Cavazzana-Calvo et al., Blood, 1996, Blood, 88, 3901-3909; Taylor et al., Blood, 1996, 87, 3103-3107; Hacein-Bey et al., Blood, 1998, 92, 4090-4097), (iii) the correction of SCID-X1 (Soudais et al., Blood, 2000, 95, 3071-3077; Tsai et al., Blood, 2002, 100, 72-79), JAK-3 (Bunting et al., Nat. Med., 1998, 4, 58-64; Bunting et al., Hum. Gene Ther., 2000, 11, 2353-2364) and RAG2 (Yates et al., Blood, 2002, 100, 3942-3949) deficiencies in vivo in animal models and (iv) by the result of gene therapy clinical trials (Cavazzana-Calvo et al., Science, 2000, 288, 669-672; Aiuti et al., Nat. Med., 2002; 8, 423-425; Gaspar et al., Lancet, 2004, 364, 2181-2187).

[0596] US Patent Publication No. 20110182867 assigned to the Children's Medical Center Corporation and the President and Fellows of Harvard College relates to methods and uses of modulating fetal hemoglobin expression (HbF) in a hematopoietic progenitor cells via inhibitors of BCL11A expression or activity, such as RNAi and antibodies. The targets disclosed in US Patent Publication No. 20110182867, such as BCL11A, may be targeted by the CRISPR Cas system of the present invention for modulating fetal hemoglobin expression. See also Bauer et al. (Science 11 Oct. 2013: Vol. 342 no. 6155 pp. 253-257) and Xu et al. (Science 18 Nov. 2011: Vol. 334 no. 6058 pp. 993-996) for additional BCL11A targets.

[0597] With the knowledge in the art and the teachings in this disclosure, the skilled person can correct HSCs as to a genetic hematologic disorder, e.g., β-Thalassemia, Hemophilia, or a genetic lysosomal storage disease.

[0598] HSC—Delivery to and Editing of Hematopoietic Stem Cells; and Particular Conditions.

[0599] The term “Hematopoietic Stem Cell” or “HSC” is meant to include broadly those cells considered to be an HSC, e.g., blood cells that give rise to all the other blood cells and are derived from mesoderm; located in the red bone marrow, which is contained in the core of most bones. HSCs of the invention include cells having a phenotype of hematopoietic stem cells, identified by small size, lack of lineage (lin) markers, and markers that belong to the cluster of differentiation series, like: CD34, CD38, CD90, CD133, CD105, CD45, and also c-kit, —the receptor for stem cell factor. Hematopoietic stem cells are negative for the markers that are used for detection of lineage commitment, and are, thus, called Lin-; and, during their purification by FACS, a number of up to 14 different mature blood-lineage markers, e.g., CD13 & CD33 for myeloid, CD71 for erythroid, CD19 for B cells, CD61 for megakaryocytic, etc. for humans; and, B220 (murine CD45) for B cells, Mac-1 (CD11b/CD18) for monocytes, Gr-1 for Granulocytes, Ter119 for erythroid cells, Il7Ra, CD3, CD4, CDS, CD8 for T cells, etc. Mouse HSC markers: CD341o/−, SCA-1+, Thyl.1+/lo, CD38+, C-kit+, lin-, and Human HSC markers: CD34+, CD59+, Thyl/CD90+, CD381o/−, C-kit/CD117+, and lin−. HSCs are identified by markers. Hence in embodiments discussed herein, the HSCs can be CD34+ cells. HSCs can also be hematopoietic stem cells that are CD34−/CD38−. Stem cells that may lack c-kit on the cell surface that are considered in the art as HSCs are within the ambit of the invention, as well as CD133+ cells likewise considered HSCs in the art.

[0600] The CRISPR-Cas system may be engineered to target genetic locus or loci in HSCs. Cas protein, advantageously codon-optimized for a eukaryotic cell and especially a mammalian cell, e.g., a human cell, for instance, HSC, and sgRNA targeting a locus or loci in HSC, e.g., the gene EMX1, may be prepared. These may be delivered via particles. The particles may be formed by the Cas protein and the gRNA being admixed. The gRNA and Cas protein mixture may for example be admixed with a mixture comprising or consisting essentially of or consisting of surfactant, phospholipid, biodegradable polymer, lipoprotein and alcohol, whereby particles containing the gRNA and Cas protein may be formed. The invention comprehends so making particles and particles from such a method as well as uses thereof.

[0601] More generally, particles may be formed using an efficient process. First, Cas protein and gRNA targeting the gene EMX1 or the control gene LacZ may be mixed together at a suitable, e.g., 3:1 to 1:3 or 2:1 to 1:2 or 1:1 molar ratio, at a suitable temperature, e.g., 15-30C, e.g., 20-25C, e.g., room temperature, for a suitable time, e.g., 15-45, such as 30 minutes, advantageously in sterile, nuclease free buffer, e.g., 1×PBS. Separately, particle components such as or comprising: a surfactant, e.g., cationic lipid, e.g., 1,2-dioleoyl-3-trimethylammonium-propane (DOTAP); phospholipid, e.g., dimyristoylphosphatidylcholine (DMPC); biodegradable polymer, such as an ethylene-glycol polymer or PEG, and a lipoprotein, such as a low-density lipoprotein, e.g., cholesterol may be dissolved in an alcohol, advantageously a C1-6 alkyl alcohol, such as methanol, ethanol, isopropanol, e.g., 100% ethanol. The two solutions may be mixed together to form particles containing the Cas-gRNA complexes. In certain embodiments the particle can contain an HDR template. That can be a particle co-administered with gRNA+Cas protein-containing particle, or i.e., in addition to contacting an HSC with an gRNA+Cas protein-containing particle, the HSC is contacted with a particle containing an HDR template; or the HSC is contacted with a particle containing all of the gRNA, Cas and the HDR template. The HDR template can be administered by a separate vector, whereby in a first instance the particle penetrates an HSC cell and the separate vector also penetrates the cell, wherein the HSC genome is modified by the gRNA+Cas and the HDR template is also present, whereby a genomic loci is modified by the HDR; for instance, this may result in correcting a mutation.

[0602] After the particles form, HSCs in 96 well plates may be transfected with 15 ug Cas protein per well. Three days after transfection, HSCs may be harvested, and the number of insertions and deletions (indels) at the EMX1 locus may be quantified.

[0603] This illustrates how HSCs can be modified using CRISPR-Cas targeting a genomic locus or loci of interest in the HSC. The HSCs that are to be modified can be in vivo, i.e., in an organism, for example a human or a non-human eukaryote, e.g., animal, such as fish, e.g., zebra fish, mammal, e.g., primate, e.g., ape, chimpanzee, macaque, rodent, e.g., mouse, rabbit, rat, canine or dog, livestock (cow/bovine, sheep/ovine, goat or pig), fowl or poultry, e.g., chicken. The HSCs that are to be modified can be in vitro, i.e., outside of such an organism. And, modified HSCs can be used ex vivo, i.e., one or more HSCs of such an organism can be obtained or isolated from the organism, optionally the HSC(s) can be expanded, the HSC(s) are modified by a composition comprising a CRISPR-Cas that targets a genetic locus or loci in the HSC, e.g., by contacting the HSC(s) with the composition, for instance, wherein the composition comprises a particle containing the CRISPR enzyme and one or more gRNA that targets the genetic locus or loci in the HSC, such as a particle obtained or obtainable from admixing an gRNA and Cas protein mixture with a mixture comprising or consisting essentially of or consisting of surfactant, phospholipid, biodegradable polymer, lipoprotein and alcohol (wherein one or more gRNA targets the genetic locus or loci in the HSC), optionally expanding the resultant modified HSCs and administering to the organism the resultant modified HSCs. In some instances the isolated or obtained HSCs can be from a first organism, such as an organism from a same species as a second organism, and the second organism can be the organism to which the resultant modified HSCs are administered, e.g., the first organism can be a donor (such as a relative as in a parent or sibling) to the second organism. Modified HSCs can have genetic modifications to address or alleviate or reduce symptoms of a disease or condition state of an individual or subject or patient. Modified HSCs, e.g., in the instance of a first organism donor to a second organism, can have genetic modifications to have the HSCs have one or more proteins e.g. surface markers or proteins more like that of the second organism. Modified HSCs can have genetic modifications to simulate a disease or condition state of an individual or subject or patient and would be re-administered to a non-human organism so as to prepare an animal model. Expansion of HSCs is within the ambit of the skilled person from this disclosure and knowledge in the art, see e.g., Lee, “Improved ex vivo expansion of adult hematopoietic stem cells by overcoming CUL4-mediated degradation of HOXB4.” Blood. 2013 May 16; 121(20):4082-9. doi: 10.1182/blood-2012-09-455204. Epub 2013 Mar. 21.

[0604] As indicated to improve activity, gRNA may be pre-complexed with the Cas protein, before formulating the entire complex in a particle. Formulations may be made with a different molar ratio of different components known to promote delivery of nucleic acids into cells (e.g. 1,2-dioleoyl-3-trimethylammonium-propane (DOTAP), 1,2-ditetradecanoyl-sn-glycero-3-phosphocholine (DMPC), polyethylene glycol (PEG), and cholesterol) For example DOTAP:DMPC:PEG:Cholesterol Molar Ratios may be DOTAP 100, DMPC 0, PEG 0, Cholesterol 0; or DOTAP 90, DMPC 0, PEG 10, Cholesterol 0; or DOTAP 90, DMPC 0, PEG 5, Cholesterol 5. DOTAP 100, DMPC 0, PEG 0, Cholesterol 0. The invention accordingly comprehends admixing gRNA, Cas protein and components that form a particle; as well as particles from such admixing.

[0605] In a preferred embodiment, particles containing the Cas-gRNA complexes may be formed by mixing Cas protein and one or more gRNAs together, preferably at a 1:1 molar ratio, enzyme: guide RNA. Separately, the different components known to promote delivery of nucleic acids (e.g. DOTAP, DMPC, PEG, and cholesterol) are dissolved, preferably in ethanol. The two solutions are mixed together to form particles containing the Cas-gRNA complexes. After the particles are formed, Cas-gRNA complexes may be transfected into cells (e.g. HSCs). Bar coding may be applied. The particles, the Cas-9 and/or the gRNA may be barcoded.

[0606] The invention in an embodiment comprehends a method of preparing an gRNA-and-Cas protein containing particle comprising admixing an gRNA and Cas protein mixture with a mixture comprising or consisting essentially of or consisting of surfactant, phospholipid, biodegradable polymer, lipoprotein and alcohol. An embodiment comprehends an gRNA-and-Cas protein containing particle from the method. The invention in an embodiment comprehends use of the particle in a method of modifying a genomic locus of interest, or an organism or a non-human organism by manipulation of a target sequence in a genomic locus of interest, comprising contacting a cell containing the genomic locus of interest with the particle wherein the gRNA targets the genomic locus of interest; or a method of modifying a genomic locus of interest, or an organism or a non-human organism by manipulation of a target sequence in a genomic locus of interest, comprising contacting a cell containing the genomic locus of interest with the particle wherein the gRNA targets the genomic locus of interest. In these embodiments, the genomic locus of interest is advantageously a genomic locus in an HSC.

[0607] Considerations for Therapeutic Applications: A consideration in genome editing therapy is the choice of sequence-specific nuclease, such as a variant of a Cas nuclease. Each nuclease variant may possess its own unique set of strengths and weaknesses, many of which must be balanced in the context of treatment to maximize therapeutic benefit. Thus far, two therapeutic editing approaches with nucleases have shown significant promise: gene disruption and gene correction. Gene disruption involves stimulation of NHEJ to create targeted indels in genetic elements, often resulting in loss of function mutations that are beneficial to patients. In contrast, gene correction uses HDR to directly reverse a disease causing mutation, restoring function while preserving physiological regulation of the corrected element. HDR may also be used to insert a therapeutic transgene into a defined ‘safe harbor’ locus in the genome to recover missing gene function. For a specific editing therapy to be efficacious, a sufficiently high level of modification must be achieved in target cell populations to reverse disease symptoms. This therapeutic modification ‘threshold’ is determined by the fitness of edited cells following treatment and the amount of gene product necessary to reverse symptoms. With regard to fitness, editing creates three potential outcomes for treated cells relative to their unedited counterparts: increased, neutral, or decreased fitness. In the case of increased fitness, for example in the treatment of SCID-X1, modified hematopoietic progenitor cells selectively expand relative to their unedited counterparts. SCID-X1 is a disease caused by mutations in the IL2RG gene, the function of which is required for proper development of the hematopoietic lymphocyte lineage [Leonard, W. J., et al. Immunological reviews 138, 61-86 (1994); Kaushansky, K. & Williams, W. J. Williams hematology, (McGraw-Hill Medical, New York, 2010)]. In clinical trials with patients who received viral gene therapy for SCID-X1, and a rare example of a spontaneous correction of SCID-X1 mutation, corrected hematopoietic progenitor cells may be able to overcome this developmental block and expand relative to their diseased counterparts to mediate therapy [Bousso, P., et al. Proceedings of the National Academy of Sciences of the United States of America 97, 274-278 (2000); Hacein-Bey-Abina, S., et al. The New England journal of medicine 346, 1185-1193 (2002); Gaspar, H. B., et al. Lancet 364, 2181-2187 (2004)]. In this case, where edited cells possess a selective advantage, even low numbers of edited cells can be amplified through expansion, providing a therapeutic benefit to the patient. In contrast, editing for other hematopoietic diseases, like chronic granulomatous disorder (CGD), would induce no change in fitness for edited hematopoietic progenitor cells, increasing the therapeutic modification threshold. CGD is caused by mutations in genes encoding phagocytic oxidase proteins, which are normally used by neutrophils to generate reactive oxygen species that kill pathogens [Mukherjee, S. & Thrasher, A. J. Gene 525, 174-181 (2013)]. As dysfunction of these genes does not influence hematopoietic progenitor cell fitness or development, but only the ability of a mature hematopoietic cell type to fight infections, there would be likely no preferential expansion of edited cells in this disease. Indeed, no selective advantage for gene corrected cells in CGD has been observed in gene therapy trials, leading to difficulties with long-term cell engraftment [Malech, H. L., et al. Proceedings of the National Academy of Sciences of the United States of America 94, 12133-12138 (1997); Kang, H. J., et al. Molecular therapy: the journal of the American Society of Gene Therapy 19, 2092-2101 (2011)]. As such, significantly higher levels of editing would be required to treat diseases like CGD, where editing creates a neutral fitness advantage, relative to diseases where editing creates increased fitness for target cells. If editing imposes a fitness disadvantage, as would be the case for restoring function to a tumor suppressor gene in cancer cells, modified cells would be outcompeted by their diseased counterparts, causing the benefit of treatment to be low relative to editing rates. This latter class of diseases would be particularly difficult to treat with genome editing therapy.

[0608] In addition to cell fitness, the amount of gene product necessary to treat disease also influences the minimal level of therapeutic genome editing that must be achieved to reverse symptoms. Haemophilia B is one disease where a small change in gene product levels can result in significant changes in clinical outcomes. This disease is caused by mutations in the gene encoding factor IX, a protein normally secreted by the liver into the blood, where it functions as a component of the clotting cascade. Clinical severity of haemophilia B is related to the amount of factor IX activity. Whereas severe disease is associated with less than 1% of normal activity, milder forms of the diseases are associated with greater than 1% of factor IX activity [Kaushansky, K. & Williams, W. J. Williams hematology, (McGraw-Hill Medical, New York, 2010); Lofqvist, T., et al. Journal of internal medicine 241, 395-400 (1997)]. This suggests that editing therapies that can restore factor IX expression to even a small percentage of liver cells could have a large impact on clinical outcomes. A study using ZFNs to correct a mouse model of haemophilia B shortly after birth demonstrated that 3-7% correction was sufficient to reverse disease symptoms, providing preclinical evidence for this hypothesis [Li, H., et al. Nature 475, 217-221 (2011)].

[0609] Disorders where a small change in gene product levels can influence clinical outcomes and diseases where there is a fitness advantage for edited cells, are ideal targets for genome editing therapy, as the therapeutic modification threshold is low enough to permit a high chance of success given the current technology. Targeting these diseases has now resulted in successes with editing therapy at the preclinical level and a phase I clinical trial. Improvements in DSB repair pathway manipulation and nuclease delivery are needed to extend these promising results to diseases with a neutral fitness advantage for edited cells, or where larger amounts of gene product are needed for treatment. Table 10 below shows some examples of applications of genome editing to therapeutic models, and the references shown in Table 10 and the documents cited in those references are hereby incorporated herein by reference as if set out in full.

TABLE 10
Examples of applications of genome editing to therapeutic models.

| | Nuclease | | |
|---|---|---|---|
| | Platform | Therapeutic | |
| Disease Type | Employed | Strategy | References |
| Hemophilia B | ZFN | HDR-mediated | Li, H., et al. |
| | | insertion of correct | Nature 475, |
| | | gene sequence | 217-221 (2011) |
| SCID | ZFN | HDR-mediated | Genovese, P., |
| | | insertion of correct | et al. Nature 510, |
| | | gene sequence | 235-240 (2014) |
| Hereditary | CRISPR | HDR-mediated | Yin, H., et al. |
| tyrosinemia | | correction of | Nature |
| | | mutation in liver | biotechnology 32, |
| | | | 551-553 (2014) |

[0610] Addressing each of the conditions of the foregoing table, using the CRISPR-Cas system to target by either HDR-mediated correction of mutation, or HDR-mediated insertion of correct gene sequence, advantageously via a delivery system as herein, e.g., a particle delivery system, is within the ambit of the skilled person from this disclosure and the knowledge in the art. Thus, an embodiment comprehends contacting a Hemophilia B, SCID (e.g., SCID-X1, ADA-SCID) or Hereditary tyrosinemia mutation-carrying HSC with an gRNA-and-Cas protein containing particle targeting a genomic locus of interest as to Hemophilia B, SCID (e.g., SCID-X1, ADA-SCID) or Hereditary tyrosinemia (e.g., as in Li, Genovese or Yin). The particle also can contain a suitable HDR template to correct the mutation; or the HSC can be contacted with a second particle or a vector that contains or delivers the HDR template. In this regard, it is mentioned that Haemophilia B is an X-linked recessive disorder caused by loss-of-function mutations in the gene encoding Factor IX, a crucial component of the clotting cascade. Recovering Factor IX activity to above 1% of its levels in severely affected individuals can transform the disease into a significantly milder form, as infusion of recombinant Factor IX into such patients prophylactically from a young age to achieve such levels largely ameliorates clinical complications. With the knowledge in the art and the teachings in this disclosure, the skilled person can correct HSCs as to Haemophilia B using a CRISPR-Cas system that targets and corrects the mutation (X-linked recessive disorder caused by loss-of-function mutations in the gene encoding Factor IX) (e.g., with a suitable HDR template that delivers a coding sequence for Factor IX); specifically, the gRNA can target mutation that give rise to Haemophilia B, and the HDR can provide coding for proper expression of Factor IX. An gRNA that targets the mutation-and-Cas protein containing particle is contacted with HSCs carrying the mutation. The particle also can contain a suitable HDR template to correct the mutation for proper expression of Factor IX; or the HSC can be contacted with a second particle or a vector that contains or delivers the HDR template. The so contacted cells can be administered; and optionally treated/expanded; cf. Cartier, discussed herein.

[0611] In Cartier, “MINI-SYMPOSIUM: X-Linked Adrenoleukodystrophypa, Hematopoietic Stem Cell Transplantation and Hematopoietic Stem Cell Gene Therapy in X-Linked Adrenoleukodystrophy,” Brain Pathology 20 (2010) 857-862, incorporated herein by reference along with the documents it cites, as if set out in full, there is recognition that allogeneic hematopoietic stem cell transplantation (HSCT) was utilized to deliver normal lysosomal enzyme to the brain of a patient with Hurler's disease, and a discussion of HSC gene therapy to treat ALD. In two patients, peripheral CD34+ cells were collected after granulocyte-colony stimulating factor (G-CSF) mobilization and transduced with an myeloproliferative sarcoma virus enhancer, negative control region deleted, d1587rev primer binding site substituted (MND)-ALD lentiviral vector. CD34+ cells from the patients were transduced with the MND-ALD vector during 16 h in the presence of cytokines at low concentrations. Transduced CD34+ cells were frozen after transduction to perform on 5% of cells various safety tests that included in particular three replication-competent lentivirus (RCL) assays. Transduction efficacy of CD34+ cells ranged from 35% to 50% with a mean number of lentiviral integrated copy between 0.65 and 0.70. After the thawing of transduced CD34+ cells, the patients were reinfused with more than 4.106 transduced CD34+ cells/kg following full myeloablation with busulfan and cyclophos-phamide. The patient's HSCs were ablated to favor engraftment of the gene-corrected HSCs. Hematological recovery occurred between days 13 and 15 for the two patients. Nearly complete immunological recovery occurred at 12 months for the first patient, and at 9 months for the second patient. In contrast to using lentivirus, with the knowledge in the art and the teachings in this disclosure, the skilled person can correct HSCs as to ALD using a CRISPR-Cas system that targets and corrects the mutation (e.g., with a suitable HDR template); specifically, the gRNA can target mutations in ABCD1, a gene located on the X chromosome that codes for ALD, a peroxisomal membrane transporter protein, and the HDR can provide coding for proper expression of the protein. An gRNA that targets the mutation-and-Cas protein containing particle is contacted with HSCs, e.g., CD34+ cells carrying the mutation as in Cartier. The particle also can contain a suitable HDR template to correct the mutation for expression of the peroxisomal membrane transporter protein; or the HSC can be contacted with a second particle or a vector that contains or delivers the HDR template. The so contacted cells optionally can be treated as in Cartier. The so contacted cells can be administered as in Cartier.

[0612] Mention is made of WO 2015/148860, through the teachings herein the invention comprehends methods and materials of these documents applied in conjunction with the teachings herein. In an aspect of blood-related disease gene therapy, methods and compositions for treating beta thalassemia may be adapted to the CRISPR-Cas system of the present invention (see, e.g., WO 2015/148860). In an embodiment, WO 2015/148860 involves the treatment or prevention of beta thalassemia, or its symptoms, e.g., by altering the gene for B-cell CLL/lymphoma 11A (BCL11A). The BCL11A gene is also known as B-cell CLL/lymphoma 11A, BCL11A-L, BCL11A-S, BCL11AXL, CTIP 1, HBFQTL5 and ZNF. BCL11A encodes a zinc-finger protein that is involved in the regulation of globin gene expression. By altering the BCL11A gene (e.g., one or both alleles of the BCL11A gene), the levels of gamma globin can be increased. Gamma globin can replace beta globin in the hemoglobin complex and effectively carry oxygen to tissues, thereby ameliorating beta thalassemia disease phenotypes.

[0613] Mention is also made of WO 2015/148863 and through the teachings herein the invention comprehends methods and materials of these documents which may be adapted to the CRISPR-Cas system of the present invention. In an aspect of treating and preventing sickle cell disease, which is an inherited hematologic disease, WO 2015/148863 comprehends altering the BCL11A gene. By altering the BCL11A gene (e.g., one or both alleles of the BCL11A gene), the levels of gamma globin can be increased. Gamma globin can replace beta globin in the hemoglobin complex and effectively carry oxygen to tissues, thereby ameliorating sickle cell disease phenotypes.

[0614] In an aspect of the invention, methods and compositions which involve editing a target nucleic acid sequence, or modulating expression of a target nucleic acid sequence, and applications thereof in connection with cancer immunotherapy are comprehended by adapting the CRISPR-Cas system of the present invention. Reference is made to the application of gene therapy in WO 2015/161276 which involves methods and compositions which can be used to affect T-cell proliferation, survival and/or function by altering one or more T-cell expressed genes, e.g., one or more of FAS, BID, CTLA4, PDCD1, CBLB, PTPN6, TRAC and/or TRBC genes. In a related aspect, T-cell proliferation can be affected by altering one or more T-cell expressed genes, e.g., the CBLB and/or PTPN6 gene, FAS and/or BID gene, CTLA4 and/or PDCDI and/or TRAC and/or TRBC gene.

[0615] Chimeric antigen receptor (CAR)19 T-cells exhibit anti-leukemic effects in patient malignancies. However, leukemia patients often do not have enough T-cells to collect, meaning that treatment must involve modified T cells from donors. Accordingly, there is interest in establishing a bank of donor T-cells. Qasim et al. (“First Clinical Application of Talen Engineered Universal CAR19 T Cells in B-ALL” ASH 57th Annual Meeting and Exposition, Dec. 5-8, 2015, Abstract 2046 (ash. confex.com/ash/2015/webprogram/Paper81653. html published online November 2015) discusses modifying CAR19 T cells to eliminate the risk of graft-versus-host disease through the disruption of T-cell receptor expression and CD52 targeting. Furthermore, CD52 cells were targeted such that they became insensitive to Alemtuzumab, and thus allowed Alemtuzumab to prevent host-mediated rejection of human leukocyte antigen (HLA) mismatched CAR19 T-cells. Investigators used third generation self-inactivating lentiviral vector encoding a 4g7 CAR19 (CD19 scFv-4-IBB-CD3) linked to RQR8, then electroporated cells with two pairs of TALEN mRNA for multiplex targeting for both the T-cell receptor (TCR) alpha constant chain locus and the CD52 gene locus. Cells which were still expressing TCR following ex vivo expansion were depleted using CliniMacs α/β TCR depletion, yielding a T-cell product (UCART19) with <1% TCR expression, 85% of which expressed CAR19, and 64% becoming CD52 negative. The modified CAR19 T cells were administered to treat a patient's relapsed acute lymphoblastic leukemia. The teachings provided herein provide effective methods for providing modified hematopoietic stem cells and progeny thereof, including but not limited to cells of the myeloid and lymphoid lineages of blood, including T cells, B cells, monocytes, macrophages, neutrophils, basophils, eosinophils, erythrocytes, dendritic cells, and megakaryocytes or platelets, and natural killer cells and their precursors and progenitors. Such cells can be modified by knocking out, knocking in, or otherwise modulating targets, for example to remove or modulate CD52 as described above, and other targets, such as, without limitation, CXCR4, and PD-1. Thus compositions, cells, and method of the invention can be used to modulate immune responses and to treat, without limitation, malignancies, viral infections, and immune disorders, in conjunction with modification of administration of T cells or other cells to patients.

[0616] Mention is made of WO 2015/148670 and through the teachings herein the invention comprehends methods and materials of this document applied in conjunction with the teachings herein. In an aspect of gene therapy, methods and compositions for editing of a target sequence related to or in connection with Human Immunodeficiency Virus (HIV) and Acquired Immunodeficiency Syndrome (AIDS) are comprehended. In a related aspect, the invention described herein comprehends prevention and treatment of HIV infection and AIDS, by introducing one or more mutations in the gene for C-C chemokine receptor type 5 (CCR5). The CCR5 gene is also known as CKR5, CCR-5, CD195, CKR-5, CCCKR5, CMKBR5, IDDM22, and CC-CKR-5. In a further aspect, the invention described herein comprehends provide for prevention or reduction of HIV infection and/or prevention or reduction of the ability for HIV to enter host cells, e.g., in subjects who are already infected. Exemplary host cells for HIV include, but are not limited to, CD4 cells, T cells, gut associated lymphatic tissue (GALT), macrophages, dendritic cells, myeloid precursor cell, and microglia. Viral entry into the host cells requires interaction of the viral glycoproteins gp41 and gp120 with both the CD4 receptor and a co-receptor, e.g., CCR5. If a co-receptor, e.g., CCR5, is not present on the surface of the host cells, the virus cannot bind and enter the host cells. The progress of the disease is thus impeded. By knocking out or knocking down CCR5 in the host cells, e.g., by introducing a protective mutation (such as a CCR5 delta 32 mutation), entry of the HIV virus into the host cells is prevented.

[0617] X-linked Chronic granulomatous disease (CGD) is a hereditary disorder of host defense due to absent or decreased activity of phagocyte NADPH oxidase. Using a CRISPR-Cas system that targets and corrects the mutation (absent or decreased activity of phagocyte NADPH oxidase) (e.g., with a suitable HDR template that delivers a coding sequence for phagocyte NADPH oxidase); specifically, the gRNA can target mutation that gives rise to CGD (deficient phagocyte NADPH oxidase), and the HDR can provide coding for proper expression of phagocyte NADPH oxidase. An gRNA that targets the mutation-and-Cas protein containing particle is contacted with HSCs carrying the mutation. The particle also can contain a suitable HDR template to correct the mutation for proper expression of phagocyte NADPH oxidase; or the HSC can be contacted with a second particle or a vector that contains or delivers the HDR template. The so contacted cells can be administered; and optionally treated/expanded; cf. Cartier.

[0618] Fanconi anemia: Mutations in at least 15 genes (FANCA, FANCB, FANCC, FANCD1/BRCA2, FANCD2, FANCE, FANCF, FANCG, FANCI, FANCJ/BACH1/BRIP1, FANCL/PHF9/POG, FANCM, FANCN/PALB2, FANCO/Rad51C, and FANCP/SLX4/BTBD12) can cause Fanconi anemia. Proteins produced from these genes are involved in a cell process known as the FA pathway. The FA pathway is turned on (activated) when the process of making new copies of DNA, called DNA replication, is blocked due to DNA damage. The FA pathway sends certain proteins to the area of damage, which trigger DNA repair so DNA replication can continue. The FA pathway is particularly responsive to a certain type of DNA damage known as interstrand cross-links (ICLs). ICLs occur when two DNA building blocks (nucleotides) on opposite strands of DNA are abnormally attached or linked together, which stops the process of DNA replication. ICLs can be caused by a buildup of toxic substances produced in the body or by treatment with certain cancer therapy drugs. Eight proteins associated with Fanconi anemia group together to form a complex known as the FA core complex. The FA core complex activates two proteins, called FANCD2 and FANCI. The activation of these two proteins brings DNA repair proteins to the area of the ICL so the cross-link can be removed and DNA replication can continue. the FA core complex. More in particular, the FA core complex is a nuclear multiprotein complex consisting of FANCA, FANCB, FANCC, FANCE, FANCF, FANCG, FANCL, and FANCM, functions as an E3 ubiquitin ligase and mediates the activation of the ID complex, which is a heterodimer composed of FANCD2 and FANCI. Once monoubiquitinated, it interacts with classical tumor suppressors downstream of the FA pathway including FANCD1/BRCA2, FANCN/PALB2, FANCJ/BRIP1, and FANCO/Rad51C and thereby contributes to DNA repair via homologous recombination (HR). Eighty to 90 percent of FA cases are due to mutations in one of three genes, FANCA, FANCC, and FANCG. These genes provide instructions for producing components of the FA core complex. Mutations in such genes associated with the FA core complex will cause the complex to be nonfunctional and disrupt the entire FA pathway. As a result, DNA damage is not repaired efficiently and ICLs build up over time. Geiselhart, “Review Article, Disrupted Signaling through the Fanconi Anemia Pathway Leads to Dysfunctional Hematopoietic Stem Cell Biology: Underlying Mechanisms and Potential Therapeutic Strategies,” Anemia Volume 2012 (2012), Article ID 265790, dx.doi.org/10.1155/2012/265790 discussed FA and an animal experiment involving intrafemoral injection of a lentivirus encoding the FANCC gene resulting in correction of HSCs in vivo. Using a CRISPR-Cas system that targets and one or more of the mutations associated with FA, for instance a CRISPR-Cas system having gRNA(s) and HDR template(s) that respectively targets one or more of the mutations of FANCA, FANCC, or FANCG that give rise to FA and provide corrective expression of one or more of FANCA, FANCC or FANCG; e.g., the gRNA can target a mutation as to FANCC, and the HDR can provide coding for proper expression of FANCC. An gRNA that targets the mutation(s) (e.g., one or more involved in FA, such as mutation(s) as to any one or more of FANCA, FANCC or FANCG)-and-Cas protein containing particle is contacted with HSCs carrying the mutation(s). The particle also can contain a suitable HDR template(s) to correct the mutation for proper expression of one or more of the proteins involved in FA, such as any one or more of FANCA, FANCC or FANCG; or the HSC can be contacted with a second particle or a vector that contains or delivers the HDR template. The so contacted cells can be administered; and optionally treated/expanded; cf. Cartier.

[0619] The particle in the herein discussion (e.g., as to containing gRNA(s) and Cas, optionally HDR template(s), or HDR template(s); for instance as to Hemophilia B, SCID, SCID-X1, ADA-SCID, Hereditary tyrosinemia, β-thalassemia, X-linked CGD, Wiskott-Aldrich syndrome, Fanconi anemia, adrenoleukodystrophy (ALD), metachromatic leukodystrophy (MLD), HIV/AIDS, Immunodeficiency disorder, Hematologic condition, or genetic lysosomal storage disease) is advantageously obtained or obtainable from admixing an gRNA(s) and Cas protein mixture (optionally containing HDR template(s) or such mixture only containing HDR template(s) when separate particles as to template(s) is desired) with a mixture comprising or consisting essentially of or consisting of surfactant, phospholipid, biodegradable polymer, lipoprotein and alcohol (wherein one or more gRNA targets the genetic locus or loci in the HSC).

[0620] Indeed, the invention is especially suited for treating hematopoietic genetic disorders with genome editing, and immunodeficiency disorders, such as genetic immunodeficiency disorders, especially through using the particle technology herein-discussed. Genetic immunodeficiencies are diseases where genome editing interventions of the instant invention can successful. The reasons include: Hematopoietic cells, of which immune cells are a subset, are therapeutically accessible. They can be removed from the body and transplanted autologously or allogenically. Further, certain genetic immunodeficiencies, e.g., severe combined immunodeficiency (SCID), create a proliferative disadvantage for immune cells. Correction of genetic lesions causing SCID by rare, spontaneous ‘reverse’ mutations indicates that correcting even one lymphocyte progenitor may be sufficient to recover immune function in patients . . . / . . . / . . . /Users/t kowalski/AppData/Local/Microsoft/Windows/Temporary Internet Files/Content.Outlook/GA8VY8LK/Treating SCID for Ellen.docx—_ENREF_1 See Bousso, P., et al. Diversity, functionality, and stability of the T cell repertoire derived in vivo from a single human T cell precursor. Proceedings of the National Academy of Sciences of the United States of America 97, 274-278 (2000). The selective advantage for edited cells allows for even low levels of editing to result in a therapeutic effect. This effect of the instant invention can be seen in SCID, Wiskott-Aldrich Syndrome, and the other conditions mentioned herein, including other genetic hematopoietic disorders such as alpha- and beta-thalassemia, where hemoglobin deficiencies negatively affect the fitness of erythroid progenitors.

[0621] The activity of NHEJ and HDR DSB repair varies significantly by cell type and cell state. NHEJ is not highly regulated by the cell cycle and is efficient across cell types, allowing for high levels of gene disruption in accessible target cell populations. In contrast, HDR acts primarily during S/G2 phase, and is therefore restricted to cells that are actively dividing, limiting treatments that require precise genome modifications to mitotic cells [Ciccia, A. & Elledge, S. J. Molecular cell 40, 179-204 (2010); Chapman, J. R., et al. Molecular cell 47, 497-510 (2012)].

[0622] The efficiency of correction via HDR may be controlled by the epigenetic state or sequence of the targeted locus, or the specific repair template configuration (single vs. double stranded, long vs. short homology arms) used [Hacein-Bey-Abina, S., et al. The New England journal of medicine 346, 1185-1193 (2002); Gaspar, H. B., et al. Lancet 364, 2181-2187 (2004); Beumer, K. J., et al. G3 (2013)]. The relative activity of NHEJ and HDR machineries in target cells may also affect gene correction efficiency, as these pathways may compete to resolve DSBs [Beumer, K. J., et al. Proceedings of the National Academy of Sciences of the United States of America 105, 19821-19826 (2008)]. HDR also imposes a delivery challenge not seen with NHEJ strategies, as it requires the concurrent delivery of nucleases and repair templates. In practice, these constraints have so far led to low levels of HDR in therapeutically relevant cell types. Clinical translation has therefore largely focused on NHEJ strategies to treat disease, although proof-of-concept preclinical HDR treatments have now been described for mouse models of haemophilia B and hereditary tyrosinemia [Li, H., et al. Nature 475, 217-221 (2011); Yin, H., et al. Nature biotechnology 32, 551-553 (2014)].

[0623] Any given genome editing application may comprise combinations of proteins, small RNA molecules, and/or repair templates, making delivery of these multiple parts substantially more challenging than small molecule therapeutics. Two main strategies for delivery of genome editing tools have been developed: ex vivo and in vivo. In ex vivo treatments, diseased cells are removed from the body, edited and then transplanted back into the patient. Ex vivo editing has the advantage of allowing the target cell population to be well defined and the specific dosage of therapeutic molecules delivered to cells to be specified. The latter consideration may be particularly important when off-target modifications are a concern, as titrating the amount of nuclease may decrease such mutations (Hsu et al., 2013). Another advantage of ex vivo approaches is the typically high editing rates that can be achieved, due to the development of efficient delivery systems for proteins and nucleic acids into cells in culture for research and gene therapy applications.

[0624] There may be drawbacks with ex vivo approaches that limit application to a small number of diseases. For instance, target cells must be capable of surviving manipulation outside the body. For many tissues, like the brain, culturing cells outside the body is a major challenge, because cells either fail to survive, or lose properties necessary for their function in vivo. Thus, in view of this disclosure and the knowledge in the art, ex vivo therapy as to tissues with adult stem cell populations amenable to ex vivo culture and manipulation, such as the hematopoietic system, by the CRISPR-Cas system are enabled. [Bunn, H. F. & Aster, J. Pathophysiology of blood disorders, (McGraw-Hill, New York, 2011)]

[0625] In vivo genome editing involves direct delivery of editing systems to cell types in their native tissues. In vivo editing allows diseases in which the affected cell population is not amenable to ex vivo manipulation to be treated. Furthermore, delivering nucleases to cells in situ allows for the treatment of multiple tissue and cell types. These properties probably allow in vivo treatment to be applied to a wider range of diseases than ex vivo therapies.

[0626] To date, in vivo editing has largely been achieved through the use of viral vectors with defined, tissue-specific tropism. Such vectors are currently limited in terms of cargo carrying capacity and tropism, restricting this mode of therapy to organ systems where transduction with clinically useful vectors is efficient, such as the liver, muscle and eye [Kotterman, M. A. & Schaffer, D. V. Nature reviews. Genetics 15, 445-451 (2014); Nguyen, T. H. & Ferry, N. Gene therapy 11 Suppl 1, S76-84 (2004); Boye, S. E., et al. Molecular therapy, the journal of the American Society of Gene Therapy 21, 509-519 (2013)].

[0627] A potential barrier for in vivo delivery is the immune response that may be created in response to the large amounts of virus necessary for treatment, but this phenomenon is not unique to genome editing and is observed with other virus based gene therapies [Bessis, N., et al. Gene therapy 11 Suppl 1, S10-17 (2004)]. It is also possible that peptides from editing nucleases themselves are presented on MHC Class I molecules to stimulate an immune response, although there is little evidence to support this happening at the preclinical level. Another major difficulty with this mode of therapy is controlling the distribution and consequently the dosage of genome editing nucleases in vivo, leading to off-target mutation profiles that may be difficult to predict. However, in view of this disclosure and the knowledge in the art, including the use of virus- and particle-based therapies being used in the treatment of cancers, in vivo modification of HSCs, for instance by delivery by either particle or virus, is within the ambit of the skilled person.

[0628] Ex Vivo Editing Therapy: The long-standing clinical expertise with the purification, culture and transplantation of hematopoietic cells has made diseases affecting the blood system such as SCID, Fanconi anemia, Wiskott-Aldrich syndrome and sickle cell anemia the focus of ex vivo editing therapy. Another reason to focus on hematopoietic cells is that, thanks to previous efforts to design gene therapy for blood disorders, delivery systems of relatively high efficiency already exist. With these advantages, this mode of therapy can be applied to diseases where edited cells possess a fitness advantage, so that a small number of engrafted, edited cells can expand and treat disease. One such disease is HIV, where infection results in a fitness disadvantage to CD4+ T cells.

[0629] Ex vivo editing therapy has been recently extended to include gene correction strategies. The barriers to HDR ex vivo were overcome in a recent paper from Genovese and colleagues, who achieved gene correction of a mutated IL2RG gene in hematopoietic stem cells (HSCs) obtained from a patient suffering from SCID-X1 [Genovese, P., et al. Nature 510, 235-240 (2014)]. Genovese et. al. accomplished gene correction in HSCs using a multimodal strategy. First, HSCs were transduced using integration-deficient lentivirus containing an HDR template encoding a therapeutic cDNA for IL2RG. Following transduction, cells were electroporated with mRNA encoding ZFNs targeting a mutational hotspot in IL2RG to stimulate HDR based gene correction. To increase HDR rates, culture conditions were optimized with small molecules to encourage HSC division. With optimized culture conditions, nucleases and HDR templates, gene corrected HSCs from the SCID-X1 patient were obtained in culture at therapeutically relevant rates. HSCs from unaffected individuals that underwent the same gene correction procedure could sustain long-term hematopoiesis in mice, the gold standard for HSC function. HSCs are capable of giving rise to all hematopoietic cell types and can be autologously transplanted, making them an extremely valuable cell population for all hematopoietic genetic disorders [Weissman, I. L. & Shizuru, J. A. Blood 112, 3543-3553 (2008)]. Gene corrected HSCs could, in principle, be used to treat a wide range of genetic blood disorders making this study an exciting breakthrough for therapeutic genome editing.

[0630] In Vivo Editing Therapy: In vivo editing can be used advantageously from this disclosure and the knowledge in the art. For organ systems where delivery is efficient, there have already been a number of exciting preclinical therapeutic successes. The first example of successful in vivo editing therapy was demonstrated in a mouse model of haemophilia B [Li, H., et al. Nature 475, 217-221 (2011)]. As noted earlier, Haemophilia B is an X-linked recessive disorder caused by loss-of-function mutations in the gene encoding Factor IX, a crucial component of the clotting cascade. Recovering Factor IX activity to above 1% of its levels in severely affected individuals can transform the disease into a significantly milder form, as infusion of recombinant Factor IX into such patients prophylactically from a young age to achieve such levels largely ameliorates clinical complications [Lofqvist, T., et al. Journal of internal medicine 241, 395-400 (1997)]. Thus, only low levels of HDR gene correction are necessary to change clinical outcomes for patients. In addition, Factor IX is synthesized and secreted by the liver, an organ that can be transduced efficiently by viral vectors encoding editing systems.

[0631] Using hepatotropic adeno-associated viral (AAV) serotypes encoding ZFNs and a corrective HDR template, up to 7% gene correction of a mutated, humanized Factor IX gene in the murine liver was achieved [Li, H., et al. Nature 475, 217-221 (2011)]. This resulted in improvement of clot formation kinetics, a measure of the function of the clotting cascade, demonstrating for the first time that in vivo editing therapy is not only feasible, but also efficacious. As discussed herein, the skilled person is positioned from the teachings herein and the knowledge in the art, e.g., Li to address Haemophilia B with a particle-containing HDR template and a CRISPR-Cas system that targets the mutation of the X-linked recessive disorder to reverse the loss-of-function mutation.

[0632] Building on this study, other groups have recently used in vivo genome editing of the liver with CRISPR-Cas to successfully treat a mouse model of hereditary tyrosinemia and to create mutations that provide protection against cardiovascular disease. These two distinct applications demonstrate the versatility of this approach for disorders that involve hepatic dysfunction [Yin, H., et al. Nature biotechnology 32, 551-553 (2014); Ding, Q., et al. Circulation research 115, 488-492 (2014)]. Application of in vivo editing to other organ systems are necessary to prove that this strategy is widely applicable. Currently, efforts to optimize both viral and non-viral vectors are underway to expand the range of disorders that can be treated with this mode of therapy [Kotterman, M. A. & Schaffer, D. V. Nature reviews. Genetics 15, 445-451 (2014); Yin, H., et al. Nature reviews. Genetics 15, 541-555 (2014)]. As discussed herein, the skilled person is positioned from the teachings herein and the knowledge in the art, e.g., Yin to address hereditary tyrosinemia with a particle-containing HDR template and a CRISPR-Cas system that targets the mutation.

[0633] Targeted deletion, therapeutic applications: Targeted deletion of genes may be preferred. Preferred are, therefore, genes involved in immunodeficiency disorder, hematologic condition, or genetic lysosomal storage disease, e.g., Hemophilia B, SCID, SCID-X1, ADA-SCID, Hereditary tyrosinemia, β-thalassemia, X-linked CGD, Wiskott-Aldrich syndrome, Fanconi anemia, adrenoleukodystrophy (ALD), metachromatic leukodystrophy (MLD), HIV/AIDS, other metabolic disorders, genes encoding mis-folded proteins involved in diseases, genes leading to loss-of-function involved in diseases; generally, mutations that can be targeted in an HSC, using any herein-discussed delivery system, with the particle system considered advantageous.

[0634] In the present invention, the immunogenicity of the CRISPR enzyme in particular may be reduced following the approach first set out in Tangri et al with respect to erythropoietin and subsequently developed. Accordingly, directed evolution or rational design may be used to reduce the immunogenicity of the Cas in the host species (human or other species).

[0635] Genome editing: The CRISPR/Cas systems of the present invention can be used to correct genetic mutations that were previously attempted with limited success using TALEN and ZFN and lentiviruses, including as herein discussed; see also Internation Patent Publication

### Treating Disease of the Brain, Central Nervous and Immune Systems

[0636] The present invention also contemplates delivering the CRISPR-Cas system to the brain or neurons. For example, RNA interference (RNAi) offers therapeutic potential for this disorder by reducing the expression of HTT, the disease-causing gene of Huntington's disease (see, e.g., McBride et al., Molecular Therapy vol. 19 no. 12 Dec. 2011, pp. 2152-2162), therefore Applicant postulates that it may be used/and or adapted to the CRISPR-Cas system. The CRISPR-Cas system may be generated using an algorithm to reduce the off-targeting potential of antisense sequences. The CRISPR-Cas sequences may target either a sequence in exon 52 of mouse, rhesus or human huntingtin and expressed in a viral vector, such as AAV. Animals, including humans, may be injected with about three microinjections per hemisphere (six injections total): the first 1 mm rostral to the anterior commissure (12 μl) and the two remaining injections (12 μl and 10 μl, respectively) spaced 3 and 6 mm caudal to the first injection with 1e12 vg/ml of AAV at a rate of about 1 μl/minute, and the needle was left in place for an additional 5 minutes to allow the injectate to diffuse from the needle tip.

[0637] DiFiglia et al. (PNAS, Oct. 23, 2007, vol. 104, no. 43, 17204-17209) observed that single administration into the adult striatum of an siRNA targeting Htt can silence mutant Htt, attenuate neuronal pathology, and delay the abnormal behavioral phenotype observed in a rapid-onset, viral transgenic mouse model of HD. DiFiglia injected mice intrastriatally with 2 μl of Cy3-labeled cc-siRNA-Htt or unconjugated siRNA-Htt at 10 μM. A similar dosage of CRISPR Cas targeted to Htt may be contemplated for humans in the present invention, for example, about 5-10 ml of 10 μM CRISPR Cas targeted to Htt may be injected intrastriatally.

[0638] In another example, Boudreau et al. (Molecular Therapy vol. 17 no. 6 Jun. 2009) injects 5 μl of recombinant AAV serotype 2/1 vectors expressing htt-specific RNAi virus (at 4×1012 viral genomes/ml) into the striatum. A similar dosage of CRISPR Cas targeted to Htt may be contemplated for humans in the present invention, for example, about 10-20 ml of 4×1012 viral genomes/ml) CRISPR Cas targeted to Htt may be injected intrastriatally.

[0639] In another example, a CRISPR Cas targeted to HTT may be administered continuously (see, e.g., Yu et al., Cell 150, 895-908, Aug. 31, 2012). Yu et al. utilizes osmotic pumps delivering 0.25 ml/hr (Model 2004) to deliver 300 mg/day of ss-siRNA or phosphate-buffered saline (PBS) (Sigma Aldrich) for 28 days, and pumps designed to deliver 0.5 μl/hr (Model 2002) were used to deliver 75 mg/day of the positive control MOE ASO for 14 days. Pumps (Durect Corporation) were filled with ss-siRNA or MOE diluted in sterile PBS and then incubated at 37 C for 24 or 48 (Model 2004) hours prior to implantation. Mice were anesthetized with 2.5% isofluorane, and a midline incision was made at the base of the skull. Using stereotaxic guides, a cannula was implanted into the right lateral ventricle and secured with Loctite adhesive. A catheter attached to an Alzet osmotic mini pump was attached to the cannula, and the pump was placed subcutaneously in the midscapular area. The incision was closed with 5.0 nylon sutures. A similar dosage of CRISPR Cas targeted to Htt may be contemplated for humans in the present invention, for example, about 500 to 1000 g/day CRISPR Cas targeted to Htt may be administered.

[0640] In another example of continuous infusion, Stiles et al. (Experimental Neurology 233 (2012) 463-471) implanted an intraparenchymal catheter with a titanium needle tip into the right putamen. The catheter was connected to a SynchroMed® II Pump (Medtronic Neurological, Minneapolis, Minn.) subcutaneously implanted in the abdomen. After a 7 day infusion of phosphate buffered saline at 6 μL/day, pumps were re-filled with test article and programmed for continuous delivery for 7 days. About 2.3 to 11.52 mg/d of siRNA were infused at varying infusion rates of about 0.1 to 0.5 μL/min. A similar dosage of CRISPR Cas targeted to Htt may be contemplated for humans in the present invention, for example, about 20 to 200 mg/day CRISPR Cas targeted to Htt may be administered. In another example, the methods of US Patent Publication No. 20130253040 assigned to Sangamo may also be also be adapted from TALES to the nucleic acid-targeting system of the present invention for treating Huntington's Disease.

[0641] In another example, the methods of US Patent Publication No. 20130253040 (WO2013130824) assigned to Sangamo may also be also be adapted from TALES to the CRISPR Cas system of the present invention for treating Huntington's Disease.

[0642] WO2015089354 A1 in the name of The Broad Institute et al., hereby incorporated by reference, describes a targets for Huntington's Disease (HP). Possible target genes of CRISPR complex in regard to Huntington's Disease: PRKCE; IGF1; EP300; RCOR1; PRKCZ; HDAC4; and TGM2. Accordingly, one or more of PRKCE; IGF1; EP300; RCOR1; PRKCZ; HDAC4; and TGM2 may be selected as targets for Huntington's Disease in some embodiments of the present invention.

[0643] Other trinucleotide repeat disorders. These may include any of the following: Category I includes Huntington's disease (HD) and the spinocerebellar ataxias; Category II expansions are phenotypically diverse with heterogeneous expansions that are generally small in magnitude, but also found in the exons of genes; and Category III includes fragile X syndrome, myotonic dystrophy, two of the spinocerebellar ataxias, juvenile myoclonic epilepsy, and Friedreich's ataxia.

[0644] A further aspect of the invention relates to utilizing the CRISPR-Cas system for correcting defects in the EMP2A and EMP2B genes that have been identified to be associated with Lafora disease. Lafora disease is an autosomal recessive condition which is characterized by progressive myoclonus epilepsy which may start as epileptic seizures in adolescence. A few cases of the disease may be caused by mutations in genes yet to be identified. The disease causes seizures, muscle spasms, difficulty walking, dementia, and eventually death. There is currently no therapy that has proven effective against disease progression. Other genetic abnormalities associated with epilepsy may also be targeted by the CRISPR-Cas system and the underlying genetics is further described in Genetics of Epilepsy and Genetic Epilepsies, edited by Giuliano Avanzini, Jeffrey L. Noebels, Mariani Foundation Paediatric Neurology:20; 2009).

[0645] The methods of US Patent Publication No. 20110158957 assigned to Sangamo BioSciences, Inc. involved in inactivating T cell receptor (TCR) genes may also be modified to the CRISPR Cas system of the present invention. In another example, the methods of US Patent Publication No. 20100311124 assigned to Sangamo BioSciences, Inc. and US Patent Publication No. 20110225664 assigned to Cellectis, which are both involved in inactivating glutamine synthetase gene expression genes may also be modified to the CRISPR Cas system of the present invention.

[0646] Delivery options for the brain include encapsulation of CRISPR enzyme and guide RNA in the form of either DNA or RNA into liposomes and conjugating to molecular Trojan horses for trans-blood brain barrier (BBB) delivery. Molecular Trojan horses have been shown to be effective for delivery of B-gal expression vectors into the brain of non-human primates. The same approach can be used to delivery vectors containing CRISPR enzyme and guide RNA. For instance, Xia C F and Boado R J, Pardridge W M (“Antibody-mediated targeting of siRNA via the human insulin receptor using avidin-biotin technology.” Mol Pharm. 2009 May-June; 6(3):747-51. doi: 10.1021/mp800194) describes how delivery of short interfering RNA (siRNA) to cells in culture, and in vivo, is possible with combined use of a receptor-specific monoclonal antibody (mAb) and avidin-biotin technology. The authors also report that because the bond between the targeting mAb and the siRNA is stable with avidin-biotin technology, and RNAi effects at distant sites such as brain are observed in vivo following an intravenous administration of the targeted siRNA.

[0647] Zhang et al. (Mol Ther. 2003 January; 7(1):11-8.)) describe how expression plasmids encoding reporters such as luciferase were encapsulated in the interior of an “artificial virus” comprised of an 85 nm pegylated immunoliposome, which was targeted to the rhesus monkey brain in vivo with a monoclonal antibody (MAb) to the human insulin receptor (HIR). The HIRMAb enables the liposome carrying the exogenous gene to undergo transcytosis across the blood-brain barrier and endocytosis across the neuronal plasma membrane following intravenous injection. The level of luciferase gene expression in the brain was 50-fold higher in the rhesus monkey as compared to the rat. Widespread neuronal expression of the beta-galactosidase gene in primate brain was demonstrated by both histochemistry and confocal microscopy. The authors indicate that this approach makes feasible reversible adult transgenics in 24 hours. Accordingly, the use of immunoliposome is preferred. These may be used in conjunction with antibodies to target specific tissues or cell surface proteins.

### Alzheimer's Disease

[0648] US Patent Publication No. 20110023153, describes use of zinc finger nucleases to genetically modify cells, animals and proteins associated with Alzheimer's Disease. Once modified cells and animals may be further tested using known methods to study the effects of the targeted mutations on the development and/or progression of AD using measures commonly used in the study of AD—such as, without limitation, learning and memory, anxiety, depression, addiction, and sensory motor functions as well as assays that measure behavioral, functional, pathological, metabolic and biochemical function.

[0649] The present disclosure comprises editing of any chromosomal sequences that encode proteins associated with AD. The AD-related proteins are typically selected based on an experimental association of the AD-related protein to an AD disorder. For example, the production rate or circulating concentration of an AD-related protein may be elevated or depressed in a population having an AD disorder relative to a population lacking the AD disorder. Differences in protein levels may be assessed using proteomic techniques including but not limited to Western blot, immunohistochemical staining, enzyme linked immunosorbent assay (ELISA), and mass spectrometry. Alternatively, the AD-related proteins may be identified by obtaining gene expression profiles of the genes encoding the proteins using genomic techniques including but not limited to DNA microarray analysis, serial analysis of gene expression (SAGE), and quantitative real-time polymerase chain reaction (Q-PCR).

[0650] Examples of Alzheimer's disease associated proteins may include the very low density lipoprotein receptor protein (VLDLR) encoded by the VLDLR gene, the ubiquitin-like modifier activating enzyme 1 (UBA1) encoded by the UBA1 gene, or the NEDD8-activating enzyme E1 catalytic subunit protein (UBE1C) encoded by the UBA3 gene, for example.

[0651] By way of non-limiting example, proteins associated with AD include but are not limited to the proteins listed as follows: Chromosomal Sequence Encoded Protein ALAS2 Delta-aminolevulinate synthase 2 (ALAS2) ABCA1 ATP-binding cassette transporter (ABCA1) ACE Angiotensin I-converting enzyme (ACE) APOE Apolipoprotein E precursor (APOE) APP amyloid precursor protein (APP) AQP1 aquaporin 1 protein (AQP1) BIN1 Myc box-dependent-interacting protein 1 or bridging integrator 1 protein (BIN1) BDNF brain-derived neurotrophic factor (BDNF) BTNL8 Butyrophilin-like protein 8 (BTNL8) C1ORF49 chromosome 1 open reading frame 49 CDH4 Cadherin-4 CHRNB2 Neuronal acetylcholine receptor subunit beta-2 CKLFSF2 CKLF-like MARVEL transmembrane domain-containing protein 2 (CKLFSF2) CLEC4E C-type lectin domain family 4, member e (CLEC4E) CLU clusterin protein (also known as apoplipoprotein J) CR1 Erythrocyte complement receptor 1 (CR1, also known as CD35, C3b/C4b receptor and immune adherence receptor) CR1L Erythrocyte complement receptor 1 (CR1L) CSF3R granulocyte colony-stimulating factor 3 receptor (CSF3R) CST3 Cystatin C or cystatin 3 CYP2C Cytochrome P450 2C DAPK1 Death-associated protein kinase 1 (DAPK1) ESR1 Estrogen receptor 1 FCAR Fc fragment of IgA receptor (FCAR, also known as CD89) FCGR3B Fc fragment of IgG, low affinity IIIb, receptor (FCGR3B or CD16b) FFA2 Free fatty acid receptor 2 (FFA2) FGA Fibrinogen (Factor I) GAB2 GRB2-associated-binding protein 2 (GAB2) GAB2 GRB2-associated-binding protein 2 (GAB2) GALP Galanin-like peptide GAPDHS Glyceraldehyde-3-phosphate dehydrogenase, spermatogenic (GAPDHS) GMPB GMBP HP Haptoglobin (HP) HTR7 5-hydroxytryptamine (serotonin) receptor 7 (adenylate cyclase-coupled) IDE Insulin degrading enzyme IF127 IF127 IFI6 Interferon, alpha-inducible protein 6 (IFI6) IFIT2 Interferon-induced protein with tetratricopeptide repeats 2 (IFIT2) IL1RN interleukin-1 receptor antagonist (IL-1RA) IL8RA Interleukin 8 receptor, alpha (IL8RA or CD181) IL8RB Interleukin 8 receptor, beta (IL8RB) JAG1 Jagged 1 (JAG1) KCNJ15 Potassium inwardly-rectifying channel, subfamily J, member 15 (KCNJ15) LRP6 Low-density lipoprotein receptor-related protein 6 (LRP6) MAPT microtubule-associated protein tau (MAPT) MARK4 MAP/microtubule affinity-regulating kinase 4 (MARK4) MPHOSPH1 M-phase phosphoprotein 1 MTHFR 5,10-methylenetetrahydrofolate reductase MX2 Interferon-induced GTP-binding protein Mx2 NBN Nibrin, also known as NBN NCSTN Nicastrin NIACR2 Niacin receptor 2 (NIACR2, also known as GPR109B) NMNAT3 nicotinamide nucleotide adenylyltransferase 3 NTM Neurotrimin (or HNT) ORM1 Orosmucoid 1 (ORM1) or Alpha-1-acid glycoprotein 1 P2RY13 P2Y purinoceptor 13 (P2RY13) PBEF1 Nicotinamide phosphoribosyltransferase (NAmPRTase or Nampt) also known as pre-B-cell colony-enhancing factor 1 (PBEF1) or visfatin PCK1 Phosphoenolpyruvate carboxykinase PICALM phosphatidylinositol binding clathrin assembly protein (PICALM) PLAU Urokinase-type plasminogen activator (PLAU) PLXNC1 Plexin C1 (PLXNC1) PRNP Prion protein PSEN1 presenilin 1 protein (PSEN1) PSEN2 presenilin 2 protein (PSEN2) PTPRA protein tyrosine phosphatase receptor type A protein (PTPRA) RALGPS2 Ral GEF with PH domain and SH3 binding motif 2 (RALGPS2) RGSL2 regulator of G-protein signaling like 2 (RGSL2) SELENBP1 Selenium binding protein 1 (SELNBP1) SLC25A37 Mitoferrin-1 SORL1 sortilin-related receptor L(DLR class) A repeats-containing protein (SORL1) TF Transferrin TFAM Mitochondrial transcription factor A TNF Tumor necrosis factor TNFRSF10C Tumor necrosis factor receptor superfamily member 10C (TNFRSF10C) TNF SF10 Tumor necrosis factor receptor superfamily, (TRAIL) member 10a (TNFSF10) UBA1 ubiquitin-like modifier activating enzyme 1 (UBA1) UBA3 NEDD8-activating enzyme E1 catalytic subunit protein (UBE1C) UBB ubiquitin B protein (UBB) UBQLN1 Ubiquilin-1 UCHL1 ubiquitin carboxyl-terminal esterase L1 protein (UCHL1) UCHL3 ubiquitin carboxyl-terminal hydrolase isozyme L3 protein (UCHL3) VLDLR very low density lipoprotein receptor protein (VLDLR)

[0652] In exemplary embodiments, the proteins associated with AD whose chromosomal sequence is edited may be the very low density lipoprotein receptor protein (VLDLR) encoded by the VLDLR gene, the ubiquitin-like modifier activating enzyme 1 (UBA1) encoded by the UBA1 gene, the NEDD8-activating enzyme E1 catalytic subunit protein (UBE1C) encoded by the UBA3 gene, the aquaporin 1 protein (AQP1) encoded by the AQP1 gene, the ubiquitin carboxyl-terminal esterase L1 protein (UCHL1) encoded by the UCHL1 gene, the ubiquitin carboxyl-terminal hydrolase isozyme L3 protein (UCHL3) encoded by the UCHL3 gene, the ubiquitin B protein (UBB) encoded by the UBB gene, the microtubule-associated protein tau (MAPT) encoded by the MAPT gene, the protein tyrosine phosphatase receptor type A protein (PTPRA) encoded by the PTPRA gene, the phosphatidylinositol binding clathrin assembly protein (PICALM) encoded by the PICALM gene, the clusterin protein (also known as apoplipoprotein J) encoded by the CLU gene, the presenilin 1 protein encoded by the PSEN1 gene, the presenilin 2 protein encoded by the PSEN2 gene, the sortilin-related receptor L(DLR class) A repeats-containing protein (SORL1) protein encoded by the SORL1 gene, the amyloid precursor protein (APP) encoded by the APP gene, the Apolipoprotein E precursor (APOE) encoded by the APOE gene, or the brain-derived neurotrophic factor (BDNF) encoded by the BDNF gene. In an exemplary embodiment, the genetically modified animal is a rat, and the edited chromosomal sequence encoding the protein associated with AD is as as follows: APP amyloid precursor protein (APP) NM_019288 AQP1 aquaporin 1 protein (AQP1) NM_012778 BDNF Brain-derived neurotrophic factor NM_012513 CLU clusterin protein (also known as NM_053021 apoplipoprotein J) MAPT microtubule-associated protein NM_017212 tau (MAPT) PICALM phosphatidylinositol binding NM_053554 clathrin assembly protein (PICALM) PSEN1 presenilin 1 protein (PSEN1) NM_019163 PSEN2 presenilin 2 protein (PSEN2) NM_031087 PTPRA protein tyrosine phosphatase NM_012763 receptor type A protein (PTPRA) SORL1 sortilin-related receptor L(DLR NM_053519, class) A repeats-containing XM_001065506, protein (SORL1) XM_217115 UBA1 ubiquitin-like modifier activating NM_001014080 enzyme 1 (UBA1) UBA3 NEDD8-activating enzyme E1 NM_057205 catalytic subunit protein (UBE1C) UBB ubiquitin B protein (UBB) NM_138895 UCHL1 ubiquitin carboxyl-terminal NM_017237 esterase L1 protein (UCHL1) UCHL3 ubiquitin carboxyl-terminal NM_001110165 hydrolase isozyme L3 protein (UCHL3) VLDLR very low density lipoprotein NM_013155 receptor protein (VLDLR)

[0653] The animal or cell may comprise 1, 2, 3, 4, 5, 6, 7, 8, 9, 10, 11, 12, 13, 14, 15 or more disrupted chromosomal sequences encoding a protein associated with AD and zero, 1, 2, 3, 4, 5, 6, 7, 8, 9, 10, 11, 12, 13, 14, 15 or more chromosomally integrated sequences encoding a protein associated with AD.

[0654] The edited or integrated chromosomal sequence may be modified to encode an altered protein associated with AD. A number of mutations in AD-related chromosomal sequences have been associated with AD. For instance, the V7171 (i.e. valine at position 717 is changed to isoleucine) missense mutation in APP causes familial AD. Multiple mutations in the presenilin-1 protein, such as H163R (i.e. histidine at position 163 is changed to arginine), A246E (i.e. alanine at position 246 is changed to glutamate), L286V (i.e. leucine at position 286 is changed to valine) and C410Y (i.e. cysteine at position 410 is changed to tyrosine) cause familial Alzheimer's type 3. Mutations in the presenilin-2 protein, such as N141 I (i.e. asparagine at position 141 is changed to isoleucine), M239V (i.e. methionine at position 239 is changed to valine), and D439A (i.e. aspartate at position 439 is changed to alanine) cause familial Alzheimer's type 4. Other associations of genetic variants in AD-associated genes and disease are known in the art. See, for example, Waring et al. (2008) Arch. Neurol. 65:329-334, the disclosure of which is incorporated by reference herein in its entirety.

[0655] Secretase Disorders

[0656] US Patent Publication No. 20110023146, describes use of zinc finger nucleases to genetically modify cells, animals and proteins associated with secretase-associated disorders. Secretases are essential for processing pre-proteins into their biologically active forms. Defects in various components of the secretase pathways contribute to many disorders, particularly those with hallmark amyloid genesis or amyloid plaques, such as Alzheimer's disease (AD).

[0657] A secretase disorder and the proteins associated with these disorders are a diverse set of proteins that effect susceptibility for numerous disorders, the presence of the disorder, the severity of the disorder, or any combination thereof. The present disclosure comprises editing of any chromosomal sequences that encode proteins associated with a secretase disorder. The proteins associated with a secretase disorder are typically selected based on an experimental association of the secretase—related proteins with the development of a secretase disorder. For example, the production rate or circulating concentration of a protein associated with a secretase disorder may be elevated or depressed in a population with a secretase disorder relative to a population without a secretase disorder. Differences in protein levels may be assessed using proteomic techniques including but not limited to Western blot, immunohistochemical staining, enzyme linked immunosorbent assay (ELISA), and mass spectrometry. Alternatively, the protein associated with a secretase disorder may be identified by obtaining gene expression profiles of the genes encoding the proteins using genomic techniques including but not limited to DNA microarray analysis, serial analysis of gene expression (SAGE), and quantitative real-time polymerase chain reaction (Q-PCR).

[0658] By way of non-limiting example, proteins associated with a secretase disorder include PSENEN (presenilin enhancer 2 homolog (C. elegans)), CTSB (cathepsin B), PSEN1 (presenilin 1), APP (amyloid beta (A4) precursor protein), APH1B (anterior pharynx defective 1 homolog B (C. elegans)), PSEN2 (presenilin 2 (Alzheimer disease 4)), BACE1 (beta-site APP-cleaving enzyme 1), ITM2B (integral membrane protein 2B), CTSD (cathepsin D), NOTCH1 (Notch homolog 1, translocation-associated (Drosophila)), TNF (tumor necrosis factor (TNF superfamily, member 2)), INS (insulin), DYT10 (dystonia 10), ADAM17 (ADAM metallopeptidase domain 17), APOE (apolipoprotein E), ACE (angiotensin I converting enzyme (peptidyl-dipeptidase A) 1), STN (statin), TP53 (tumor protein p53), IL6 (interleukin 6 (interferon, beta 2)), NGFR (nerve growth factor receptor (TNFR superfamily, member 16)), IL1B (interleukin 1, beta), ACHE (acetylcholinesterase (Yt blood group)), CTNNB1 (catenin (cadherin-associated protein), beta 1, 88 kDa), IGF1 (insulin-like growth factor 1 (somatomedin C)), IFNG (interferon, gamma), NRG1 (neuregulin 1), CASP3 (caspase 3, apoptosis-related cysteine peptidase), MAPK1 (mitogen-activated protein kinase 1), CDH1 (cadherin 1, type 1, E-cadherin (epithelial)), APBB1 (amyloid beta (A4) precursor protein-binding, family B, member 1 (Fe65)), HMGCR β-hydroxy-3-methylglutaryl-Coenzyme A reductase), CREB1 (cAMP responsive element binding protein 1), PTGS2 (prostaglandin-endoperoxide synthase 2 (prostaglandin G/H synthase and cyclooxygenase)), HES1 (hairy and enhancer of split 1, (Drosophila)), CAT (catalase), TGEB1 (transforming growth factor, beta 1), ENO2 (enolase 2 (gamma, neuronal)), ERBB4 (v-erb-a erythroblastic leukemia viral oncogene homolog 4 (avian)), TRAPPC10 (trafficking protein particle complex 10), MAOB (monoamine oxidase B), NGF (nerve growth factor (beta polypeptide)), MMP12 (matrix metallopeptidase 12 (macrophage elastase)), JAG1 (jagged 1 (Alagille syndrome)), CD40LG (CD40 ligand), PPARG (peroxisome proliferator-activated receptor gamma), FGF2 (fibroblast growth factor 2 (basic)), IL3 (interleukin 3 (colony-stimulating factor, multiple)), LRP1 (low density lipoprotein receptor-related protein 1), NOTCH4 (Notch homolog 4 (Drosophila)), MAPK8 (mitogen-activated protein kinase 8), PREP (prolyl endopeptidase), NOTCH3 (Notch homolog 3 (Drosophila)), PRNP (prion protein), CTSG (cathepsin G), EGF (epidermal growth factor (beta-urogastrone)), REN (renin), CD44 (CD44 molecule (Indian blood group)), SELP (selectin P (granule membrane protein 140 kDa, antigen CD62)), GHR (growth hormone receptor), ADCYAP1 (adenylate cyclase activating polypeptide 1 (pituitary)), INSR (insulin receptor), GFAP (glial fibrillary acidic protein), MMP3 (matrix metallopeptidase 3 (stromelysin 1, progelatinase)), MAPK10 (mitogen-activated protein kinase 10), SP1 (Sp1 transcription factor), MYC (v-myc myelocytomatosis viral oncogene homolog (avian)), CTSE (cathepsin E), PPARA (peroxisome proliferator-activated receptor alpha), JUN (jun oncogene), TIMP1 (TIMP metallopeptidase inhibitor 1), IL5 (interleukin 5 (colony-stimulating factor, eosinophil)), ILIA (interleukin 1, alpha), MMP9 (matrix metallopeptidase 9 (gelatinase B, 92 kDa gelatinase, 92 kDa type IV collagenase)), HTR4 (5-hydroxytryptamine (serotonin) receptor 4), HSPG2 (heparan sulfate proteoglycan 2), KRAS (v-Ki-ras2 Kirsten rat sarcoma viral oncogene homolog), CYCS (cytochrome c, somatic), SMG1 (SMG1 homolog, phosphatidylinositol 3-kinase-related kinase (C. elegans)), IL1R1 (interleukin 1 receptor, type I), PROK1 (prokineticin 1), MAPK3 (mitogen-activated protein kinase 3), NTRK1 (neurotrophic tyrosine kinase, receptor, type 1), IL13 (interleukin 13), MME (membrane metallo-endopeptidase), TKT (transketolase), CXCR2 (chemokine (C-X-C motif) receptor 2), IGF1R (insulin-like growth factor 1 receptor), RARA (retinoic acid receptor, alpha), CREBBP (CREB binding protein), PTGS1 (prostaglandin-endoperoxide synthase 1 (prostaglandin G/H synthase and cyclooxygenase)), GALT (galactose-1-phosphate uridylyltransferase), CHRM1 (cholinergic receptor, muscarinic 1), ATXN1 (ataxin 1), PAWR (PRKC, apoptosis, WT1, regulator), NOTCH2 (Notch homolog 2 (Drosophila)), M6PR (mannose-6-phosphate receptor (cation dependent)), CYP46A1 (cytochrome P450, family 46, subfamily A, polypeptide 1), CSNK1 D (casein kinase 1, delta), MAPK14 (mitogen-activated protein kinase 14), PRG2 (proteoglycan 2, bone marrow (natural killer cell activator, eosinophil granule major basic protein)), PRKCA (protein kinase C, alpha), L 1 CAM (L1 cell adhesion molecule), CD40 (CD40 molecule, TNF receptor superfamily member 5), NR1I2 (nuclear receptor subfamily 1, group I, member 2), JAG2 (jagged 2), CTNND1 (catenin (cadherin-associated protein), delta 1), CDH2 (cadherin 2, type 1, N-cadherin (neuronal)), CMA1 (chymase 1, mast cell), SORT1 (sortilin 1), DLK1 (delta-like 1 homolog (Drosophila)), THEM4 (thioesterase superfamily member 4), JUP (junction plakoglobin), CD46 (CD46 molecule, complement regulatory protein), CCL11 (chemokine (C-C motif) ligand 11), CAV3 (caveolin 3), RNASE3 (ribonuclease, RNase A family, 3 (eosinophil cationic protein)), HSPA8 (heat shock 70 kDa protein 8), CASP9 (caspase 9, apoptosis-related cysteine peptidase), CYP3A4 (cytochrome P450, family 3, subfamily A, polypeptide 4), CCR3 (chemokine (C-C motif) receptor 3), TFAP2A (transcription factor AP-2 alpha (activating enhancer binding protein 2 alpha)), SCP2 (sterol carrier protein 2), CDK4 (cyclin-dependent kinase 4), HIF1A (hypoxia inducible factor 1, alpha subunit (basic helix-loop-helix transcription factor)), TCF7L2 (transcription factor 7-like 2 (T-cell specific, HMG-box)), IL1R2 (interleukin 1 receptor, type II), B3GALTL (beta 1,3-galactosyltransferase-like), MDM2 (Mdm2 p53 binding protein homolog (mouse)), RELA (v-rel reticuloendotheliosis viral oncogene homolog A (avian)), CASP7 (caspase 7, apoptosis-related cysteine peptidase), IDE (insulin-degrading enzyme), FABP4 (fatty acid binding protein 4, adipocyte), CASK (calcium/calmodulin-dependent serine protein kinase (MAGUK family)), ADCYAP1R1 (adenylate cyclase activating polypeptide 1 (pituitary) receptor type I), ATF4 (activating transcription factor 4 (tax-responsive enhancer element B67)), PDGFA (platelet-derived growth factor alpha polypeptide), C21 or f33 (chromosome 21 open reading frame 33), SCGS (secretogranin V (7B2 protein)), RNF123 (ring finger protein 123), NFKB1 (nuclear factor of kappa light polypeptide gene enhancer in B-cells 1), ERBB2 (v-erb-b2 erythroblastic leukemia viral oncogene homolog 2, neuro/glioblastoma derived oncogene homolog (avian)), CAV1 (caveolin 1, caveolae protein, 22 kDa), MMP7 (matrix metallopeptidase 7 (matrilysin, uterine)), TGFA (transforming growth factor, alpha), RXRA (retinoid X receptor, alpha), STX1A (syntaxin 1A (brain)), PSMC4 (proteasome (prosome, macropain) 26S subunit, ATPase, 4), P2RY2 (purinergic receptor P2Y, G-protein coupled, 2), TNFRSF21 (tumor necrosis factor receptor superfamily, member 21), DLG1 (discs, large homolog 1 (Drosophila)), NUMBL (numb homolog (Drosophila)-like), SPN (sialophorin), PLSCR1 (phospholipid scramblase 1), UBQLN2 (ubiquilin 2), UBQLN1 (ubiquilin 1), PCSK7 (proprotein convertase subtilisin/kexin type 7), SPON1 (spondin 1, extracellular matrix protein), SILV (silver homolog (mouse)), QPCT (glutaminyl-peptide cyclotransferase), HESS (hairy and enhancer of split 5 (Drosophila)), GCC1 (GRIP and coiled-coil domain containing 1), and any combination thereof.

[0659] The genetically modified animal or cell may comprise 1, 2, 3, 4, 5, 6, 7, 8, 9, 10 or more disrupted chromosomal sequences encoding a protein associated with a secretase disorder and zero, 1, 2, 3, 4, 5, 6, 7, 8, 9, 10 or more chromosomally integrated sequences encoding a disrupted protein associated with a secretase disorder.

### ALS

[0660] US Patent Publication No. 20110023144, describes use of zinc finger nucleases to genetically modify cells, animals and proteins associated with amyotrophyic lateral sclerosis (ALS) disease. ALS is characterized by the gradual steady degeneration of certain nerve cells in the brain cortex, brain stem, and spinal cord involved in voluntary movement.

[0661] Motor neuron disorders and the proteins associated with these disorders are a diverse set of proteins that effect susceptibility for developing a motor neuron disorder, the presence of the motor neuron disorder, the severity of the motor neuron disorder or any combination thereof. The present disclosure comprises editing of any chromosomal sequences that encode proteins associated with ALS disease, a specific motor neuron disorder. The proteins associated with ALS are typically selected based on an experimental association of ALS-related proteins to ALS. For example, the production rate or circulating concentration of a protein associated with ALS may be elevated or depressed in a population with ALS relative to a population without ALS. Differences in protein levels may be assessed using proteomic techniques including but not limited to Western blot, immunohistochemical staining, enzyme linked immunosorbent assay (ELISA), and mass spectrometry. Alternatively, the proteins associated with ALS may be identified by obtaining gene expression profiles of the genes encoding the proteins using genomic techniques including but not limited to DNA microarray analysis, serial analysis of gene expression (SAGE), and quantitative real-time polymerase chain reaction (Q-PCR).

[0662] By way of non-limiting example, proteins associated with ALS include but are not limited to the following proteins: SOD1 superoxide dismutase 1, ALS3 amyotrophic lateral soluble sclerosis 3 SETX senataxin ALSS amyotrophic lateral sclerosis 5 FUS fused in sarcoma ALS7 amyotrophic lateral sclerosis 7 ALS2 amyotrophic lateral DPP6 Dipeptidyl-peptidase 6 sclerosis 2 NEFH neurofilament, heavy PTGS1 prostaglandin-polypeptide endoperoxide synthase 1 SLC1A2 solute carrier family 1 TNFRSF10B tumor necrosis factor (glial high affinity receptor superfamily, glutamate transporter), member 10b member 2 PRPH peripherin HSP90AA1 heat shock protein 90 kDa alpha (cytosolic), class A member 1 GRIA2 glutamate receptor, IFNG interferon, gamma ionotropic, AMPA 2 S 100B S100 calcium binding FGF2 fibroblast growth factor 2 protein B AOX1 aldehyde oxidase 1 CS citrate synthase TARDBP TAR DNA binding protein TXN thioredoxin RAPH1 Ras association MAP3K5 mitogen-activated protein (RaIGDS/AF-6) and kinase 5 pleckstrin homology domains 1 NBEAL1 neurobeachin-like 1 GPX1 glutathione peroxidase 1 ICAlL islet cell autoantigen RAC1 ras-related C3 botulinum 1.69 kDa-like toxin substrate 1 MAPT microtubule-associated ITPR2 inositol 1,4,5- protein tau triphosphate receptor, type 2 ALS2CR4 amyotrophic lateral GLS glutaminase sclerosis 2 (juvenile) chromosome region, candidate 4 ALS2CR8 amyotrophic lateral CNTFR ciliary neurotrophic factor sclerosis 2 (juvenile) receptor chromosome region, candidate 8 ALS2CR11 amyotrophic lateral FOLH1 folate hydrolase 1 sclerosis 2 (juvenile) chromosome region, candidate 11 FAM117B family with sequence P4HB prolyl 4-hydroxylase, similarity 117, member B beta polypeptide CNTF ciliary neurotrophic factor SQSTM1 sequestosome 1 STRADB STE20-related kinase NAIP NLR family, apoptosis adaptor beta inhibitory protein YWHAQ tyrosine 3- SLC33A1 solute carrier family 33 monooxygenase/tryptoph (acetyl-CoA transporter), an 5-monooxygenase member 1 activation protein, theta polypeptide TRAK2 trafficking protein, FIG. 4 FIG. 4 homolog, SAC1 kinesin binding 2 lipid phosphatase domain containing NIF3L1 NIF3 NGG1 interacting INA internexin neuronal factor 3-like 1 intermediate filament protein, alpha PARD3B par-3 partitioning COX8A cytochrome c oxidase defective 3 homolog B subunit VIIIA CDK15 cyclin-dependent kinase HECW1 HECT, C2 and WW 15 domain containing E3 ubiquitin protein ligase 1 NOS1 nitric oxide synthase 1 MET met proto-oncogene SOD2 superoxide dismutase 2, HSPB1 heat shock 27 kDa mitochondrial protein 1 NEFL neurofilament, light CTSB cathepsin B polypeptide ANG angiogenin, HSPA8 heat shock 70 kDa ribonuclease, RNase A protein 8 family, 5 VAPB VAMP (vesicle-ESR1 estrogen receptor 1 associated membrane protein)-associated protein B and C SNCA synuclein, alpha HGF hepatocyte growth factor CAT catalase ACTB actin, beta NEFM neurofilament, medium TH tyrosine hydroxylase polypeptide BCL2 B-cell CLL/lymphoma 2 FAS Fas (TNF receptor superfamily, member 6) CASP3 caspase 3, apoptosis-CLU clusterin related cysteine peptidase SMN1 survival of motor neuron G6PD glucose-6-phosphate 1, telomeric dehydrogenase BAX BCL2-associated X HSF1 heat shock transcription protein factor 1 RNF19A ring finger protein 19A JUN jun oncogene ALS2CR12 amyotrophic lateral HSPAS heat shock 70 kDa sclerosis 2 (juvenile) protein 5 chromosome region, candidate 12 MAPK14 mitogen-activated protein IL10 interleukin 10 kinase 14 APEX1 APEX nuclease TXNRD1 thioredoxin reductase 1 (multifunctional DNA repair enzyme) 1 NOS2 nitric oxide synthase 2, TIMP1 TIMP metallopeptidase inducible inhibitor 1 CASP9 caspase 9, apoptosis-XIAP X-linked inhibitor of related cysteine apoptosis peptidase GLG1 golgi glycoprotein 1 EPO erythropoietin VEGFA vascular endothelial ELN elastin growth factor A GDNF glial cell derived NFE2L2 nuclear factor (erythroid-neurotrophic factor derived 2)-like 2 SLC6A3 solute carrier family 6 HSPA4 heat shock 70 kDa (neurotransmitter protein 4 transporter, dopamine), member 3 APOE apolipoprotein E PSMB8 proteasome (prosome, macropain) subunit, beta type, 8 DCTN1 dynactin 1 TIMP3 TIMP metallopeptidase inhibitor 3 KIFAP3 kinesin-associated SLC1A1 solute carrier family 1 protein 3 (neuronal/epithelial high affinity glutamate transporter, system Xag), member 1 SMN2 survival of motor neuron CCNC cyclin C 2, centromeric MPP4 membrane protein, STUB1 STIP1 homology and U-palmitoylated 4 box containing protein 1 ALS2 amyloid beta (A4) PRDX6 peroxiredoxin 6 precursor protein SYP synaptophysin CABIN1 calcineurin binding protein 1 CASP1 caspase 1, apoptosis-GART phosphoribosylglycinami related cysteine de formyltransferase, peptidase phosphoribosylglycinami de synthetase, phosphoribosylaminoimi dazole synthetase CDK5 cyclin-dependent kinase 5 ATXN3 ataxin 3 RTN4 reticulon 4 C1QB complement component 1, q subcomponent, B chain VEGFC nerve growth factor HTT huntingtin receptor PARK7 Parkinson disease 7 XDH xanthine dehydrogenase GFAP glial fibrillary acidic MAP2 microtubule-associated protein protein 2 CYCS cytochrome c, somatic FCGR3B Fc fragment of IgG, low affinity IIIb, CCS copper chaperone for UBL5 ubiquitin-like 5 superoxide dismutase MMP9 matrix metallopeptidase SLC18A3 solute carrier family 18 9 ((vesicular acetylcholine), member 3 TRPM7 transient receptor HSPB2 heat shock 27 kDa potential cation channel, protein 2 subfamily M, member 7 AKT1 v-akt murine thymoma DERL1 Der1-like domain family, viral oncogene homolog 1 member 1 CCL2 chemokine (C-C motif) NGRN neugrin, neurite ligand 2 outgrowth associated GSR glutathione reductase TPPP3 tubulin polymerization-promoting protein family member 3 APAF1 apoptotic peptidase BTBD10 BTB (POZ) domain activating factor 1 containing 10 GLUD1 glutamate CXCR4 chemokine (C-X-C motif) dehydrogenase 1 receptor 4 SLC1A3 solute carrier family 1 FLT1 fms-related tyrosine (glial high affinity glutamate transporter), member 3 kinase 1 PON1 paraoxonase 1 AR androgen receptor LIF leukemia inhibitory factor ERBB3 v-erb-b2 erythroblastic leukemia viral oncogene homolog 3 LGALS1 lectin, galactoside-CD44 CD44 molecule binding, soluble, 1 TP53 tumor protein p53 TLR3 toll-like receptor 3 GRIA1 glutamate receptor, GAPDH glyceraldehyde-3-ionotropic, AMPA 1 phosphate dehydrogenase GRIK1 glutamate receptor, DES desmin ionotropic, kainate 1 CHAT choline acetyltransferase FLT4 fms-related tyrosine kinase 4 CHMP2B chromatin modifying BAG1 BCL2-associated protein 2B athanogene MT3 metallothionein 3 CHRNA4 cholinergic receptor, nicotinic, alpha 4 GSS glutathione synthetase BAK1 BCL2-antagonist/killer 1 KDR kinase insert domain GSTP1 glutathione S-transferase receptor (a type III pi 1 receptor tyrosine kinase) OGG1 8-oxoguanine DNA IL6 interleukin 6 (interferon, glycosylase beta 2).

[0663] The animal or cell may comprise 1, 2, 3, 4, 5, 6, 7, 8, 9, 10 or more disrupted chromosomal sequences encoding a protein associated with ALS and zero, 1, 2, 3, 4, 5, 6, 7, 8, 9, 10 or more chromosomally integrated sequences encoding the disrupted protein associated with ALS. Preferred proteins associated with ALS include SOD1 (superoxide dismutase 1), ALS2 (amyotrophic lateral sclerosis 2), FUS (fused in sarcoma), TARDBP (TAR DNA binding protein), VAGFA (vascular endothelial growth factor A), VAGFB (vascular endothelial growth factor B), and VAGFC (vascular endothelial growth factor C), and any combination thereof.

### Autism

[0664] US Patent Publication No. 20110023145, describes use of zinc finger nucleases to genetically modify cells, animals and proteins associated with autism spectrum disorders (ASD). Autism spectrum disorders (ASDs) are a group of disorders characterized by qualitative impairment in social interaction and communication, and restricted repetitive and stereotyped patterns of behavior, interests, and activities. The three disorders, autism, Asperger syndrome (AS) and pervasive developmental disorder-not otherwise specified (PDD-NOS) are a continuum of the same disorder with varying degrees of severity, associated intellectual functioning and medical conditions. ASDs are predominantly genetically determined disorders with a heritability of around 90%.

[0665] US Patent Publication No. 20110023145 comprises editing of any chromosomal sequences that encode proteins associated with ASD which may be applied to the CRISPR Cas system of the present invention. The proteins associated with ASD are typically selected based on an experimental association of the protein associated with ASD to an incidence or indication of an ASD. For example, the production rate or circulating concentration of a protein associated with ASD may be elevated or depressed in a population having an ASD relative to a population lacking the ASD. Differences in protein levels may be assessed using proteomic techniques including but not limited to Western blot, immunohistochemical staining, enzyme linked immunosorbent assay (ELISA), and mass spectrometry. Alternatively, the proteins associated with ASD may be identified by obtaining gene expression profiles of the genes encoding the proteins using genomic techniques including but not limited to DNA microarray analysis, serial analysis of gene expression (SAGE), and quantitative real-time polymerase chain reaction (Q-PCR).

[0666] Non limiting examples of disease states or disorders that may be associated with proteins associated with ASD include autism, Asperger syndrome (AS), pervasive developmental disorder-not otherwise specified (PDD-NOS), Rett's syndrome, tuberous sclerosis, phenylketonuria, Smith-Lemli-Opitz syndrome and fragile X syndrome. By way of non-limiting example, proteins associated with ASD include but are not limited to the following proteins: ATP10C aminophospholipid-MET MET receptor transporting ATPase tyrosine kinase (ATP10C) BZRAP1 MGLUR5 (GRM5) Metabotropic glutamate receptor 5 (MGLUR5) CDH10 Cadherin-10 MGLUR6 (GRM6) Metabotropic glutamate receptor 6 (MGLUR6) CDH9 Cadherin-9 NLGN1 Neuroligin-1 CNTN4 Contactin-4 NLGN2 Neuroligin-2 CNTNAP2 Contactin-associated SEMASA Neuroligin-3 protein-like 2 (CNTNAP2) DHCR7 7-dehydrocholesterol NLGN4X Neuroligin-4 X-reductase (DHCR7) linked DOC2A Double C2-like domain-NLGN4Y Neuroligin-4 Y-containing protein alpha linked DPP6 Dipeptidyl NLGN5 Neuroligin-5 aminopeptidase-like protein 6 EN2 engrailed 2 (EN2) NRCAM Neuronal cell adhesion molecule (NRCAM) MDGA2 fragile X mental retardation NRXN1 Neurexin-1 1 (MDGA2) FMR2 (AFF2) AF4/FMR2 family member 2 OR4M2 Olfactory receptor (AFF2) 4M2 FOXP2 Forkhead box protein P2 OR4N4 Olfactory receptor (FOXP2) 4N4 FXR1 Fragile X mental OXTR oxytocin receptor retardation, autosomal (OXTR) homolog 1 (FXR1) FXR2 Fragile X mental PAH phenylalanine retardation, autosomal hydroxylase (PAH) homolog 2 (FXR2) GABRA1 Gamma-aminobutyric acid PTEN Phosphatase and receptor subunit alpha-1 tensin homologue (GABRA1) (PTEN) GABRA5 GABAA (.gamma.-aminobutyric PTPRZ1 Receptor-type acid) receptor alpha 5 tyrosine-protein subunit (GABRA5) phosphatase zeta (PTPRZ1) GABRB1 Gamma-aminobutyric acid RELN Reelin receptor subunit beta-1 (GABRB1) GABRB3 GABAA (.gamma.-aminobutyric RPL10 60S ribosomal acid) receptor.beta.3 subunit protein L10 (GABRB3) GABRG1 Gamma-aminobutyric acid SEMASA Semaphorin-5A receptor subunit gamma-1 (SEMASA) (GABRG1) HIRIP3 HIRA-interacting protein 3 SEZ6L2 seizure related 6 homolog (mouse)-like 2 HOXA1 Homeobox protein Hox-A1 SHANK3 SH3 and multiple (HOXA1) ankyrin repeat domains 3 (SHANK3) IL6 Interleukin-6 SHBZRAP1 SH3 and multiple ankyrin repeat domains 3 (SHBZRAP1) LAMB1 Laminin subunit beta-1 SLC6A4 Serotonin (LAMB 1) transporter (SERT) MAPK3 Mitogen-activated protein TAS2R1 Taste receptor kinase 3 type 2 member 1 TAS2R1 MAZ Myc-associated zinc finger TSC1 Tuberous sclerosis protein protein 1 MDGA2 MAM domain containing TSC2 Tuberous sclerosis glycosylphosphatidylinositol protein 2 anchor 2 (MDGA2) MECP2 Methyl CpG binding UBE3A Ubiquitin protein protein 2 (MECP2) ligase E3A (UBE3A) MECP2 methyl CpG binding WNT2 Wingless-type protein 2 (MECP2) MMTV integration site family, member 2 (WNT2)

[0667] The identity of the protein associated with ASD whose chromosomal sequence is edited can and will vary. In preferred embodiments, the proteins associated with ASD whose chromosomal sequence is edited may be the benzodiazapine receptor (peripheral) associated protein 1 (BZRAP1) encoded by the BZRAP1 gene, the AF4/FMR2 family member 2 protein (AFF2) encoded by the AFF2 gene (also termed MFR2), the fragile X mental retardation autosomal homolog 1 protein (FXR1) encoded by the FXR1 gene, the fragile X mental retardation autosomal homolog 2 protein (FXR2) encoded by the FXR2 gene, the MAM domain containing glycosylphosphatidylinositol anchor 2 protein (MDGA2) encoded by the MDGA2 gene, the methyl CpG binding protein 2 (MECP2) encoded by the MECP2 gene, the metabotropic glutamate receptor 5 (MGLUR5) encoded by the MGLUR5-1 gene (also termed GRM5), the neurexin 1 protein encoded by the NRXN1 gene, or the semaphorin-5A protein (SEMA5A) encoded by the SEMA5A gene. In an exemplary embodiment, the genetically modified animal is a rat, and the edited chromosomal sequence encoding the protein associated with ASD is as listed below: BZRAP1 benzodiazapine receptor XM_002727789, (peripheral) associated XM_213427, protein 1 (BZRAP1) XM_002724533, XM_001081125 AFF2 (FMR2) AF4/FMR2 family member 2 XM_219832, (AFF2) XM_001054673 FXR1 Fragile X mental NM_001012179 retardation, autosomal homolog 1 (FXR1) FXR2 Fragile X mental NM_001100647 retardation, autosomal homolog 2 (FXR2) MDGA2 MAM domain containing NM_199269 glycosylphosphatidylinositol anchor 2 (MDGA2) MECP2 Methyl CpG binding NM_022673 protein 2 (MECP2) MGLUR5 Metabotropic glutamate NM_017012 (GRM5) receptor 5 (MGLUR5) NRXN1 Neurexin-1 NM_021767 SEMA5A Semaphorin-5A (SEMA5A) NM_001107659.

### Trinucleotide Repeat Expansion Disorders

[0668] US Patent Publication No. 20110016540, describes use of zinc finger nucleases to genetically modify cells, animals and proteins associated with trinucleotide repeat expansion disorders. Trinucleotide repeat expansion disorders are complex, progressive disorders that involve developmental neurobiology and often affect cognition as well as sensori-motor functions.

[0669] Trinucleotide repeat expansion proteins are a diverse set of proteins associated with susceptibility for developing a trinucleotide repeat expansion disorder, the presence of a trinucleotide repeat expansion disorder, the severity of a trinucleotide repeat expansion disorder or any combination thereof. Trinucleotide repeat expansion disorders are divided into two categories determined by the type of repeat. The most common repeat is the triplet CAG, which, when present in the coding region of a gene, codes for the amino acid glutamine (Q). Therefore, these disorders are referred to as the polyglutamine (polyQ) disorders and comprise the following diseases: Huntington Disease (HD); Spinobulbar Muscular Atrophy (SBMA); Spinocerebellar Ataxias (SCA types 1, 2, 3, 6, 7, and 17); and Dentatorubro-Pallidoluysian Atrophy (DRPLA). The remaining trinucleotide repeat expansion disorders either do not involve the CAG triplet or the CAG triplet is not in the coding region of the gene and are, therefore, referred to as the non-polyglutamine disorders. The non-polyglutamine disorders comprise Fragile X Syndrome (FRAXA); Fragile XE Mental Retardation (FRAXE); Friedreich Ataxia (FRDA); Myotonic Dystrophy (DM); and Spinocerebellar Ataxias (SCA types 8, and 12).

[0670] The proteins associated with trinucleotide repeat expansion disorders are typically selected based on an experimental association of the protein associated with a trinucleotide repeat expansion disorder to a trinucleotide repeat expansion disorder. For example, the production rate or circulating concentration of a protein associated with a trinucleotide repeat expansion disorder may be elevated or depressed in a population having a trinucleotide repeat expansion disorder relative to a population lacking the trinucleotide repeat expansion disorder. Differences in protein levels may be assessed using proteomic techniques including but not limited to Western blot, immunohistochemical staining, enzyme linked immunosorbent assay (ELISA), and mass spectrometry. Alternatively, the proteins associated with trinucleotide repeat expansion disorders may be identified by obtaining gene expression profiles of the genes encoding the proteins using genomic techniques including but not limited to DNA microarray analysis, serial analysis of gene expression (SAGE), and quantitative real-time polymerase chain reaction (Q-PCR).

[0671] Non-limiting examples of proteins associated with trinucleotide repeat expansion disorders include AR (androgen receptor), FMR1 (fragile X mental retardation 1), HTT (huntingtin), DMPK (dystrophia myotonica-protein kinase), FXN (frataxin), ATXN2 (ataxin 2), ATN1 (atrophin 1), FEN1 (flap structure-specific endonuclease 1), TNRC6A (trinucleotide repeat containing 6A), PABPN1 (poly(A) binding protein, nuclear 1), JPH3 (junctophilin 3), MED15 (mediator complex subunit 15), ATXN1 (ataxin 1), ATXN3 (ataxin 3), TBP (TATA box binding protein), CACNA1A (calcium channel, voltage-dependent, P/Q type, alpha 1A subunit), ATXN80S (ATXN8 opposite strand (non-protein coding)), PPP2R2B (protein phosphatase 2, regulatory subunit B, beta), ATXN7 (ataxin 7), TNRC6B (trinucleotide repeat containing 6B), TNRC6C (trinucleotide repeat containing 6C), CELF3 (CUGBP, Elav-like family member 3), MAB21L1 (mab-21-like 1 (C. elegans)), MSH2 (mutS homolog 2, colon cancer, nonpolyposis type 1 (E. coli)), TMEM185A (transmembrane protein 185A), SIX5 (SIX homeobox 5), CNPY3 (canopy 3 homolog (zebrafish)), FRAXE (fragile site, folic acid type, rare, fra(X)(q28) E), GNB2 (guanine nucleotide binding protein (G protein), beta polypeptide 2), RPL14 (ribosomal protein L14), ATXN8 (ataxin 8), INSR (insulin receptor), TTR (transthyretin), EP400 (ElA binding protein p400), GIGYF2 (GRB10 interacting GYF protein 2), OGG1 (8-oxoguanine DNA glycosylase), STC1 (stanniocalcin 1), CNDP1 (carnosine dipeptidase 1 (metallopeptidase M20 family)), C10orf2 (chromosome 10 open reading frame 2), MAML3 mastermind-like 3 (Drosophila), DKC1 (dyskeratosis congenita 1, dyskerin), PAXIP1 (PAX interacting (with transcription-activation domain) protein 1), CASK (calcium/calmodulin-dependent serine protein kinase (MAGUK family)), MAPT (microtubule-associated protein tau), SP1 (Spl transcription factor), POLG (polymerase (DNA directed), gamma), AFF2 (AF4/FMR2 family, member 2), THB S1 (thrombospondin 1), TP53 (tumor protein p53), ESR1 (estrogen receptor 1), CGGBP1 (CGG triplet repeat binding protein 1), ABT1 (activator of basal transcription 1), KLK3 (kallikrein-related peptidase 3), PRNP (prion protein), JUN (jun oncogene), KCNN3 (potassium intermediate/small conductance calcium-activated channel, subfamily N, member 3), BAX (BCL2-associated X protein), FRAXA (fragile site, folic acid type, rare, fra(X)(q27.3) A (macroorchidism, mental retardation)), KBTBD10 (kelch repeat and BTB (POZ) domain containing 10), MBNL1 (muscleblind-like (Drosophila)), RAD51 (RAD51 homolog (RecA homolog, E. coli) (S. cerevisiae)), NCOA3 (nuclear receptor coactivator 3), ERDA1 (expanded repeat domain, CAG/CTG 1), TSC1 (tuberous sclerosis 1), COMP (cartilage oligomeric matrix protein), GCLC (glutamate-cysteine ligase, catalytic subunit), RRAD (Ras-related associated with diabetes), MSH3 (mutS homolog 3 (E. coli)), DRD2 (dopamine receptor D2), CD44 (CD44 molecule (Indian blood group)), CTCF (CCCTC-binding factor (zinc finger protein)), CCND1 (cyclin D1), CLSPN (claspin homolog (Xenopus laevis)), MEF2A (myocyte enhancer factor 2A), PTPRU (protein tyrosine phosphatase, receptor type, U), GAPDH (glyceraldehyde-3-phosphate dehydrogenase), TRIM22 (tripartite motif-containing 22), WT1 (Wilms tumor 1), AHR (aryl hydrocarbon receptor), GPX1 (glutathione peroxidase 1), TPMT (thiopurine S-methyltransferase), NDP (Norrie disease (pseudoglioma)), ARX (aristaless related homeobox), MUS81 (MUS81 endonuclease homolog (S. cerevisiae)), TYR (tyrosinase (oculocutaneous albinism IA)), EGR1 (early growth response 1), UNG (uracil-DNA glycosylase), NUMBL (numb homolog (Drosophila)-like), FABP2 (fatty acid binding protein 2, intestinal), EN2 (engrailed homeobox 2), CRYGC (crystallin, gamma C), SRP14 (signal recognition particle 14 kDa (homologous Alu RNA binding protein)), CRYGB (crystallin, gamma B), PDCD1 (programmed cell death 1), HOXA1 (homeobox A1), ATXN2L (ataxin 2-like), PMS2 (PMS2 postmeiotic segregation increased 2 (S. cerevisiae)), GLA (galactosidase, alpha), CBL (Cas-Br-M (murine) ecotropic retroviral transforming sequence), FTH1 (ferritin, heavy polypeptide 1), IL12RB2 (interleukin 12 receptor, beta 2), OTX2 (orthodenticle homeobox 2), HOXA5 (homeobox A5), POLG2 (polymerase (DNA directed), gamma 2, accessory subunit), DLX2 (distal-less homeobox 2), SIRPA (signal-regulatory protein alpha), OTX1 (orthodenticle homeobox 1), AHRR (aryl-hydrocarbon receptor repressor), MANF (mesencephalic astrocyte-derived neurotrophic factor), TMEM158 (transmembrane protein 158 (gene/pseudogene)), and ENSG00000078687.

[0672] Preferred proteins associated with trinucleotide repeat expansion disorders include HTT (Huntingtin), AR (androgen receptor), FXN (frataxin), Atxn3 (ataxin), Atxnl (ataxin), Atxn2 (ataxin), Atxn7 (ataxin), Atxn10 (ataxin), DMPK (dystrophia myotonica-protein kinase), Atnl (atrophin 1), CBP (creb binding protein), VLDLR (very low density lipoprotein receptor), and any combination thereof.

### Treating Hearing Diseases

[0673] The present invention also contemplates delivering the CRISPR-Cas system to one or both ears.

[0674] Researchers are looking into whether gene therapy could be used to aid current deafness treatments—namely, cochlear implants. Deafness is often caused by lost or damaged hair cells that cannot relay signals to auditory neurons. In such cases, cochlear implants may be used to respond to sound and transmit electrical signals to the nerve cells. But these neurons often degenerate and retract from the cochlea as fewer growth factors are released by impaired hair cells.

[0675] US patent application 20120328580 describes injection of a pharmaceutical composition into the ear (e.g., auricular administration), such as into the luminae of the cochlea (e.g., the Scala media, Sc vestibulae, and Sc tympani), e.g., using a syringe, e.g., a single-dose syringe. For example, one or more of the compounds described herein can be administered by intratympanic injection (e.g., into the middle ear), and/or injections into the outer, middle, and/or inner ear. Such methods are routinely used in the art, for example, for the administration of steroids and antibiotics into human ears. Injection can be, for example, through the round window of the ear or through the cochlear capsule. Other inner ear administration methods are known in the art (see, e.g., Salt and Plontke, Drug Discovery Today, 10:1299-1306, 2005).

[0676] In another mode of administration, the pharmaceutical composition can be administered in situ, via a catheter or pump. A catheter or pump can, for example, direct a pharmaceutical composition into the cochlear luminae or the round window of the ear and/or the lumen of the colon. Exemplary drug delivery apparatus and methods suitable for administering one or more of the compounds described herein into an ear, e.g., a human ear, are described by McKenna et al., (U.S. Publication No. 2006/0030837) and Jacobsen et al., (U.S. Pat. No. 7,206,639). In some embodiments, a catheter or pump can be positioned, e.g., in the ear (e.g., the outer, middle, and/or inner ear) of a patient during a surgical procedure. In some embodiments, a catheter or pump can be positioned, e.g., in the ear (e.g., the outer, middle, and/or inner ear) of a patient without the need for a surgical procedure.

[0677] Alternatively or in addition, one or more of the compounds described herein can be administered in combination with a mechanical device such as a cochlear implant or a hearing aid, which is worn in the outer ear. An exemplary cochlear implant that is suitable for use with the present invention is described by Edge et al., (U.S. Publication No. 2007/0093878).

[0678] In some embodiments, the modes of administration described above may be combined in any order and can be simultaneous or interspersed.

[0679] Alternatively or in addition, the present invention may be administered according to any of the Food and Drug Administration approved methods, for example, as described in CDER Data Standards Manual, version number 004 (which is available at fda.give/cder/dsm/DRG/drg00301.htm).

[0680] In general, the cell therapy methods described in US patent application 20120328580 can be used to promote complete or partial differentiation of a cell to or towards a mature cell type of the inner ear (e.g., a hair cell) in vitro. Cells resulting from such methods can then be transplanted or implanted into a patient in need of such treatment. The cell culture methods required to practice these methods, including methods for identifying and selecting suitable cell types, methods for promoting complete or partial differentiation of selected cells, methods for identifying complete or partially differentiated cell types, and methods for implanting complete or partially differentiated cells are described below.

[0681] Cells suitable for use in the present invention include, but are not limited to, cells that are capable of differentiating completely or partially into a mature cell of the inner ear, e.g., a hair cell (e.g., an inner and/or outer hair cell), when contacted, e.g., in vitro, with one or more of the compounds described herein. Exemplary cells that are capable of differentiating into a hair cell include, but are not limited to stem cells (e.g., inner ear stem cells, adult stem cells, bone marrow derived stem cells, embryonic stem cells, mesenchymal stem cells, skin stem cells, iPS cells, and fat derived stem cells), progenitor cells (e.g., inner ear progenitor cells), support cells (e.g., Deiters' cells, pillar cells, inner phalangeal cells, tectal cells and Hensen's cells), and/or germ cells. The use of stem cells for the replacement of inner ear sensory cells is described in Li et al., (U.S. Publication No. 2005/0287127) and Li et al., (U.S. patent Ser. No. 11/953,797). The use of bone marrow derived stem cells for the replacement of inner ear sensory cells is described in Edge et al., PCT/US2007/084654. iPS cells are described, e.g., at Takahashi et al., Cell, Volume 131, Issue 5, Pages 861-872 (2007); Takahashi and Yamanaka, Cell 126, 663-76 (2006); Okita et al., Nature 448, 260-262 (2007); Yu, J. et al., Science 318(5858):1917-1920 (2007); Nakagawa et al., Nat. Biotechnol. 26:101-106 (2008); and Zaehres and Scholer, Cell 131(5):834-835 (2007). Such suitable cells can be identified by analyzing (e.g., qualitatively or quantitatively) the presence of one or more tissue specific genes. For example, gene expression can be detected by detecting the protein product of one or more tissue-specific genes. Protein detection techniques involve staining proteins (e.g., using cell extracts or whole cells) using antibodies against the appropriate antigen. In this case, the appropriate antigen is the protein product of the tissue-specific gene expression. Although, in principle, a first antibody (i.e., the antibody that binds the antigen) can be labeled, it is more common (and improves the visualization) to use a second antibody directed against the first (e.g., an anti-IgG). This second antibody is conjugated either with fluorochromes, or appropriate enzymes for colorimetric reactions, or gold beads (for electron microscopy), or with the biotin-avidin system, so that the location of the primary antibody, and thus the antigen, can be recognized.

[0682] The CRISPR Cas molecules of the present invention may be delivered to the ear by direct application of pharmaceutical composition to the outer ear, with compositions modified from US Published application, 20110142917. In some embodiments the pharmaceutical composition is applied to the ear canal. Delivery to the ear may also be referred to as aural or otic delivery.

[0683] Qi et al. discloses methods for efficient siRNA transfection to the inner ear through the intact round window by a novel proteidic delivery technology which may be applied to the nucleic acid-targeting system of the present invention (see, e.g., Qi et al., Gene Therapy (2013), 1-9). In particular, a TAT double stranded RNA-binding domains (TAT-DRBDs), which can transfect Cy3-labeled siRNA into cells of the inner ear, including the inner and outer hair cells, crista ampullaris, macula utriculi and macula sacculi, through intact round-window permeation was successful for delivering double stranded siRNAs in vivo for treating various inner ear ailments and preservation of hearing function. About 40 μl of 10 mM RNA may be contemplated as the dosage for administration to the ear.

[0684] According to Rejali et al. (Hear Res. 2007 June; 228(1-2):180-7), cochlear implant function can be improved by good preservation of the spiral ganglion neurons, which are the target of electrical stimulation by the implant and brain derived neurotrophic factor (BDNF) has previously been shown to enhance spiral ganglion survival in experimentally deafened ears. Rejali et al. tested a modified design of the cochlear implant electrode that includes a coating of fibroblast cells transduced by a viral vector with a BDNF gene insert. To accomplish this type of ex vivo gene transfer, Rejali et al. transduced guinea pig fibroblasts with an adenovirus with a BDNF gene cassette insert, and determined that these cells secreted BDNF and then attached BDNF-secreting cells to the cochlear implant electrode via an agarose gel, and implanted the electrode in the scala tympani. Rejali et al. determined that the BDNF expressing electrodes were able to preserve significantly more spiral ganglion neurons in the basal turns of the cochlea after 48 days of implantation when compared to control electrodes and demonstrated the feasibility of combining cochlear implant therapy with ex vivo gene transfer for enhancing spiral ganglion neuron survival. Such a system may be applied to the nucleic acid-targeting system of the present invention for delivery to the ear.

[0685] Mukherjea et al. (Antioxidants & Redox Signaling, Volume 13, Number 5, 2010) document that knockdown of NOX3 using short interfering (si) RNA abrogated cisplatin ototoxicity, as evidenced by protection of OHCs from damage and reduced threshold shifts in auditory brainstem responses (ABRs). Different doses of siNOX3 (0.3, 0.6, and 0.9 μg) were administered to rats and NOX3 expression was evaluated by real time RT-PCR. The lowest dose of NOX3 siRNA used (0.3 μg) did not show any inhibition of NOX3 mRNA when compared to transtympanic administration of scrambled siRNA or untreated cochleae. However, administration of the higher doses of NOX3 siRNA (0.6 and 0.9 μg) reduced NOX3 expression compared to control scrambled siRNA. Such a system may be applied to the CRISPR Cas system of the present invention for transtympanic administration with a dosage of about 2 mg to about 4 mg of CRISPR Cas for administration to a human.

[0686] Jung et al. (Molecular Therapy, vol. 21 no. 4, 834-841 Apr. 2013) demonstrate that HesS levels in the utricle decreased after the application of siRNA and that the number of hair cells in these utricles was significantly larger than following control treatment. The data suggest that siRNA technology may be useful for inducing repair and regeneration in the inner ear and that the Notch signaling pathway is a potentially useful target for specific gene expression inhibition. Jung et al. injected 8 μg of Hes5 siRNA in 2 μl volume, prepared by adding sterile normal saline to the lyophilized siRNA to a vestibular epithelium of the ear. Such a system may be applied to the nucleic acid-targeting system of the present invention for administration to the vestibular epithelium of the ear with a dosage of about 1 to about 30 mg of CRISPR Cas for administration to a human.

[0687] Gene Targeting in Non-Dividing Cells (Neurones & Muscle)

[0688] Non-dividing (especially non-dividing, fully differentiated) cell types present issues for gene targeting or genome engineering, for example because homologous recombination (HR) is generally suppressed in the G1 cell-cycle phase. However, while studying the mechanisms by which cells control normal DNA repair systems, Durocher discovered a previously unknown switch that keeps HR “off” in non-dividing cells and devised a strategy to toggle this switch back on. Orthwein et al. (Daniel Durocher's lab at the Mount Sinai Hospital in Ottawa, Canada) recently reported (Nature 16142, published online 9 Dec. 2015) have shown that the suppression of HR can be lifted and gene targeting successfully concluded in both kidney (293T) and osteosarcoma (U20S) cells. Tumor suppressors, BRCA1, PALB2 and BRAC2 are known to promote DNA DSB repair by HR. They found that formation of a complex of BRCA1 with PALB2-BRAC2 is governed by a ubiquitin site on PALB2, such that action on the site by an E3 ubiquitin ligase. This E3 ubiquitin ligase is composed of KEAP1 (a PALB2-interacting protein) in complex with cullin-3 (CUL3)-RBX1. PALB2 ubiquitylation suppresses its interaction with BRCA1 and is counteracted by the deubiquitylase USP11, which is itself under cell cycle control. Restoration of the BRCA1-PALB2 interaction combined with the activation of DNA-end resection is sufficient to induce homologous recombination in G1, as measured by a number of methods including a CRISPR-Cas9-based gene-targeting assay directed at USP11 or KEAP1 (expressed from a pX459 vector). However, when the BRCA1-PALB2 interaction was restored in resection-competent G1 cells using either KEAP1 depletion or expression of the PALB2-KR mutant, a robust increase in gene-targeting events was detected.

[0689] Thus, reactivation of HR in cells, especially non-dividing, fully differentiated cell types is preferred, in some embodiments. In some embodiments, promotion of the BRCA1-PALB2 interaction is preferred in some embodiments. In some embodiments, the target ell is a non-dividing cell. In some embodiments, the target cell is a neurone or muscle cell. In some embodiments, the target cell is targeted in vivo. In some embodiments, the cell is in G1 and HR is suppressed. In some embodiments, use of KEAP1 depletion, for example inhibition of expression of KEAP1 activity, is preferred. KEAP1 depletion may be achieved through siRNA, for example as shown in Orthwein et al. Alternatively, expression of the PALB2-KR mutant (lacking all eight Lys residues in the BRCA1-interaction domain is preferred, either in combination with KEAP1 depletion or alone. PALB2-KR interacts with BRCA1 irrespective of cell cycle position. Thus, promotion or restoration of the BRCA1-PALB2 interaction, especially in G1 cells, is preferred in some embodiments, especially where the target cells are non-dividing, or where removal and return (ex vivo gene targeting) is problematic, for example neurone or muscle cells. KEAP1 siRNA is available from ThermoFischer. In some embodiments, a BRCA1-PALB2 complex may be delivered to the G1 cell. In some embodiments, PALB2 deubiquitylation may be promoted for example by increased expression of the deubiquitylase USP11, so it is envisaged that a construct may be provided to promote or up-regulate expression or activity of the deubiquitylase USP11.

### Treating Diseases of the Eye

[0690] The present invention also contemplates delivering the CRISPR-Cas system to one or both eyes.

[0691] In particular embodiments of the invention, the CRISPR-Cas system may be used to correct ocular defects that arise from several genetic mutations further described in Genetic Diseases of the Eye, Second Edition, edited by Elias I. Traboulsi, Oxford University Press, 2012.

[0692] In some embodiments, the condition to be treated or targeted is an eye disorder. In some embodiments, the eye disorder may include glaucoma. In some embodiments, the eye disorder includes a retinal degenerative disease. In some embodiments, the retinal degenerative disease is selected from Stargardt disease, Bardet-Biedl Syndrome, Best disease, Blue Cone Monochromacy, Choroidermia, Cone-rod dystrophy, Congenital Stationary Night Blindness, Enhanced S-Cone Syndrome, Juvenile X-Linked Retinoschisis, Leber Congenital Amaurosis, Malattia Leventinesse, Norrie Disease or X-linked Familial Exudative Vitreoretinopathy, Pattern Dystrophy, Sorsby Dystrophy, Usher Syndrome, Retinitis Pigmentosa, Achromatopsia or Macular dystrophies or degeneration, Retinitis Pigmentosa, Achromatopsia, and age related macular degeneration. In some embodiments, the retinal degenerative disease is Leber Congenital Amaurosis (LCA) or Retinitis Pigmentosa. In some embodiments, the CRISPR system is delivered to the eye, optionally via intravitreal injection or subretinal injection.

[0693] For administration to the eye, lentiviral vectors, in particular equine infectious anemia viruses (EIAV) are particularly preferred.

[0694] In another embodiment, minimal non-primate lentiviral vectors based on the equine infectious anemia virus (EIAV) are also contemplated, especially for ocular gene therapy (see, e.g., Balagaan, J Gene Med 2006; 8: 275-285, Published online 21 Nov. 2005 in Wiley InterScience (www.interscience.wiley.com). DOI: 10.1002/jgm.845). The vectors are contemplated to have cytomegalovirus (CMV) promoter driving expression of the target gene. Intracameral, subretinal, intraocular and intravitreal injections are all contemplated (see, e.g., Balagaan, J Gene Med 2006; 8: 275-285, Published online 21 Nov. 2005 in Wiley InterScience (www.interscience.wiley.com). DOI: 10.1002/jgm.845). Intraocular injections may be performed with the aid of an operating microscope. For subretinal and intravitreal injections, eyes may be prolapsed by gentle digital pressure and fundi visualized using a contact lens system consisting of a drop of a coupling medium solution on the cornea covered with a glass microscope slide coverslip. For subretinal injections, the tip of a 10-mm 34-gauge needle, mounted on a 5-μl Hamilton syringe may be advanced under direct visualization through the superior equatorial sclera tangentially towards the posterior pole until the aperture of the needle was visible in the subretinal space. Then, 2 μl of vector suspension may be injected to produce a superior bullous retinal detachment, thus confirming subretinal vector administration. This approach creates a self-sealing sclerotomy allowing the vector suspension to be retained in the subretinal space until it is absorbed by the RPE, usually within 48 h of the procedure. This procedure may be repeated in the inferior hemisphere to produce an inferior retinal detachment. This technique results in the exposure of approximately 70% of neurosensory retina and RPE to the vector suspension. For intravitreal injections, the needle tip may be advanced through the sclera 1 mm posterior to the corneoscleral limbus and 2 μl of vector suspension injected into the vitreous cavity. For intracameral injections, the needle tip may be advanced through a corneoscleral limbal paracentesis, directed towards the central cornea, and 2 μl of vector suspension may be injected. For intracameral injections, the needle tip may be advanced through a corneoscleral limbal paracentesis, directed towards the central cornea, and 2 μl of vector suspension may be injected. These vectors may be injected at titres of either 1.0-1.4×1010 or 1.0-1.4×109 transducing units (TU)/ml.

[0695] In another embodiment, RetinoStat®, an equine infectious anemia virus-based lentiviral gene therapy vector that expresses angiostatic proteins endostain and angiostatin that is delivered via a subretinal injection for the treatment of the web form of age-related macular degeneration is also contemplated (see, e.g., Binley et al., HUMAN GENE THERAPY 23:980-991 (September 2012)). Such a vector may be modified for the CRISPR-Cas system of the present invention. Each eye may be treated with either RetinoStat® at a dose of 1.1×105 transducing units per eye (TU/eye) in a total volume of 100 μl.

[0696] In another embodiment, an E1-, partial E3-, E4-deleted adenoviral vector may be contemplated for delivery to the eye. Twenty-eight patients with advanced neovascular agerelated macular degeneration (AMD) were given a single intravitreous injection of an E1-, partial E3-, E4-deleted adenoviral vector expressing human pigment ep-ithelium-derived factor (AdPEDF.ll) (see, e.g., Campochiaro et al., Human Gene Therapy 17:167-176 (February 2006)). Doses ranging from 106 to 109.5 particle units (PU) were investigated and there were no serious adverse events related to AdPEDF.11 and no dose-limiting toxicities (see, e.g., Campochiaro et al., Human Gene Therapy 17:167-176 (February 2006)). Adenoviral vectormediated ocular gene transfer appears to be a viable approach for the treatment of ocular disorders and could be applied to the CRISPR Cas system.

[0697] In another embodiment, the sd-rxRNA® system of R×i Pharmaceuticals may be used/and or adapted for delivering CRISPR Cas to the eye. In this system, a single intravitreal administration of 3 μg of sd-rxRNA results in sequence-specific reduction of PPM mRNA levels for 14 days. The sd-rxRNA® system may be applied to the nucleic acid-targeting system of the present invention, contemplating a dose of about 3 to 20 mg of CRISPR administered to a human.

[0698] Millington-Ward et al. (Molecular Therapy, vol. 19 no. 4, 642-649 Apr. 2011) describes adeno-associated virus (AAV) vectors to deliver an RNA interference (RNAi)-based rhodopsin suppressor and a codon-modified rhodopsin replacement gene resistant to suppression due to nucleotide alterations at degenerate positions over the RNAi target site. An injection of either 6.0×108 vp or 1.8×1010 vp AAV were subretinally injected into the eyes by Millington-Ward et al. The AAV vectors of Millington-Ward et al. may be applied to the CRISPR Cas system of the present invention, contemplating a dose of about 2×1011 to about 6×1013 vp administered to a human.

[0699] Dalkara et al. (Sci Transl Med 5, 189ra76 (2013)) also relates to in vivo directed evolution to fashion an AAV vector that delivers wild-type versions of defective genes throughout the retina after noninjurious injection into the eyes' vitreous humor. Dalkara describes a 7mer peptide display library and an AAV library constructed by DNA shuffling of cap genes from AAV1, 2, 4, 5, 6, 8, and 9. The rcAAV libraries and rAAV vectors expressing GFP under a CAG or Rho promoter were packaged and and deoxyribonuclease-resistant genomic titers were obtained through quantitative PCR. The libraries were pooled, and two rounds of evolution were performed, each consisting of initial library diversification followed by three in vivo selection steps. In each such step, P30 rho-GFP mice were intravitreally injected with 2 ml of iodixanol-purified, phosphate-buffered saline (PBS)—dialyzed library with a genomic titer of about 1×10¹² vg/ml. The AAV vectors of Dalkara et al. may be applied to the nucleic acid-targeting system of the present invention, contemplating a dose of about 1×10¹⁵ to about 1×10¹⁶ vg/ml administered to a human.

[0700] In a particular embodiment, the rhodopsin gene may be targeted for the treatment of retinitis pigmentosa (RP), wherein the system of US Patent Publication No. 20120204282 assigned to Sangamo BioSciences, Inc. may be modified in accordance of the CRISPR Cas system of the present invention.

[0701] In another embodiment, the methods of US Patent Publication No. 20130183282 assigned to Cellectis, which is directed to methods of cleaving a target sequence from the human rhodopsin gene, may also be modified to the nucleic acid-targeting system of the present invention.

[0702] US Patent Publication No. 20130202678 assigned to Academia Sinica relates to methods for treating retinopathies and sight-threatening ophthalmologic disorders relating to delivering of the Puf-A gene (which is expressed in retinal ganglion and pigmented cells of eye tissues and displays a unique anti-apoptotic activity) to the sub-retinal or intravitreal space in the eye. In particular, desirable targets are zgc:193933, prdm1a, spata2, tex10, rbb4, ddx3, zp2.2, Blimp-1 and HtrA2, all of which may be targeted by the nucleic acid-targeting system of the present invention.

[0703] Wu (Cell Stem Cell, 13:659-62, 2013) designed a guide RNA that led Cas9 to a single base pair mutation that causes cataracts in mice, where it induced DNA cleavage. Then using either the other wild-type allele or oligos given to the zygotes repair mechanisms corrected the sequence of the broken allele and corrected the cataract-causing genetic defect in mutant mouse.

[0704] US Patent Publication No. 20120159653, describes use of zinc finger nucleases to genetically modify cells, animals and proteins associated with macular degeration (MD). Macular degeneration (MD) is the primary cause of visual impairment in the elderly, but is also a hallmark symptom of childhood diseases such as Stargardt disease, Sorsby fundus, and fatal childhood neurodegenerative diseases, with an age of onset as young as infancy. Macular degeneration results in a loss of vision in the center of the visual field (the macula) because of damage to the retina. Currently existing animal models do not recapitulate major hallmarks of the disease as it is observed in humans. The available animal models comprising mutant genes encoding proteins associated with MD also produce highly variable phenotypes, making translations to human disease and therapy development problematic.

[0705] One aspect of US Patent Publication No. 20120159653 relates to editing of any chromosomal sequences that encode proteins associated with MD which may be applied to the nucleic acid-targeting system of the present invention. The proteins associated with MD are typically selected based on an experimental association of the protein associated with MD to an MD disorder. For example, the production rate or circulating concentration of a protein associated with MD may be elevated or depressed in a population having an MD disorder relative to a population lacking the MD disorder. Differences in protein levels may be assessed using proteomic techniques including but not limited to Western blot, immunohistochemical staining, enzyme linked immunosorbent assay (ELISA), and mass spectrometry. Alternatively, the proteins associated with MD may be identified by obtaining gene expression profiles of the genes encoding the proteins using genomic techniques including but not limited to DNA microarray analysis, serial analysis of gene expression (SAGE), and quantitative real-time polymerase chain reaction (Q-PCR).

[0706] By way of non-limiting example, proteins associated with MD include but are not limited to the following proteins: (ABCA4) ATP-binding cassette, sub-family A (ABC1), member 4 ACHM1 achromatopsia (rod monochromacy) 1 ApoE Apolipoprotein E (ApoE) C1QTNF5 (CTRP5) C1q and tumor necrosis factor related protein 5 (C1QTNF5) C2 Complement component 2 (C2) C3 Complement components (C3) CCL2 Chemokine (C-C motif) Ligand 2 (CCL2) CCR2 Chemokine (C-C motif) receptor 2 (CCR2) CD36 Cluster of Differentiation 36 CFB Complement factor B CFH Complement factor CFH H CFHR1 complement factor H-related 1 CFHR3 complement factor H-related 3 CNGB3 cyclic nucleotide gated channel beta 3 CP ceruloplasmin (CP) CRP C reactive protein (CRP) CST3 cystatin C or cystatin 3 (CST3) CTSD Cathepsin D (CTSD) CX3CR1 chemokine (C-X3-C motif) receptor 1 ELOVL4 Elongation of very long chain fatty acids 4 ERCC6 excision repair crosscomplementing rodent repair deficiency, complementation group 6 FBLNS Fibulin-5 FBLNS Fibulin 5 FBLN6 Fibulin 6 FSCN2 fascin (FSCN2) HMCN1 Hemicentrin 1 HMCN1 hemicentin 1 HTRA1 HtrA serine peptidase 1 (HTRA1) HTRA1 HtrA serine peptidase 1 IL-6 Interleukin 6 IL-8 Interleukin 8 LOC387715 Hypothetical protein PLEKHA1 Pleckstrin homology domain containing family A member 1 (PLEKHA1) PROM1 Prominin 1(PROM1 or CD133) PRPH2 Peripherin-2 RPGR retinitis pigmentosa GTPase regulator SERPING1 serpin peptidase inhibitor, clade G, member 1 (C1- inhibitor) TCOF1 Treacle TIMP3 Metalloproteinase inhibitor 3 (TIMP3) TLR3 Toll-like receptor 3.

[0707] The identity of the protein associated with MD whose chromosomal sequence is edited can and will vary. In preferred embodiments, the proteins associated with MD whose chromosomal sequence is edited may be the ATP-binding cassette, sub-family A (ABC1) member 4 protein (ABCA4) encoded by the ABCR gene, the apolipoprotein E protein (APOE) encoded by the APOE gene, the chemokine (C-C motif) Ligand 2 protein (CCL2) encoded by the CCL2 gene, the chemokine (C-C motif) receptor 2 protein (CCR2) encoded by the CCR2 gene, the ceruloplasmin protein (CP) encoded by the CP gene, the cathepsin D protein (CTSD) encoded by the CTSD gene, or the metalloproteinase inhibitor 3 protein (TIMP3) encoded by the TIMP3 gene. In an exemplary embodiment, the genetically modified animal is a rat, and the edited chromosomal sequence encoding the protein associated with MD may be: (ABCA4) ATPbinding cassette, NM_000350 sub-family A (ABC1), member 4 APOE Apolipoprotein E NM_138828 (APOE) CCL2 Chemokine (C-C NM_031530 motif) Ligand 2 (CCL2) CCR2 Chemokine (C-C NM_021866 motif) receptor 2 (CCR2) CP ceruloplasmin (CP) NM_012532 CTSD Cathepsin D (CTSD) NM_134334 TIMP3 Metalloproteinase NM_012886 inhibitor 3 (TIMP3) The animal or cell may comprise 1, 2, 3, 4, 5, 6, 7 or more disrupted chromosomal sequences encoding a protein associated with MD and zero, 1, 2, 3, 4, 5, 6, 7 or more chromosomally integrated sequences encoding the disrupted protein associated with MD.

[0708] The edited or integrated chromosomal sequence may be modified to encode an altered protein associated with MD. Several mutations in MD-related chromosomal sequences have been associated with MD. Non-limiting examples of mutations in chromosomal sequences associated with MD include those that may cause MD including in the ABCR protein, E471K (i.e. glutamate at position 471 is changed to lysine), R1129L (i.e. arginine at position 1129 is changed to leucine), T1428M (i.e. threonine at position 1428 is changed to methionine), R15175 (i.e. arginine at position 1517 is changed to serine), I1562T (i.e. isoleucine at position 1562 is changed to threonine), and G1578R (i.e. glycine at position 1578 is changed to arginine); in the CCR2 protein, V64I (i.e. valine at position 192 is changed to isoleucine); in CP protein, G969B (i.e. glycine at position 969 is changed to asparagine or aspartate); in TIMP3 protein, S156C (i.e. serine at position 156 is changed to cysteine), G166C (i.e. glycine at position 166 is changed to cysteine), G167C (i.e. glycine at position 167 is changed to cysteine), Y168C (i.e. tyrosine at position 168 is changed to cysteine), 5170C (i.e. serine at position 170 is changed to cysteine), Y172C (i.e. tyrosine at position 172 is changed to cysteine) and S181C (i.e. serine at position 181 is changed to cysteine). Other associations of genetic variants in MD-associated genes and disease are known in the art.

[0709] CRISPR systems are useful to correct diseases resulting from autosomal dominant genes. For example, CRISPR/Cas9 was used to remove an autosomal dominant gene that causes receptor loss in the eye. Bakondi, B. et al., In Vivo CRISPR/Cas9 Gene Editing Corrects Retinal Dystrophy in the S334ter-3 Rat Model of Autosomal Dominant Retinitis Pigmentosa. Molecular Therapy, 2015; DOI: 10.1038/mt.2015.220.

[0710] Treating Circulatory and Muscular Diseases

[0711] The present invention also contemplates delivering the CRISPR-Cas system described herein to the heart. For the heart, a myocardium tropic adeno-associated virus (AAVM) is preferred, in particular AAVM41 which showed preferential gene transfer in the heart (see, e.g., Lin-Yanga et al., PNAS, Mar. 10, 2009, vol. 106, no. 10). Administration may be systemic or local. A dosage of about 1-10×1014 vector genomes are contemplated for systemic administration. See also, e.g., Eulalio et al. (2012) Nature 492: 376 and Somasuntharam et al. (2013) Biomaterials 34: 7790.

[0712] For example, US Patent Publication No. 20110023139, describes use of zinc finger nucleases to genetically modify cells, animals and proteins associated with cardiovascular disease. Cardiovascular diseases generally include high blood pressure, heart attacks, heart failure, and stroke and TIA. Any chromosomal sequence involved in cardiovascular disease or the protein encoded by any chromosomal sequence involved in cardiovascular disease may be utilized in the methods described in this disclosure. The cardiovascular-related proteins are typically selected based on an experimental association of the cardiovascular-related protein to the development of cardiovascular disease. For example, the production rate or circulating concentration of a cardiovascular-related protein may be elevated or depressed in a population having a cardiovascular disorder relative to a population lacking the cardiovascular disorder. Differences in protein levels may be assessed using proteomic techniques including but not limited to Western blot, immunohistochemical staining, enzyme linked immunosorbent assay (ELISA), and mass spectrometry. Alternatively, the cardiovascular-related proteins may be identified by obtaining gene expression profiles of the genes encoding the proteins using genomic techniques including but not limited to DNA microarray analysis, serial analysis of gene expression (SAGE), and quantitative real-time polymerase chain reaction (Q-PCR).

[0713] By way of example, the chromosomal sequence may comprise, but is not limited to, IL1B (interleukin 1, beta), XDH (xanthine dehydrogenase), TP53 (tumor protein p53), PTGIS (prostaglandin 12 (prostacyclin) synthase), MB (myoglobin), IL4 (interleukin 4), ANGPT1 (angiopoietin 1), ABCG8 (ATP-binding cassette, sub-family G (WHITE), member 8), CTSK (cathepsin K), PTGIR (prostaglandin 12 (prostacyclin) receptor (IP)), KCNJ11 (potassium inwardly-rectifying channel, subfamily J, member 11), INS (insulin), CRP (C-reactive protein, pentraxin-related), PDGFRB (platelet-derived growth factor receptor, beta polypeptide), CCNA2 (cyclin A2), PDGFB (platelet-derived growth factor beta polypeptide (simian sarcoma viral (v-sis) oncogene homolog)), KCNJS (potassium inwardly-rectifying channel, subfamily J, member 5), KCNN3 (potassium intermediate/small conductance calcium-activated channel, subfamily N, member 3), CAPN10 (calpain 10), PTGES (prostaglandin E synthase), ADRA2B (adrenergic, alpha-2B-, receptor), ABCG5 (ATP-binding cassette, sub-family G (WHITE), member 5), PRDX2 (peroxiredoxin 2), CAPN5 (calpain 5), PARP14 (poly (ADP-ribose) polymerase family, member 14), MEX3C (mex-3 homolog C (C. elegans)), ACE angiotensin I converting enzyme (peptidyl-dipeptidase A) 1), TNF (tumor necrosis factor (TNF superfamily, member 2)), IL6 (interleukin 6 (interferon, beta 2)), STN (statin), SERPINE1 (serpin peptidase inhibitor, clade E (nexin, plasminogen activator inhibitor type 1), member 1), ALB (albumin), ADIPOQ (adiponectin, C1Q and collagen domain containing), APOB (apolipoprotein B (including Ag(x) antigen)), APOE (apolipoprotein E), LEP (leptin), MTHFR (5,10-methylenetetrahydrofolate reductase (NADPH)), APOA1 (apolipoprotein A-I), EDN1 (endothelin 1), NPPB (natriuretic peptide precursor B), NOS3 (nitric oxide synthase 3 (endothelial cell)), PPARG (peroxisome proliferator-activated receptor gamma), PLAT (plasminogen activator, tissue), PTGS2 (prostaglandin-endoperoxide synthase 2 (prostaglandin G/H synthase and cyclooxygenase)), CETP (cholesteryl ester transfer protein, plasma), AGTR1 (angiotensin II receptor, type 1), HMGCR β-hydroxy-3-methylglutaryl-Coenzyme A reductase), IGF1 (insulin-like growth factor 1 (somatomedin C)), SELE (selectin E), REN (renin), PPARA (peroxisome proliferator-activated receptor alpha), PON1 (paraoxonase 1), KNG1 (kininogen 1), CCL2 (chemokine (C-C motif) ligand 2), LPL (lipoprotein lipase), VWF (von Willebrand factor), F2 (coagulation factor II (thrombin)), ICAM1 (intercellular adhesion molecule 1), TGFB1 (transforming growth factor, beta 1), NPPA (natriuretic peptide precursor A), IL10 (interleukin 10), EPO (erythropoietin), SOD1 (superoxide dismutase 1, soluble), VCAM1 (vascular cell adhesion molecule 1), IFNG (interferon, gamma), LPA (lipoprotein, Lp(a)), MPO (myeloperoxidase), ESR1 (estrogen receptor 1), MAPK1 (mitogen-activated protein kinase 1), HP (haptoglobin), F3 (coagulation factor III (thromboplastin, tissue factor)), CST3 (cystatin C), COG2 (component of oligomeric golgi complex 2), MMP9 (matrix metallopeptidase 9 (gelatinase B, 92 kDa gelatinase, 92 kDa type IV collagenase)), SERPINC1 (serpin peptidase inhibitor, clade C (antithrombin), member 1), F8 (coagulation factor VIII, procoagulant component), HMOX1 (heme oxygenase (decycling) 1), APOC3 (apolipoprotein C-III), IL8 (interleukin 8), PROK1 (prokineticin 1), CBS (cystathionine-beta-synthase), NOS2 (nitric oxide synthase 2, inducible), TLR4 (toll-like receptor 4), SELP (selectin P (granule membrane protein 140 kDa, antigen CD62)), ABCA1 (ATP-binding cassette, sub-family A (ABC1), member 1), AGT (angiotensinogen (serpin peptidase inhibitor, clade A, member 8)), LDLR (low density lipoprotein receptor), GPT (glutamic-pyruvate transaminase (alanine aminotransferase)), VEGFA (vascular endothelial growth factor A), NR3C2 (nuclear receptor subfamily 3, group C, member 2), IL18 (interleukin 18 (interferon-gamma-inducing factor)), NOS1 (nitric oxide synthase 1 (neuronal)), NR3C1 (nuclear receptor subfamily 3, group C, member 1 (glucocorticoid receptor)), FGB (fibrinogen beta chain), HGF (hepatocyte growth factor (hepapoietin A; scatter factor)), ILIA (interleukin 1, alpha), RETN (resistin), AKT1 (v-akt murine thymoma viral oncogene homolog 1), LIPC (lipase, hepatic), HSPD1 (heat shock 60 kDa protein 1 (chaperonin)), MAPK14 (mitogen-activated protein kinase 14), SPP1 (secreted phosphoprotein 1), ITGB3 (integrin, beta 3 (platelet glycoprotein 111a, antigen CD61)), CAT (catalase), UTS2 (urotensin 2), THBD (thrombomodulin), F10 (coagulation factor X), CP (ceruloplasmin (ferroxidase)), TNFRSF11B (tumor necrosis factor receptor superfamily, member 11b), EDNRA (endothelin receptor type A), EGFR (epidermal growth factor receptor (erythroblastic leukemia viral (v-erb-b) oncogene homolog, avian)), MMP2 (matrix metallopeptidase 2 (gelatinase A, 72 kDa gelatinase, 72 kDa type IV collagenase)), PLG (plasminogen), NPY (neuropeptide Y), RHOD (ras homolog gene family, member D), MAPK8 (mitogen-activated protein kinase 8), MYC (v-myc myelocytomatosis viral oncogene homolog (avian)), FN1 (fibronectin 1), CMA1 (chymase 1, mast cell), PLAU (plasminogen activator, urokinase), GNB3 (guanine nucleotide binding protein (G protein), beta polypeptide 3), ADRB2 (adrenergic, beta-2-, receptor, surface), APOA5 (apolipoprotein A-V), SOD2 (superoxide dismutase 2, mitochondrial), F5 (coagulation factor V (proaccelerin, labile factor)), VDR (vitamin D (1,25-dihydroxyvitamin D3) receptor), ALOX5 (arachidonate 5-lipoxygenase), HLA-DRB1 (major histocompatibility complex, class II, DR beta 1), PARP1 (poly (ADP-ribose) polymerase 1), CD40LG (CD40 ligand), PON2 (paraoxonase 2), AGER (advanced glycosylation end product-specific receptor), IRS1 (insulin receptor substrate 1), PTGS1 (prostaglandin-endoperoxide synthase 1 (prostaglandin G/H synthase and cyclooxygenase)), ECE1 (endothelin converting enzyme 1), F7 (coagulation factor VII (serum prothrombin conversion accelerator)), URN (interleukin 1 receptor antagonist), EPHX2 (epoxide hydrolase 2, cytoplasmic), IGFBP1 (insulin-like growth factor binding protein 1), MAPK10 (mitogen-activated protein kinase 10), FAS (Fas (TNF receptor superfamily, member 6)), ABCB1 (ATP-binding cassette, sub-family B (MDR/TAP), member 1), JUN (jun oncogene), IGFBP3 (insulin-like growth factor binding protein 3), CD14 (CD14 molecule), PDE5A (phosphodiesterase 5A, cGMP-specific), AGTR2 (angiotensin II receptor, type 2), CD40 (CD40 molecule, TNF receptor superfamily member 5), LCAT (lecithin-cholesterol acyltransferase), CCR5 (chemokine (C-C motif) receptor 5), MMP 1 (matrix metallopeptidase 1 (interstitial collagenase)), TIMP1 (TIMP metallopeptidase inhibitor 1), ADM (adrenomedullin), DYT10 (dystonia 10), STAT3 (signal transducer and activator of transcription 3 (acute-phase response factor)), MMP3 (matrix metallopeptidase 3 (stromelysin 1, progelatinase)), ELN (elastin), USF1 (upstream transcription factor 1), CFH (complement factor H), HSPA4 (heat shock 70 kDa protein 4), MMP12 (matrix metallopeptidase 12 (macrophage elastase)), MME (membrane metallo-endopeptidase), F2R (coagulation factor II (thrombin) receptor), SELL (selectin L), CTSB (cathepsin B), ANXA5 (annexin A5), ADRB1 (adrenergic, beta-1-, receptor), CYBA (cytochrome b-245, alpha polypeptide), FGA (fibrinogen alpha chain), GGT1 (gamma-glutamyltransferase 1), LIPG (lipase, endothelial), HIF1A (hypoxia inducible factor 1, alpha subunit (basic helix-loop-helix transcription factor)), CXCR4 (chemokine (C-X-C motif) receptor 4), PROC (protein C (inactivator of coagulation factors Va and VIIIa)), SCARB1 (scavenger receptor class B, member 1), CD79A (CD79a molecule, immunoglobulin-associated alpha), PLTP (phospholipid transfer protein), ADD1 (adducin 1 (alpha)), FGG (fibrinogen gamma chain), SAA1 (serum amyloid A1), KCNH2 (potassium voltage-gated channel, subfamily H (eag-related), member 2), DPP4 (dipeptidyl-peptidase 4), G6PD (glucose-6-phosphate dehydrogenase), NPR1 (natriuretic peptide receptor A/guanylate cyclase A (atrionatriuretic peptide receptor A)), VTN (vitronectin), KIAA0101 (KIAA0101), FOS (FBJ murine osteosarcoma viral oncogene homolog), TLR2 (toll-like receptor 2), PPIG (peptidylprolyl isomerase G (cyclophilin G)), IL1R1 (interleukin 1 receptor, type I), AR (androgen receptor), CYP1A1 (cytochrome P450, family 1, subfamily A, polypeptide 1), SERPINA1 (serpin peptidase inhibitor, clade A (alpha-1 antiproteinase, antitrypsin), member 1), MTR (5-methyltetrahydrofolate-homocysteine methyltransferase), RBP4 (retinol binding protein 4, plasma), APOA4 (apolipoprotein A-IV), CDKN2A (cyclin-dependent kinase inhibitor 2A (melanoma, p16, inhibits CDK4)), FGF2 (fibroblast growth factor 2 (basic)), EDNRB (endothelin receptor type B), ITGA2 (integrin, alpha 2 (CD49B, alpha 2 subunit of VLA-2 receptor)), CABIN1 (calcineurin binding protein 1), SHBG (sex hormone-binding globulin), HMGB1 (high-mobility group box 1), HSP90B2P (heat shock protein 90 kDa beta (Grp94), member 2 (pseudogene)), CYP3A4 (cytochrome P450, family 3, subfamily A, polypeptide 4), GJA1 (gap junction protein, alpha 1, 43 kDa), CAV1 (caveolin 1, caveolae protein, 22 kDa), ESR2 (estrogen receptor 2 (ER beta)), LTA (lymphotoxin alpha (TNF superfamily, member 1)), GDF15 (growth differentiation factor 15), BDNF (brain-derived neurotrophic factor), CYP2D6 (cytochrome P450, family 2, subfamily D, polypeptide 6), NGF (nerve growth factor (beta polypeptide)), SP1 (Sp 1 transcription factor), TGIF1 (TGFB-induced factor homeobox 1), SRC (v-src sarcoma (Schmidt-Ruppin A-2) viral oncogene homolog (avian)), EGF (epidermal growth factor (beta-urogastrone)), PIK3CG (phosphoinositide-3-kinase, catalytic, gamma polypeptide), HLA-A (major histocompatibility complex, class I, A), KCNQ1 (potassium voltage-gated channel, KQT-like subfamily, member 1), CNR1 (cannabinoid receptor 1 (brain)), FBN1 (fibrillin 1), CHKA (choline kinase alpha), BEST1 (bestrophin 1), APP (amyloid beta (A4) precursor protein), CTNNB1 (catenin (cadherin-associated protein), beta 1, 88 kDa), IL2 (interleukin 2), CD36 (CD36 molecule (thrombospondin receptor)), PRKAB1 (protein kinase, AMP-activated, beta 1 non-catalytic subunit), TPO (thyroid peroxidase), ALDH7A1 (aldehyde dehydrogenase 7 family, member A1), CX3CR1 (chemokine (C-X3-C motif) receptor 1), TH (tyrosine hydroxylase), F9 (coagulation factor IX), GH1 (growth hormone 1), TF (transferrin), HFE (hemochromatosis), IL17A (interleukin 17A), PTEN (phosphatase and tensin homolog), GSTM1 (glutathione S-transferase mu 1), DMD (dystrophin), GATA4 (GATA binding protein 4), F13A1 (coagulation factor XIII, A1 polypeptide), TTR (transthyretin), FABP4 (fatty acid binding protein 4, adipocyte), PON3 (paraoxonase 3), APOC1 (apolipoprotein C-I), INSR (insulin receptor), TNFRSF1B (tumor necrosis factor receptor superfamily, member 1B), HTR2A (5-hydroxytryptamine (serotonin) receptor 2A), CSF3 (colony stimulating factor 3 (granulocyte)), CYP2C9 (cytochrome P450, family 2, subfamily C, polypeptide 9), TXN (thioredoxin), CYP11B2 (cytochrome P450, family 11, subfamily B, polypeptide 2), PTH (parathyroid hormone), CSF2 (colony stimulating factor 2 (granulocyte-macrophage)), KDR (kinase insert domain receptor (a type III receptor tyrosine kinase)), PLA2G2A (phospholipase A2, group IIA (platelets, synovial fluid)), B2M (beta-2-microglobulin), THBS1 (thrombospondin 1), GCG (glucagon), RHOA (ras homolog gene family, member A), ALDH2 (aldehyde dehydrogenase 2 family (mitochondrial)), TCF7L2 (transcription factor 7-like 2 (T-cell specific, HMG-box)), BDKRB2 (bradykinin receptor B2), NFE2L2 (nuclear factor (erythroid-derived 2)-like 2), NOTCH1 (Notch homolog 1, translocation-associated (Drosophila)), UGT1A1 (UDP glucuronosyltransferase 1 family, polypeptide A1), IFNA1 (interferon, alpha 1), PPARD (peroxisome proliferator-activated receptor delta), SIRT1 (sirtuin (silent mating type information regulation 2 homolog) 1 (S. cerevisiae)), GNRH1 (gonadotropin-releasing hormone 1 (luteinizing-releasing hormone)), PAPPA (pregnancy-associated plasma protein A, pappalysin 1), ARR3 (arrestin 3, retinal (X-arrestin)), NPPC (natriuretic peptide precursor C), AHSP (alpha hemoglobin stabilizing protein), PTK2 (PTK2 protein tyrosine kinase 2), IL13 (interleukin 13), MTOR (mechanistic target of rapamycin (serine/threonine kinase)), ITGB2 (integrin, beta 2 (complement component 3 receptor 3 and 4 subunit)), GSTT1 (glutathione S-transferase theta 1), IL6ST (interleukin 6 signal transducer (gp130, oncostatin M receptor)), CPB2 (carboxypeptidase B2 (plasma)), CYP1A2 (cytochrome P450, family 1, subfamily A, polypeptide 2), HNF4A (hepatocyte nuclear factor 4, alpha), SLC6A4 (solute carrier family 6 (neurotransmitter transporter, serotonin), member 4), PLA2G6 (phospholipase A2, group VI (cytosolic, calcium-independent)), TNFSF11 (tumor necrosis factor (ligand) superfamily, member 11), SLC8A1 (solute carrier family 8 (sodium/calcium exchanger), member 1), F2RL1 (coagulation factor II (thrombin) receptor-like 1), AKR1A1 (aldo-keto reductase family 1, member A1 (aldehyde reductase)), ALDH9A1 (aldehyde dehydrogenase 9 family, member A1), BGLAP (bone gamma-carboxyglutamate (gla) protein), MTTP (microsomal triglyceride transfer protein), MTRR (5-methyltetrahydrofolate-homocysteine methyltransferase reductase), SULT1A3 (sulfotransferase family, cytosolic, 1A, phenol-preferring, member 3), RAGE (renal tumor antigen), C4B (complement component 4B (Chido blood group), P2RY12 (purinergic receptor P2Y, G-protein coupled, 12), RNLS (renalase, FAD-dependent amine oxidase), CREB1 (cAMP responsive element binding protein 1), POMC (proopiomelanocortin), RAC1 (ras-related C3 botulinum toxin substrate 1 (rho family, small GTP binding protein Rac1)), LMNA (lamin NC), CD59 (CD59 molecule, complement regulatory protein), SCN5A (sodium channel, voltage-gated, type V, alpha subunit), CYP1B1 (cytochrome P450, family 1, subfamily B, polypeptide 1), MIF (macrophage migration inhibitory factor (glycosylation-inhibiting factor)), MMP13 (matrix metallopeptidase 13 (collagenase 3)), TIMP2 (TIMP metallopeptidase inhibitor 2), CYP19A1 (cytochrome P450, family 19, subfamily A, polypeptide 1), CYP21A2 (cytochrome P450, family 21, subfamily A, polypeptide 2), PTPN22 (protein tyrosine phosphatase, non-receptor type 22 (lymphoid)), MYH14 (myosin, heavy chain 14, non-muscle), MBL2 (mannose-binding lectin (protein C) 2, soluble (opsonic defect)), SELPLG (selectin P ligand), AOC3 (amine oxidase, copper containing 3 (vascular adhesion protein 1)), CTSL1 (cathepsin L1), PCNA (proliferating cell nuclear antigen), IGF2 (insulin-like growth factor 2 (somatomedin A)), ITGB1 (integrin, beta 1 (fibronectin receptor, beta polypeptide, antigen CD29 includes MDF2, MSK12)), CAST (calpastatin), CXCL12 (chemokine (C-X-C motif) ligand 12 (stromal cell-derived factor 1)), IGHE (immunoglobulin heavy constant epsilon), KCNE1 (potassium voltage-gated channel, Isk-related family, member 1), TFRC (transferrin receptor (p90, CD71)), COL1A1 (collagen, type I, alpha 1), COL1A2 (collagen, type I, alpha 2), IL2RB (interleukin 2 receptor, beta), PLA2G10 (phospholipase A2, group X), ANGPT2 (angiopoietin 2), PROCR (protein C receptor, endothelial (EPCR)), NOX4 (NADPH oxidase 4), HAMP (hepcidin antimicrobial peptide), PTPN11 (protein tyrosine phosphatase, non-receptor type 11), SLC2A1 (solute carrier family 2 (facilitated glucose transporter), member 1), IL2RA (interleukin 2 receptor, alpha), CCLS (chemokine (C-C motif) ligand 5), IRF1 (interferon regulatory factor 1), CFLAR (CASP8 and FADD-like apoptosis regulator), CALCA (calcitonin-related polypeptide alpha), EIF4E (eukaryotic translation initiation factor 4E), GSTP1 (glutathione S-transferase pi 1), JAK2 (Janus kinase 2), CYP3A5 (cytochrome P450, family 3, subfamily A, polypeptide 5), HSPG2 (heparan sulfate proteoglycan 2), CCL3 (chemokine (C-C motif) ligand 3), MYD88 (myeloid differentiation primary response gene (88)), VIP (vasoactive intestinal peptide), SOAT1 (sterol O-acyltransferase 1), ADRBK1 (adrenergic, beta, receptor kinase 1), NR4A2 (nuclear receptor subfamily 4, group A, member 2), MMP8 (matrix metallopeptidase 8 (neutrophil collagenase)), NPR2 (natriuretic peptide receptor B/guanylate cyclase B (atrionatriuretic peptide receptor B)), GCH1 (GTP cyclohydrolase 1), EPRS (glutamyl-prolyl-tRNA synthetase), PPARGC1A (peroxisome proliferator-activated receptor gamma, coactivator 1 alpha), F12 (coagulation factor XII (Hageman factor)), PECAM1 (platelet/endothelial cell adhesion molecule), CCL4 (chemokine (C-C motif) ligand 4), SERPINA3 (serpin peptidase inhibitor, clade A (alpha-1 antiproteinase, antitrypsin), member 3), CASR (calcium-sensing receptor), GJAS (gap junction protein, alpha 5, 40 kDa), FABP2 (fatty acid binding protein 2, intestinal), TTF2 (transcription termination factor, RNA polymerase II), PROS1 (protein S (alpha)), CTF1 (cardiotrophin 1), SGCB (sarcoglycan, beta (43 kDa dystrophin-associated glycoprotein)), YME1L1 (YME1-like 1 (S. cerevisiae)), CAMP (cathelicidin antimicrobial peptide), ZC3H12A (zinc finger CCCH-type containing 12A), AKR1B1 (aldo-keto reductase family 1, member B1 (aldose reductase)), DES (desmin), MMP7 (matrix metallopeptidase 7 (matrilysin, uterine)), AHR (aryl hydrocarbon receptor), CSF1 (colony stimulating factor 1 (macrophage)), HDAC9 (histone deacetylase 9), CTGF (connective tissue growth factor), KCNMA1 (potassium large conductance calcium-activated channel, subfamily M, alpha member 1), UGT1A (UDP glucuronosyltransferase 1 family, polypeptide A complex locus), PRKCA (protein kinase C, alpha), COMT (catechol-.beta.-methyltransferase), S100B (S100 calcium binding protein B), EGR1 (early growth response 1), PRL (prolactin), IL15 (interleukin 15), DRD4 (dopamine receptor D4), CAMK2G (calcium/calmodulin-dependent protein kinase II gamma), SLC22A2 (solute carrier family 22 (organic cation transporter), member 2), CCL11 (chemokine (C-C motif) ligand 11), PGF (B321 placental growth factor), THPO (thrombopoietin), GP6 (glycoprotein VI (platelet)), TACR1 (tachykinin receptor 1), NTS (neurotensin), HNF1A (HNF1 homeobox A), SST (somatostatin), KCND1 (potassium voltage-gated channel, Shal-related subfamily, member 1), LOC646627 (phospholipase inhibitor), TBXAS1 (thromboxane A synthase 1 (platelet)), CYP2J2 (cytochrome P450, family 2, subfamily J, polypeptide 2), TBXA2R (thromboxane A2 receptor), ADH1C (alcohol dehydrogenase 1C (class I), gamma polypeptide), ALOX12 (arachidonate 12-lipoxygenase), AHSG (alpha-2-HS-glycoprotein), BHMT (betaine-homocysteine methyltransferase), GJA4 (gap junction protein, alpha 4, 37 kDa), SLC25A4 (solute carrier family 25 (mitochondrial carrier; adenine nucleotide translocator), member 4), ACLY (ATP citrate lyase), ALOX5AP (arachidonate 5-lipoxygenase-activating protein), NUMA1 (nuclear mitotic apparatus protein 1), CYP27B1 (cytochrome P450, family 27, subfamily B, polypeptide 1), CYSLTR2 (cysteinyl leukotriene receptor 2), SOD3 (superoxide dismutase 3, extracellular), LTC4S (leukotriene C4 synthase), UCN (urocortin), GHRL (ghrelin/obestatin prepropeptide), APOC2 (apolipoprotein C-II), CLEC4A (C-type lectin domain family 4, member A), KBTBD10 (kelch repeat and BTB (POZ) domain containing 10), TNC (tenascin C), TYMS (thymidylate synthetase), SHC1 (SHC (Src homology 2 domain containing) transforming protein 1), LRP1 (low density lipoprotein receptor-related protein 1), SOCS3 (suppressor of cytokine signaling 3), ADH1B (alcohol dehydrogenase 1B (class I), beta polypeptide), KLK3 (kallikrein-related peptidase 3), HSD11B1 (hydroxysteroid (11-beta) dehydrogenase 1), VKORC1 (vitamin K epoxide reductase complex, subunit 1), SERPINB2 (serpin peptidase inhibitor, clade B (ovalbumin), member 2), TNS1 (tensin 1), RNF19A (ring finger protein 19A), EPOR (erythropoietin receptor), ITGAM (integrin, alpha M (complement component 3 receptor 3 subunit)), PITX2 (paired-like homeodomain 2), MAPK7 (mitogen-activated protein kinase 7), FCGR3A (Fc fragment of IgG, low affinity 111a, receptor (CD16a)), LEPR (leptin receptor), ENG (endoglin), GPX1 (glutathione peroxidase 1), GOT2 (glutamic-oxaloacetic transaminase 2, mitochondrial (aspartate aminotransferase 2)), HRH1 (histamine receptor H1), NR112 (nuclear receptor subfamily 1, group I, member 2), CRH (corticotropin releasing hormone), HTR1A (5-hydroxytryptamine (serotonin) receptor 1A), VDAC1 (voltage-dependent anion channel 1), HPSE (heparanase), SFTPD (surfactant protein D), TAP2 (transporter 2, ATP-binding cassette, sub-family B (MDR/TAP)), RNF123 (ring finger protein 123), PTK2B (PTK2B protein tyrosine kinase 2 beta), NTRK2 (neurotrophic tyrosine kinase, receptor, type 2), IL6R (interleukin 6 receptor), ACHE (acetylcholinesterase (Yt blood group)), GLP1R (glucagon-like peptide 1 receptor), GHR (growth hormone receptor), GSR (glutathione reductase), NQO1 (NAD(P)H dehydrogenase, quinone 1), NR5A1 (nuclear receptor subfamily 5, group A, member 1), GJB2 (gap junction protein, beta 2, 26 kDa), SLC9A1 (solute carrier family 9 (sodium/hydrogen exchanger), member 1), MAOA (monoamine oxidase A), PCSK9 (proprotein convertase subtilisin/kexin type 9), FCGR2A (Fc fragment of IgG, low affinity IIa, receptor (CD32)), SERPINF1 (serpin peptidase inhibitor, clade F (alpha-2 antiplasmin, pigment epithelium derived factor), member 1), EDN3 (endothelin 3), DHFR (dihydrofolate reductase), GAS6 (growth arrest-specific 6), SMPD1 (sphingomyelin phosphodiesterase 1, acid lysosomal), UCP2 (uncoupling protein 2 (mitochondrial, proton carrier)), TFAP2A (transcription factor AP-2 alpha (activating enhancer binding protein 2 alpha)), C4BPA (complement component 4 binding protein, alpha), SERPINF2 (serpin peptidase inhibitor, clade F (alpha-2 antiplasmin, pigment epithelium derived factor), member 2), TYMP (thymidine phosphorylase), ALPP (alkaline phosphatase, placental (Regan isozyme)), CXCR2 (chemokine (C-X-C motif) receptor 2), SLC39A3 (solute carrier family 39 (zinc transporter), member 3), ABCG2 (ATP-binding cassette, sub-family G (WHITE), member 2), ADA (adenosine deaminase), JAK3 (Janus kinase 3), HSPA1A (heat shock 70 kDa protein 1A), FASN (fatty acid synthase), FGF1 (fibroblast growth factor 1 (acidic)), F 11 (coagulation factor XI), ATP7A (ATPase, Cu++ transporting, alpha polypeptide), CR1 (complement component (3b/4b) receptor 1 (Knops blood group)), GFAP (glial fibrillary acidic protein), ROCK1 (Rho-associated, coiled-coil containing protein kinase 1), MECP2 (methyl CpG binding protein 2 (Rett syndrome)), MYLK (myosin light chain kinase), BCHE (butyrylcholinesterase), LIPE (lipase, hormone-sensitive), PRDX5 (peroxiredoxin 5), ADORA1 (adenosine A1 receptor), WRN (Werner syndrome, RecQ helicase-like), CXCR3 (chemokine (C-X-C motif) receptor 3), CD81 (CD81 molecule), SMAD7 (SMAD family member 7), LAMC2 (laminin, gamma 2), MAP3K5 (mitogen-activated protein kinase kinase kinase 5), CHGA (chromogranin A (parathyroid secretory protein 1)), IAPP (islet amyloid polypeptide), RHO (rhodopsin), ENPP1 (ectonucleotide pyrophosphatase/phosphodiesterase 1), PTHLH (parathyroid hormone-like hormone), NRG1 (neuregulin 1), VEGFC (vascular endothelial growth factor C), ENPEP (glutamyl aminopeptidase (aminopeptidase A)), CEBPB (CCAAT/enhancer binding protein (C/EBP), beta), NAGLU (N-acetylglucosaminidase, alpha-), F2RL3 (coagulation factor II (thrombin) receptor-like 3), CX3CL1 (chemokine (C-X3-C motif) ligand 1), BDKRB1 (bradykinin receptor B1), ADAMTS13 (ADAM metallopeptidase with thrombospondin type 1 motif, 13), ELANE (elastase, neutrophil expressed), ENPP2 (ectonucleotide pyrophosphatase/phosphodiesterase 2), CISH (cytokine inducible SH2-containing protein), GAST (gastrin), MYOC (myocilin, trabecular meshwork inducible glucocorticoid response), ATP1A2 (ATPase, Na+/K+ transporting, alpha 2 polypeptide), NF1 (neurofibromin 1), GJB1 (gap junction protein, beta 1, 32 kDa), MEF2A (myocyte enhancer factor 2A), VCL (vinculin), BMPR2 (bone morphogenetic protein receptor, type II (serine/threonine kinase)), TUBB (tubulin, beta), CDC42 (cell division cycle 42 (GTP binding protein, 25 kDa)), KRT18 (keratin 18), HSF1 (heat shock transcription factor 1), MYB (v-myb myeloblastosis viral oncogene homolog (avian)), PRKAA2 (protein kinase, AMP-activated, alpha 2 catalytic subunit), ROCK2 (Rho-associated, coiled-coil containing protein kinase 2), TFPI (tissue factor pathway inhibitor (lipoprotein-associated coagulation inhibitor)), PRKG1 (protein kinase, cGMP-dependent, type I), BMP2 (bone morphogenetic protein 2), CTNND1 (catenin (cadherin-associated protein), delta 1), CTH (cystathionase (cystathionine gamma-lyase)), CTSS (cathepsin S), VAV2 (vav 2 guanine nucleotide exchange factor), NPY2R (neuropeptide Y receptor Y2), IGFBP2 (insulin-like growth factor binding protein 2, 36 kDa), CD28 (CD28 molecule), GSTA1 (glutathione S-transferase alpha 1), PPIA (peptidylprolyl isomerase A (cyclophilin A)), APOH (apolipoprotein H (beta-2-glycoprotein I)), S100A8 (S100 calcium binding protein A8), IL11 (interleukin 11), ALOX15 (arachidonate 15-lipoxygenase), FBLN1 (fibulin 1), NR1H3 (nuclear receptor subfamily 1, group H, member 3), SCD (stearoyl-CoA desaturase (delta-9-desaturase)), GIP (gastric inhibitory polypeptide), CHGB (chromogranin B (secretogranin 1)), PRKCB (protein kinase C, beta), SRD5A1 (steroid-5-alpha-reductase, alpha polypeptide 1β-oxo-5 alpha-steroid delta 4-dehydrogenase alpha 1)), HSD11B2 (hydroxysteroid (11-beta) dehydrogenase 2), CALCRL (calcitonin receptor-like), GALNT2 (UDP-N-acetyl-alpha-D-galactosamine:polypeptide N-acetylgalactosaminyltransferase 2 (GalNAc-T2)), ANGPTL4 (angiopoietin-like 4), KCNN4 (potassium intermediate/small conductance calcium-activated channel, subfamily N, member 4), PIK3C2A (phosphoinositide-3-kinase, class 2, alpha polypeptide), HBEGF (heparin-binding EGF-like growth factor), CYP7A1 (cytochrome P450, family 7, subfamily A, polypeptide 1), HLA-DRB5 (major histocompatibility complex, class II, DR beta 5), BNIP3 (BCL2/adenovirus E1B 19 kDa interacting protein 3), GCKR (glucokinase (hexokinase 4) regulator), S100A12 (S100 calcium binding protein A12), PADI4 (peptidyl arginine deiminase, type IV), HSPA14 (heat shock 70 kDa protein 14), CXCR1 (chemokine (C-X-C motif) receptor 1), H19 (H19, imprinted maternally expressed transcript (non-protein coding)), KRTAP19-3 (keratin associated protein 19-3), IDDM2 (insulin-dependent diabetes mellitus 2), RAC2 (ras-related C3 botulinum toxin substrate 2 (rho family, small GTP binding protein Rac2)), RYR1 (ryanodine receptor 1 (skeletal)), CLOCK (clock homolog (mouse)), NGFR (nerve growth factor receptor (TNFR superfamily, member 16)), DBH (dopamine beta-hydroxylase (dopamine beta-monooxygenase)), CHRNA4 (cholinergic receptor, nicotinic, alpha 4), CACNA1C (calcium channel, voltage-dependent, L type, alpha 1C subunit), PRKAG2 (protein kinase, AMP-activated, gamma 2 non-catalytic subunit), CHAT (choline acetyltransferase), PTGDS (prostaglandin D2 synthase 21 kDa (brain)), NR1H2 (nuclear receptor subfamily 1, group H, member 2), TEK (TEK tyrosine kinase, endothelial), VEGFB (vascular endothelial growth factor B), MEF2C (myocyte enhancer factor 2C), MAPKAPK2 (mitogen-activated protein kinase-activated protein kinase 2), TNFRSF11A (tumor necrosis factor receptor superfamily, member 11a, NFKB activator), HSPA9 (heat shock 70 kDa protein 9 (mortalin)), CYSLTR1 (cysteinyl leukotriene receptor 1), MAT1A (methionine adenosyltransferase I, alpha), OPRL1 (opiate receptor-like 1), IMPA1 (inositol(myo)-1(or 4)-monophosphatase 1), CLCN2 (chloride channel 2), DLD (dihydrolipoamide dehydrogenase), PSMA6 (proteasome (prosome, macropain) subunit, alpha type, 6), PSMB8 (proteasome (prosome, macropain) subunit, beta type, 8 (large multifunctional peptidase 7)), CHI3L1 (chitinase 3-like 1 (cartilage glycoprotein-39)), ALDH1B1 (aldehyde dehydrogenase 1 family, member B1), PARP2 (poly (ADP-ribose) polymerase 2), STAR (steroidogenic acute regulatory protein), LBP (lipopolysaccharide binding protein), ABCC6 (ATP-binding cassette, sub-family C(CFTR/MRP), member 6), RGS2 (regulator of G-protein signaling 2, 24 kDa), EFNB2 (ephrin-B2), GJB6 (gap junction protein, beta 6, 30 kDa), APOA2 (apolipoprotein A-II), AMPD1 (adenosine monophosphate deaminase 1), DYSF (dysferlin, limb girdle muscular dystrophy 2B (autosomal recessive)), FDFT1 (farnesyl-diphosphate farnesyltransferase 1), EDN2 (endothelin 2), CCR6 (chemokine (C-C motif) receptor 6), GJB3 (gap junction protein, beta 3, 31 kDa), IL1RL1 (interleukin 1 receptor-like 1), ENTPD1 (ectonucleoside triphosphate diphosphohydrolase 1), BBS4 (Bardet-Biedl syndrome 4), CELSR2 (cadherin, EGF LAG seven-pass G-type receptor 2 (flamingo homolog, Drosophila)), F 11R (F11 receptor), RAPGEF3 (Rap guanine nucleotide exchange factor (GEF) 3), HYAL1 (hyaluronoglucosaminidase 1), ZNF259 (zinc finger protein 259), ATOX1 (ATX1 antioxidant protein 1 homolog (yeast)), ATF6 (activating transcription factor 6), KHK (ketohexokinase (fructokinase)), SAT1 (spermidine/spermine N1-acetyltransferase 1), GGH (gamma-glutamyl hydrolase (conjugase, folylpolygammaglutamyl hydrolase)), TIMP4 (TIMP metallopeptidase inhibitor 4), SLC4A4 (solute carrier family 4, sodium bicarbonate cotransporter, member 4), PDE2A (phosphodiesterase 2A, cGMP-stimulated), PDE3B (phosphodiesterase 3B, cGMP-inhibited), FADS1 (fatty acid desaturase 1), FADS2 (fatty acid desaturase 2), TMSB4X (thymosin beta 4, X-linked), TXNIP (thioredoxin interacting protein), LIMS 1 (LIM and senescent cell antigen-like domains 1), RHOB (ras homolog gene family, member B), LY96 (lymphocyte antigen 96), FOXO1 (forkhead box 01), PNPLA2 (patatin-like phospholipase domain containing 2), TRH (thyrotropin-releasing hormone), GJC1 (gap junction protein, gamma 1, 45 kDa), SLC17A5 (solute carrier family 17 (anion/sugar transporter), member 5), FTO (fat mass and obesity associated), GJD2 (gap junction protein, delta 2, 36 kDa), PSRC1 (proline/serine-rich coiled-coil 1), CASP12 (caspase 12 (gene/pseudogene)), GPBAR1 (G protein-coupled bile acid receptor 1), PXK (PX domain containing serine/threonine kinase), IL33 (interleukin 33), TRIB1 (tribbles homolog 1 (Drosophila)), PBX4 (pre-B-cell leukemia homeobox 4), NUPR1 (nuclear protein, transcriptional regulator, 1), 15-September (15 kDa selenoprotein), CILP2 (cartilage intermediate layer protein 2), TERC (telomerase RNA component), GGT2 (gamma-glutamyltransferase 2), MT-CO1 (mitochondrially encoded cytochrome c oxidase I), and UOX (urate oxidase, pseudogene). Any of these sequences, may be a target for the CRISPR-Cas system, e.g., to address mutation.

[0714] In an additional embodiment, the chromosomal sequence may further be selected from Ponl (paraoxonase 1), LDLR (LDL receptor), ApoE (Apolipoprotein E), Apo B-100 (Apolipoprotein B-100), ApoA (Apolipoprotein(a)), ApoAl (Apolipoprotein A1), CBS (Cystathione B-synthase), Glycoprotein IIb/IIb, MTHRF (5,10-methylenetetrahydrofolate reductase (NADPH), and combinations thereof. In one iteration, the chromosomal sequences and proteins encoded by chromosomal sequences involved in cardiovascular disease may be chosen from CacnalC, Sodl, Pten, Ppar(alpha), Apo E, Leptin, and combinations thereof as target(s) for the CRISPR-Cas system.

### Treating Diseases of the Liver and Kidney

[0715] The present invention also contemplates delivering the CRISPR-Cas system described herein effector protein systems, to the liver and/or kidney. Delivery strategies to induce cellular uptake of the therapeutic nucleic acid include physical force or vector systems such as viral-, lipid- or complex-based delivery, or nanocarriers. From the initial applications with less possible clinical relevance, when nucleic acids were addressed to renal cells with hydrodynamic high pressure injection systemically, a wide range of gene therapeutic viral and non-viral carriers have been applied already to target posttranscriptional events in different animal kidney disease models in vivo (Csaba Révész and Peter Hamar (2011). Delivery Methods to Target RNAs in the Kidney, Gene Therapy Applications, Prof. Chunsheng Kang (Ed.), ISBN: 978-953-307-541-9, InTech, Available from: www.intechopen.com/books/gene-therapy-applications/delivery-methods-to-target-rnas-inthe-kidney). Delivery methods to the kidney may include those in Yuan et al. (Am J Physiol Renal Physiol 295: F605—F617, 2008) investigated whether in vivo delivery of small interfering RNAs (siRNAs) targeting the 12/15-lipoxygenase (12/15-LO) pathway of arachidonate acid metabolism can ameliorate renal injury and diabetic nephropathy (DN) in a streptozotocininjected mouse model of type 1 diabetes. To achieve greater in vivo access and siRNA expression in the kidney, Yuan et al. used double-stranded 12/15-LO siRNA oligonucleotides conjugated with cholesterol. About 400 μg of siRNA was injected subcutaneously into mice. The method of Yuang et al. may be applied to the CRISPR Cas system of the present invention contemplating a 1-2 g subcutaneous injection of CRISPR Cas conjugated with cholesterol to a human for delivery to the kidneys.

[0716] Molitoris et al. (J Am Soc Nephrol 20: 1754-1764, 2009) exploited proximal tubule cells (PTCs), as the site of oligonucleotide reabsorption within the kidney to test the efficacy of siRNA targeted to p53, a pivotal protein in the apoptotic pathway, to prevent kidney injury. Naked synthetic siRNA to p53 injected intravenously 4 h after ischemic injury maximally protected both PTCs and kidney function. Molitoris et al.'s data indicates that rapid delivery of siRNA to proximal tubule cells follows intravenous administration. For dose-response analysis, rats were injected with doses of siP53, 0.33; 1, 3, or 5 mg/kg, given at the same four time points, resulting in cumulative doses of 1.32; 4, 12, and 20 mg/kg, respectively. All siRNA doses tested produced a SCr reducing effect on day one with higher doses being effective over approximately five days compared with PBS-treated ischemic control rats. The 12 and 20 mg/kg cumulative doses provided the best protective effect. The method of Molitoris et al. may be applied to the nucleic acid-targeting system of the present invention contemplating 12 and 20 mg/kg cumulative doses to a human for delivery to the kidneys.

[0717] Thompson et al. (Nucleic Acid Therapeutics, Volume 22, Number 4, 2012) reports the toxicological and pharmacokinetic properties of the synthetic, small interfering RNA I5NP following intravenous administration in rodents and nonhuman primates. I5NP is designed to act via the RNA interference (RNAi) pathway to temporarily inhibit expression of the pro-apoptotic protein p53 and is being developed to protect cells from acute ischemia/reperfusion injuries such as acute kidney injury that can occur during major cardiac surgery and delayed graft function that can occur following renal transplantation. Doses of 800 mg/kg I5NP in rodents, and 1,000 mg/kg I5NP in nonhuman primates, were required to elicit adverse effects, which in the monkey were isolated to direct effects on the blood that included a sub-clinical activation of complement and slightly increased clotting times. In the rat, no additional adverse effects were observed with a rat analogue of I5NP, indicating that the effects likely represent class effects of synthetic RNA duplexes rather than toxicity related to the intended pharmacologic activity of I5NP. Taken together, these data support clinical testing of intravenous administration of I5NP for the preservation of renal function following acute ischemia/reperfusion injury. The no observed adverse effect level (NOAEL) in the monkey was 500 mg/kg. No effects on cardiovascular, respiratory, and neurologic parameters were observed in monkeys following i.v. administration at dose levels up to 25 mg/kg. Therefore, a similar dosage may be contemplated for intravenous administration of CRISPR Cas to the kidneys of a human.

[0718] Shimizu et al. (J Am Soc Nephrol 21: 622-633, 2010) developed a system to target delivery of siRNAs to glomeruli via poly(ethylene glycol)-poly(L-lysine)-based vehicles. The siRNA/nanocarrier complex was approximately 10 to 20 nm in diameter, a size that would allow it to move across the fenestrated endothelium to access to the mesangium. After intraperitoneal injection of fluorescence-labeled siRNA/nanocarrier complexes, Shimizu et al. detected siRNAs in the blood circulation for a prolonged time. Repeated intraperitoneal administration of a mitogen-activated protein kinase 1 (MAPK1) siRNA/nanocarrier complex suppressed glomerular MAPK1 mRNA and protein expression in a mouse model of glomerulonephritis. For the investigation of siRNA accumulation, Cy5-labeled siRNAs complexed with PIC nanocarriers (0.5 ml, 5 nmol of siRNA content), naked Cy5-labeled siRNAs (0.5 ml, 5 nmol), or Cy5-labeled siRNAs encapsulated in HVJ-E (0.5 ml, 5 nmol of siRNA content) were administrated to BALBc mice. The method of Shimizu et al. may be applied to the nucleic acid-targeting system of the present invention contemplating a dose of about of 10-20 μmol CRISPR Cas complexed with nanocarriers in about 1-2 liters to a human for intraperitoneal administration and delivery to the kidneys.

TABLE 11
Delivery methods to the kidney are summarized as follows:

| Delivery | | Target | | | Functional | |
|---|---|---|---|---|---|---|
| method | Carrier | RNA | Disease | Model | assays | Author |
| Hydrodynamic/ | TransIT In Vivo | p85α | Acute renal | Ischemia- | Uptake, | Larson et al., |
| Lipid | Gene Delivery | | injury | reperfusion | biodistribution | Surgery, (August |
| | System, DOTAP | | | | | 2007), Vol. 142, |
| | | | | | | No. 2, pp. (262-269) |
| Hydrodynamic/ | Lipofectamine | Fas | Acute renal | Ischemia- | Blood urea | Hamar et al., |
| Lipid | 2000 | | injury | reperfusion | nitrogen, Fas | Proc Natl Acad |
| | | | | | Immunohistochemistry, | Sci, (October 2004), |
| | | | | | apoptosis, | Vol. 101, No. 41, |
| | | | | | histological scoring | pp. (14883-14888) |
| Hydrodynamic | n.a. | Apoptosis | Acute renal | Ischemia- | n.a. | Zheng et al., |
| | | cascade | injury | reperfusion | | Am J Pathol, |
| | | elements | | | | (October 2008), |
| | | | | | | Vol. 173, No. |
| | | | | | | 4, pp. (973-980) |
| Hydrodynamic | n.a. | Nuclear | Acute renal | Ischemia- | n.a. | Feng et al., |
| | | factor | injury | reperfusion | | Transplantation, |
| | | kappa-b | | | | (May 2009), |
| | | (NFkB) | | | | Vol. 87, No. 9, |
| | | | | | | pp. (1283-1289) |
| Hydrodynamic/ | Lipofectamine | Apoptosis | Acute renal | Ischemia- | Apoptosis, oxidative | Xie & Guo, |
| Viral | 2000 | antagonizing | injury | reperfusion | stress, caspase | Am Soc Nephrol, |
| | | transcription | | | activation, membrane | (December 2006), |
| | | factor | | | lipid peroxidation | Vol. 17, No. 12, |
| | | (AATF) | | | | pp. (3336-3346) |
| Hydrodynamic | pBAsi mU6 Neo/ | Gremlin | Diabetic | Streptozotozin - | Proteinuria, serum | Q. Zhang et |
| | TransIT-EE | | nephropathy | induced diabetes | creatinine, glomerular | al., PloS ONE, |
| | Hydrodynamic | | | | and tubular diameter, | (July 2010), |
| | Delivery System | | | | collagen type | Vol. 5, No. 7, |
| | | | | | IV/BMP7 expression | el 1709, pp. (M3) |
| Viral/Lipid | pSUPER | TGF-β | Interstitial | Unilateral | α-SMA expression, | Kushibikia et al., |
| | vector/ | type II | renal fibrosis | urethral | collagen content, | J Controlled |
| | Lipofectamine | receptor | | obstruction | | Release, (July |
| | | | | | | 2005), Vol. |
| | | | | | | 105, No. 3, pp. |
| | | | | | | (318-331) |
| Viral | Adeno- | Mineral | Hyper-tension | Cold-induced | blood pressure, | Wang et al., |
| | associated | corticoid | caused renal | hypertension | serum albumin, | Gene Therapy, |
| | virus-2 | receptor | damage | | serum urea nitrogen, | (July 2006), |
| | | | | | serum creatinine, | Vol. 13, No. 14, |
| | | | | | kidney weight, | pp. (1097-1103) |
| | | | | | urinary sodium | |
| Hydrodynamic/ | pU6 vector | Luciferase | n.a. | n.a. | uptake | Kobayashi et |
| Viral | | | | | | al., Journal of |
| | | | | | | Pharmacology |
| | | | | | | and Experimental |
| | | | | | | Therapeutics, |
| | | | | | | (February 2004), |
| | | | | | | Vol. 308, No. 2, |
| | | | | | | pp. (688-693) |
| Lipid | Lipoproteins, | apoB1, | n.a. | n.a. | Uptake, binding | Wolfrum et al., |
| | albumin | apoM | | | affinity to | Nature Biotechnology, |
| | | | | | lipoproteins | (September 2007), |
| | | | | | and albumin | Vol. 25, No. 10, |
| | | | | | | pp. (1149-1157) |
| Lipid | Lipofectamine | p53 | Acute renal | Ischemic and | Histological scoring, | Molitoris et al., |
| | 2000 | | injury | cisplatin- | apoptosis | J Am Soc Nephrol, |
| | | | | induced acute | | (August 2009), |
| | | | | injury | | Vol. 20, No. 8, |
| | | | | | | pp. (1754-1764) |
| Lipid | DOTAP/DOPE, | COX-2 | Breast adeno- | MDA-MB-231 | Cell viability, | Mikhaylova et |
| | DOTAP/DOPE/ | | carcinoma | breast cancer | uptake | al., Cancer |
| | DOPE-PEG2000 | | | xenograft- | | Gene Therapy, |
| | | | | bearing mouse | | (March 2011), |
| | | | | | | Vol. 16, No. 3, |
| | | | | | | pp. (217-226) |
| Lipid | Cholesterol | 12/15- | Diabetic | Streptozotocin - | Albuminuria, urinary | Yuan et al., |
| | | lipoxygenase | nephropathy | induced diabetes | creatinine, histology, | Am J Physiol |
| | | | | | type I and IV collagen, | Renal Physiol, |
| | | | | | TGF-β, fibronectin, | (June 2008), |
| | | | | | plasminogen activator | Vol. 295, pp. |
| | | | | | inhibitor 1 | (F605-F617) |
| Lipid | Lipofectamine | Mitochondrial | Diabetic | Streptozotocin - | Cell proliferation | Y. Zhang et |
| | 2000 | membrane | nephropathy | induced diabetes | and apoptosis, | al., J Am Soc |
| | | 44 (TIM44) | | | histology, ROS, | Nephrol, (April |
| | | | | | mitochondrial | 2006), Vol. |
| | | | | | import of Mn-SOD | 17, No. 4, pp. |
| | | | | | and glutathione | (1090-1101) |
| | | | | | peroxidase, cellular | |
| | | | | | membrane polarization | |
| Hydrodynamic/ | Proteolipo- | RLIP76 | Renal carcinoma | Caki-2 | uptake | Singhal et al., |
| Lipid | some | | | kidney cancer | | Cancer Res, |
| | | | | xenograft- | | (May 2009), |
| | | | | bearing mouse | | Vol. 69, No. 10, |
| | | | | | | pp. (4244-4251) |
| Polymer | PEGylated | Luciferase | n.a. | n.a. | Uptake, | Malek et al., |
| | PEI | pGL3 | | | biodistribution, | Toxicology |
| | | | | | erythrocyte | and Applied |
| | | | | | aggregation | Pharmacology, |
| | | | | | | (April 2009), |
| | | | | | | Vol. 236, No. |
| | | | | | | 1, pp. (97-108) |
| Polymer | PEGylated | MAPK1 | Lupus | Glomerulonephritis | Proteinuria, | Shimizu et al., |
| | poly-L-lysine | | glomerulonephritis | | glomerulosclerosis, | J Am Soc |
| | | | | | TGF- β, | Nephrology, |
| | | | | | fibronectin, | (April 2010), |
| | | | | | plasminogen | Vol. 21, No. 4, |
| | | | | | activator | pp. (622-633) |
| | | | | | inhibitor 1 | |
| Polymer/ | Hyaluronic | VEGF | Kidney cancer/ | B16F1 | Biodistribution, | Jiang et al., |
| Nano particle | acid/Quantum | | melanoma | melanoma tumor- | citotoxicity, | Molecular |
| | dot/PEI | | | bearing mouse | tumor volume, | Pharmaceutics, |
| | | | | | endocytosis | (May-June |
| | | | | | | 2009), Vol. 6, |
| | | | | | | No. 3, pp. |
| | | | | | | (727-737) |
| Polymer/ | PEGylated | GAPDH | n.a. | n.a. | cell viability, | Cao et al, J |
| Nano particle | polycaprolactone | | | | uptake | Controlled |
| | nanofiber | | | | | Release, (June |
| | | | | | | 2010), Vol. |
| | | | | | | 144, No. 2, pp. |
| | | | | | | (203-212) |
| Aptamer | Spiegelmer | CC | Glomerulosclerosis | Uninephrectomized | urinary | Ninichuk et |
| | mNOX-E36 | chemokine | | mouse | albumin, | al., Am J |
| | | ligand 2 | | | urinary | Pathol, (March |
| | | | | | creatinine, | 2008), Vol. |
| | | | | | histopathology, | 172, No. 3, pp. |
| | | | | | glomerular | (628-637) |
| | | | | | filtration rate, | |
| | | | | | macrophage | |
| | | | | | count, serum | |
| | | | | | Ccl2, Mac- | |
| | | | | | 2+, Ki-67+ | |
| Aptamer | Aptamer | vasopressin | Congestive | n.a. | Binding | Purschke et |
| | NOX-F37 | (AVP) | heart failure | | affinity to D- | al., Proc Natl |
| | | | | | AVP, | Acad Sci, |
| | | | | | Inhibition of | (March 2006), |
| | | | | | AVP | Vol. 103, No. |
| | | | | | Signaling, | 13, pp. (5173- |
| | | | | | Urine | 5178) |
| | | | | | osmolality | |
| | | | | | and sodium | |
| | | | | | concentration, | |

### Targeting the Liver or Liver Cells

[0719] Targeting liver cells is provided. This may be in vitro or in vivo. Hepatocytes are preferred. Delivery of the Cas protein may be via viral vectors, especially AAV (and in particular AAV2/6) vectors. These may be administered by intravenous injection.

[0720] A preferred target for liver, whether in vitro or in vivo, is the albumin gene. This is a so-called ‘safe harbor” as albumin is expressed at very high levels and so some reduction in the production of albumin following successful gene editing is tolerated. It is also preferred as the high levels of expression seen from the albumin promoter/enhancer allows for useful levels of correct or transgene production (from the inserted donor template) to be achieved even if only a small fraction of hepatocytes are edited.

[0721] Intron 1 of albumin has been shown by Wechsler et al. (reported at the 57th Annual Meeting and Exposition of the American Society of Hematology—abstract available online at ash.confex.com/ash/2015/webprogram/Paper86495.html and presented on 6th December 2015) to be a suitable target site. Their work used Zn Fingers to cut the DNA at this target site, and suitable guide sequences can be generated to guide cleavage at the same site by a CRISPR protein.

[0722] The use of targets within highly—expressed genes (genes with highly active enhancers/promoters) such as albumin may also allow a promoterless donor template to be used, as reported by Wechsler et al. and this is also broadly applicable outside liver targeting. Other examples of highly-expressed genes are known.

### Other Disease of the Liver

[0723] In particular embodiments, the CRISPR proteins of the present invention are used in the treatment of liver disorders such as transthyretin amyloidosis (ATTR), alpha-1 antitrypsin deficiency and other hepatic-based inborn errors of metabolism. FAP is caused by a mutation in the gene that encodes transthyretin (TTR). While it is an autosomal dominant disease, not al carriers develop the disease. There are over 100 mutations in the TTR gene known to be associated with the disease. Examples of common mutations include V30M. The principle of treatment of TTR based on gene silencing has been demonstrated by studies with iRNA (Ueda et al. 2014 Transl Neurogener. 3:19). Wilson's Disease (WD) is caused by mutations in the gene encoding ATP7B, which is found exclusively in the hepatocyte. There are over 500 mutations associated with WD, with increased prevalence in specific regions such as East Asia. Other examples are A1ATD (an autosomal recessive disease caused by mutations in the SERPINA1 gene) and PKU (an autosomal recessive disease caused by mutations in the phenylalanine hydroxylase (PAH) gene).

[0724] Liver-Associated Blood Disorders, especially Hemophilia and in particular Hemophilia B

[0725] Successful gene editing of hepatocytes has been achieved in mice (both in vitro and in vivo) and in non-human primates (in vivo), showing that treatment of blood disorders through gene editing/genome engineering in hepatocytes is feasible. In particular, expression of the human F9 (hF9) gene in hepatocytes has been shown in non-human primates indicating a treatment for Hemophillia B in humans.

[0726] Wechsler et al. reported at the 57th Annual Meeting and Exposition of the American Society of Hematology (abstract presented 6th December 2015 and available online at ash.confex.com/ash/2015/webprogram/Paper86495.html) that they has successfully expressed human F9 (hF9) from hepatocytes in non-human primates through in vivo gene editing. This was achieved using 1) two zinc finger nucleases (ZFNs) targeting intron 1 of the albumin locus, and 2) a human F9 donor template construct. The ZFNs and donor template were encoded on separate hepatotropic adeno-associated virus serotype 2/6 (AAV2/6) vectors injected intravenously, resulting in targeted insertion of a corrected copy of the hF9 gene into the albumin locus in a proportion of liver hepatocytes.

[0727] The albumin locus was selected as a “safe harbor” as production of this most abundant plasma protein exceeds 10 g/day, and moderate reductions in those levels are well-tolerated. Genome edited hepatocytes produced normal hFIX (hF9) in therapeutic quantities, rather than albumin, driven by the highly active albumin enhancer/promoter. Targeted integration of the hF9 transgene at the albumin locus and splicing of this gene into the albumin transcript was shown.

[0728] Mice studies: C57BL/6 mice were administered vehicle (n=20) or AAV2/6 vectors (n=25) encoding mouse surrogate reagents at 1.0×1013 vector genome (vg)/kg via tail vein injection. ELISA analysis of plasma hFIX in the treated mice showed peak levels of 50-1053 ng/mL that were sustained for the duration of the 6-month study. Analysis of FIX activity from mouse plasma confirmed bioactivity commensurate with expression levels.

[0729] Non-human primate (NHP) studies: a single intravenous co-infusion of AAV2/6 vectors encoding the NHP targeted albumin-specific ZFNs and a human F9 donor at 1.2×1013 vg/kg (n=5/group) resulted in >50 ng/mL (>1% of normal) in this large animal model. The use of higher AAV2/6 doses (up to 1.5×1014 vg/kg) yielded plasma hFIX levels up to 1000 ng/ml (or 20% of normal) in several animals and up to 2000 ng/ml (or 50% of normal) in a single animal, for the duration of the study (3 months).

[0730] The treatment was well tolerated in mice and NHPs, with no significant toxicological findings related to AAV2/6 ZFN+donor treatment in either species at therapeutic doses. Sangamo (CA, USA) has since applied to the FDA, and been granted, permission to conduct the world's first human clinical trial for an in vivo genome editing application. This follows on the back of the EMEA's approval of the Glybera gene therapy treatment of lipoprotein lipase deficiency.

[0731] Accordingly, it is preferred, in some embodiments, that any or all of the following are used:

[0732] AAV (especially AAV2/6) vectors, preferably administered by intravenous injection;

[0733] Albumin as target for gene editing/insertion of transgene/template—especially at intron 1 of albumin;

[0734] human F9 donor template; and/or

[0735] a promoterless donor template.

### Hemophilia B

[0736] Accordingly, in some embodiments, it is preferred that the present invention is used to treat Hemophilia B. As such it is preferred that F9 (Factor IX) is targeted through provision of a suitable guide RNA. The enzyme and the guide may ideally be targeted to the liver where F9 is produced, although they can be delivered together or separately. A template is provided, in some embodiments, and that this is the human F9 gene. It will be appreciated that the hF9 template comprises the wt or ‘correct’ version of hF9 so that the treatment is effective. In some embodiments, a two-vector system may be used— one vector for the Cas and one vector for the repair template(s). The repair template may include two or more repair templates, for example, two F9 sequences from different mammalian species. In some embodiments, both a mouse and human F9 sequence are provided. This is may be delivered to mice. Yang Yang, John White, McMenamin Deirdre, and Peter Bell, PhD, presenting at 58th Annual American Society of Hematology Meeting (November 2016), report that this increases potency and accuracy. The second vector inserted the human sequence of factor IX into the mouse genome. In some embodiments, the targeted insertion leads to the expression of a chimeric hyperactive factor IX protein. In some embodiments, this is under the control of the native mouse factor IX promoter. Injecting this two-component system (vector 1 and vector 2) into newborn and adult “knock-out” mice at increasing doses led to expression and activity of stable factor IX activity at normal (or even higher) levels for over four months. In the case of treating humans, a native human F9 promoter may be used instead. In some embodiments, the wt phenotype is restored.

[0737] In an alternative embodiment, the hemophilia B version of F9 may be delivered so as to create a model organism, cell or cell line (for example a murine or non-human primate model organism, cell or cell line), the model organism, cell or cell line having or carrying the Hemophilia B phenotype, i.e. an inability to produce wt F9.

### Hemophilia A

[0738] In some embodiments, the F9 (factor IX) gene may be replaced by the F8 (factor VIII) gene described above, leading to treatment of Hemophilia A (through provision of a correct F8 gene) and/or creation of a Hemophilia A model organism, cell or cell line (through provision of an incorrect, Hemophilia A version of the F8 gene).

### Hemophilia C

[0739] In some embodiments, the F9 (factor IX) gene may be replaced by the F11 (factor XI) gene described above, leading to treatment of Hemophilia C (through provision of a correct F11 gene) and/or creation of a Hemophilia C model organism, cell or cell line (through provision of an incorrect, Hemophilia C version of the F11 gene).

### Transthyretin Amyloidosis

[0740] Transthyretin is a protein, mainly produced in the liver, present in the serum and CSF which carries thyroxin hormone and retinol binding protein bound to retinol (Vitamin A). Over 120 different mutations can cause Transthyretin amyloidosis (ATTR), a heritable genetic disorder wherein mutant forms of the protein aggregate in tissues, particularly the peripheral nervous system, causing polyneuropathy. Familial amyloid polyneuropathy (FAP) is the most common TTR disorder and, in 2014, was thought to affect 47 per 100,000 people in Europe. A mutation in the TTR gene of Va130Met is thought be the most common mutation, causing an estimated 50% of FAP cases. In the absence a liver transplant, the only known cure to date, the disease is usually fatal within a decade of diagnosis. The majority of cases are monogenic.

[0741] In mouse models of ATTR, the TTR gene may be edited in a dose dependent manner by the delivery of CRISPR/Cas. In some embodiments, the Cas is provided as mRNA. In some embodiments, Cas mRNA and guide RNA are packaged in LNPs. A system comprising Cas mRNA and guide RNA packaged in LNPs achieved up to 60% editing efficiency in the liver, with serum TTR levels being reduced by up to 80%. In some embodiments, therefore, Transthyretin is targeted, in particular correcting for the Va130Met mutation. In some embodiments, therefore, ATTR is treated.

### Alpha-1 Antitrypsin Deficiency

[0742] Alpha-1 Antitrypsin (AlAT) is a protein produced in the liver which primarily functions to decrease the activity of neutrophil elastase, an enzyme which degrades connective tissue, in the lungs. Alpha-1 Antitrypsin Deficiency (ATTD) is a disease caused by mutation of the SERPINA1 gene, which encodes AlAT. Impaired production of AlAT leads to a gradual degredation of the connective tissue of the lung resulting in emphysema like symptoms.

[0743] Several mutations can cause ATTD, though the most common mutations are Glu342Lys (referred to as Z allele, wild-type is referred to as M) or Glu264Val (referred to as the S allele), and each allele contributes equally to the disease state, with two affected alleles resulting in more pronounced pathophysiology. These results not only resulted in degradation of the connective tissue of sensitive organs, such as the lung, but accumulation of the mutants in the liver can result in proteotoxicity. Current treatments focus on the replacement of A1 AT by injection of protein retrieved from donated human plasma. In severe cases a lung and/or liver transplant may be considered.

[0744] The common variants of the disease are again monogenic. In some embodiments, the SERPINA1 gene is targeted. In some embodiments, the Glu342Lys mutation (referred to as Z allele, wild-type is referred to as M) or the Glu264Val mutation (referred to as the S allele) are corrected for. In some embodiments, therefore, the faulty gene would require replacement by the wild-type functioning gene. In some embodiments, a knockout and repair approach is required, so a repair template is provided. In the case of bi-allelic mutations, in some embodiments only one guide RNA would be required for homozygous mutations, but in the case of heterozygous mutations two guide RNAs may be required. Delivery is, in some embodiments, to the lung or liver.

### Inborn Errors of Metabolism

[0745] Inborn errors of metabolism (IEMs) are an umbrella group of diseases which affect metabolic processes. In some embodiments, an IEM is to be treated. The majority of these diseases are monogenic in nature (e.g. phenylketonuria) and the pathophysiology results from either the abnormal accumulation of substances which are inherently toxic, or mutations which result in an inability to synthesize essential substances. Depending on the nature of the IEM, CRISPR/Cas may be used to facilitate a knock-out alone, or in combination with replacement of a faulty gene via a repair template. Exemplary diseases that may benefit from CRISPR/Cas technology are, in some embodiments: primary hyperoxaluria type 1 (PH1), argininosuccinic lyase deficiency, ornithine transcarbamylase deficiency, phenylketonuria, or PKU, and maple syrup urine disease.

### Treating Epithelial and Lung Diseases

[0746] The present invention also contemplates delivering the CRISPR-Cas system described herein to one or both lungs.

[0747] Although AAV-2-based vectors were originally proposed for CFTR delivery to CF airways, other serotypes such as AAV-1, AAV-5, AAV-6, and AAV-9 exhibit improved gene transfer efficiency in a variety of models of the lung epithelium (see, e.g., Li et al., Molecular Therapy, vol. 17 no. 12, 2067-277 Dec. 2009). AAV-1 was demonstrated to be ˜100-fold more efficient than AAV-2 and AAV-5 at transducing human airway epithelial cells in vitro, 5 although AAV-1 transduced murine tracheal airway epithelia in vivo with an efficiency equal to that of AAV-5. Other studies have shown that AAV-5 is 50-fold more efficient than AAV-2 at gene delivery to human airway epithelium (HAE) in vitro and significantly more efficient in the mouse lung airway epithelium in vivo. AAV-6 has also been shown to be more efficient than AAV-2 in human airway epithelial cells in vitro and murine airways in vivo.8 The more recent isolate, AAV-9, was shown to display greater gene transfer efficiency than AAV-5 in murine nasal and alveolar epithelia in vivo with gene expression detected for over 9 months suggesting AAV may enable long-term gene expression in vivo, a desirable property for a CFTR gene delivery vector. Furthermore, it was demonstrated that AAV-9 could be re-administered to the murine lung with no loss of CFTR expression and minimal immune consequences. CF and non-CF HAE cultures may be inoculated on the apical surface with 100 μl of AAV vectors for hours (see, e.g., Li et al., Molecular Therapy, vol. 17 no. 12, 2067-277 Dec. 2009). The MOI may vary from 1×103 to 4×105 vector genomes/cell, depending on virus concentration and purposes of the experiments. The above cited vectors are contemplated for the delivery and/or administration of the invention.

[0748] Zamora et al. (Am J Respir Crit Care Med Vol 183. pp 531-538, 2011) reported an example of the application of an RNA interference therapeutic to the treatment of human infectious disease and also a randomized trial of an antiviral drug in respiratory syncytial virus (RSV)-infected lung transplant recipients. Zamora et al. performed a randomized, double-blind, placebocontrolled trial in LTX recipients with RSV respiratory tract infection. Patients were permitted to receive standard of care for RSV. Aerosolized ALN-RSV01 (0.6 mg/kg) or placebo was administered daily for 3 days. This study demonstrates that an RNAi therapeutic targeting RSV can be safely administered to LTX recipients with RSV infection. Three daily doses of ALN-RSV01 did not result in any exacerbation of respiratory tract symptoms or impairment of lung function and did not exhibit any systemic proinflammatory effects, such as induction of cytokines or CRP. Pharmacokinetics showed only low, transient systemic exposure after inhalation, consistent with preclinical animal data showing that ALN-RSV01, administered intravenously or by inhalation, is rapidly cleared from the circulation through exonucleasemediated digestion and renal excretion. The method of Zamora et al. may be applied to the nucleic acid-targeting system of the present invention and an aerosolized CRISPR Cas, for example with a dosage of 0.6 mg/kg, may be contemplated for the present invention.

[0749] Subjects treated for a lung disease may for example receive pharmaceutically effective amount of aerosolized AAV vector system per lung endobronchially delivered while spontaneously breathing. As such, aerosolized delivery is preferred for AAV delivery in general. An adenovirus or an AAV particle may be used for delivery. Suitable gene constructs, each operably linked to one or more regulatory sequences, may be cloned into the delivery vector. In this instance, the following constructs are provided as examples: Cbh or EF1a promoter for Cas, U6 or H1 promoter for guide RNA): A preferred arrangement is to use a CFTRdelta508 targeting guide, a repair template for deltaF508 mutation and a codon optimized Cas, with optionally one or more nuclear localization signal or sequence(s) (NLS(s)), e.g., two (2) NLSs. Constructs without NLS are also envisaged.

### Treating Diseases of the Muscular System

[0750] The present invention also contemplates delivering the CRISPR-Cas system described herein to muscle(s).

[0751] Bortolanza et al. (Molecular Therapy vol. 19 no. 11, 2055-264 Nov. 2011) shows that systemic delivery of RNA interference expression cassettes in the FRG1 mouse, after the onset of facioscapulohumeral muscular dystrophy (FSHD), led to a dose-dependent long-term FRG1 knockdown without signs of toxicity. Bortolanza et al. found that a single intravenous injection of 5×1012 vg of rAAV6-sh1FRG1 rescues muscle histopathology and muscle function of FRG1 mice. In detail, 200 μl containing 2×1012 or 5×1012 vg of vector in physiological solution were injected into the tail vein using a 25-gauge Terumo syringe. The method of Bortolanza et al. may be applied to an AAV expressing CRISPR Cas and injected into humans at a dosage of about 2×1015 or 2×1016 vg of vector.

[0752] Dumonceaux et al. (Molecular Therapy vol. 18 no. 5, 881-887 May 2010) inhibit the myostatin pathway using the technique of RNA interference directed against the myostatin receptor AcvRIIb mRNA (sh-AcvRIIb). The restoration of a quasi-dystrophin was mediated by the vectorized U7 exon-skipping technique (U7-DYS). Adeno-associated vectors carrying either the sh-AcvrIIb construct alone, the U7-DYS construct alone, or a combination of both constructs were injected in the tibialis anterior (TA) muscle of dystrophic mdx mice. The injections were performed with 1011 AAV viral genomes. The method of Dumonceaux et al. may be applied to an AAV expressing CRISPR Cas and injected into humans, for example, at a dosage of about 1014 to about 1015 vg of vector.

[0753] Kinouchi et al. (Gene Therapy (2008) 15, 1126-1130) report the effectiveness of in vivo siRNA delivery into skeletal muscles of normal or diseased mice through nanoparticle formation of chemically unmodified siRNAs with atelocollagen (ATCOL). ATCOL-mediated local application of siRNA targeting myostatin, a negative regulator of skeletal muscle growth, in mouse skeletal muscles or intravenously, caused a marked increase in the muscle mass within a few weeks after application. These results imply that ATCOL-mediated application of siRNAs is a powerful tool for future therapeutic use for diseases including muscular atrophy. MstsiRNAs (final concentration, 10 mM) were mixed with ATCOL (final concentration for local administration, 0.5%) (AteloGene, Kohken, Tokyo, Japan) according to the manufacturer's instructions. After anesthesia of mice (20-week-old male C57BL/6) by Nembutal (25 mg/kg, i.p.), the Mst-siRNA/ATCOL complex was injected into the masseter and biceps femoris muscles. The method of Kinouchi et al. may be applied to CRISPR Cas and injected into a human, for example, at a dosage of about 500 to 1000 ml of a 40 μM solution into the muscle. Hagstrom et al. (Molecular Therapy Vol. 10, No. 2, August 2004) describe an intravascular, nonviral methodology that enables efficient and repeatable delivery of nucleic acids to muscle cells (myofibers) throughout the limb muscles of mammals. The procedure involves the injection of naked plasmid DNA or siRNA into a distal vein of a limb that is transiently isolated by a tourniquet or blood pressure cuff. Nucleic acid delivery to myofibers is facilitated by its rapid injection in sufficient volume to enable extravasation of the nucleic acid solution into muscle tissue. High levels of transgene expression in skeletal muscle were achieved in both small and large animals with minimal toxicity. Evidence of siRNA delivery to limb muscle was also obtained. For plasmid DNA intravenous injection into a rhesus monkey, a threeway stopcock was connected to two syringe pumps (Model PHD 2000; Harvard Instruments), each loaded with a single syringe. Five minutes after a papaverine injection, pDNA (15.5 to 25.7 mg in 40-100 ml saline) was injected at a rate of 1.7 or 2.0 ml/s. This could be scaled up for plasmid DNA expressing CRISPR Cas of the present invention with an injection of about 300 to 500 mg in 800 to 2000 ml saline for a human. For adenoviral vector injections into a rat, 2×109 infectious particles were injected in 3 ml of normal saline solution (NSS). This could be scaled up for an adenoviral vector expressing CRISPR Cas of the present invention with an injection of about 1×1013 infectious particles were injected in 10 liters of NSS for a human. For siRNA, a rat was injected into the great saphenous vein with 12.5 μg of a siRNA and a primate was injected injected into the great saphenous vein with 750 μg of a siRNA. This could be scaled up for a CRISPR Cas of the present invention, for example, with an injection of about 15 to about 50 mg into the great saphenous vein of a human.

[0754] See also, for example, WO2013163628 A2, Genetic Correction of Mutated Genes, published application of Duke University describes efforts to correct, for example, a frameshift mutation which causes a premature stop codon and a truncated gene product that can be corrected via nuclease mediated non-homologous end joining such as those responsible for Duchenne Muscular Dystrophy, (“DMD”) a recessive, fatal, X-linked disorder that results in muscle degeneration due to mutations in the dystrophin gene. The majority of dystrophin mutations that cause DMD are deletions of exons that disrupt the reading frame and cause premature translation termination in the dystrophin gene. Dystrophin is a cytoplasmic protein that provides structural stability to the dystroglycan complex of the cell membrane that is responsible for regulating muscle cell integrity and function. The dystrophin gene or “DMD gene” as used interchangeably herein is 2.2 megabases at locus Xp21. The primary transcription measures about 2,400 kb with the mature mRNA being about 14 kb. 79 exons code for the protein which is over 3500 amino acids. Exon 51 is frequently adjacent to frame-disrupting deletions in DMD patients and has been targeted in clinical trials for oligonucleotide-based exon skipping. A clinical trial for the exon 51 skipping compound eteplirsen recently reported a significant functional benefit across 48 weeks, with an average of 47% dystrophin positive fibers compared to baseline. Mutations in exon 51 are ideally suited for permanent correction by NHEJ-based genome editing.

[0755] The methods of US Patent Publication No. 20130145487 assigned to Cellectis, which relates to meganuclease variants to cleave a target sequence from the human dystrophin gene (DMD), may also be modified to for the nucleic acid-targeting system of the present invention.

### Treating Diseases of the Skin

[0756] The present invention also contemplates delivering the CRISPR-Cas system described herein to the skin.

[0757] Hickerson et al. (Molecular Therapy—Nucleic Acids (2013) 2, e129) relates to a motorized microneedle array skin delivery device for delivering self-delivery (sd)-siRNA to human and murine skin. The primary challenge to translating siRNA-based skin therapeutics to the clinic is the development of effective delivery systems. Substantial effort has been invested in a variety of skin delivery technologies with limited success. In a clinical study in which skin was treated with siRNA, the exquisite pain associated with the hypodermic needle injection precluded enrollment of additional patients in the trial, highlighting the need for improved, more “patient-friendly” (i.e., little or no pain) delivery approaches. Microneedles represent an efficient way to deliver large charged cargos including siRNAs across the primary barrier, the stratum corneum, and are generally regarded as less painful than conventional hypodermic needles. Motorized “stamp type” microneedle devices, including the motorized microneedle array (MMNA) device used by Hickerson et al., have been shown to be safe in hairless mice studies and cause little or no pain as evidenced by (i) widespread use in the cosmetic industry and (ii) limited testing in which nearly all volunteers found use of the device to be much less painful than a flushot, suggesting siRNA delivery using this device will result in much less pain than was experienced in the previous clinical trial using hypodermic needle injections. The MMNA device (marketed as Triple-M or Tri-M by Bomtech Electronic Co, Seoul, South Korea) was adapted for delivery of siRNA to mouse and human skin. sd-siRNA solution (up to 300 μl of 0.1 mg/ml RNA) was introduced into the chamber of the disposable Tri-M needle cartridge (Bomtech), which was set to a depth of 0.1 mm. For treating human skin, deidentified skin (obtained immediately following surgical procedures) was manually stretched and pinned to a cork platform before treatment. All intradermal injections were performed using an insulin syringe with a 28-gauge 0.5-inch needle. The MMNA device and method of Hickerson et al. could be used and/or adapted to deliver the CRISPR Cas of the present invention, for example, at a dosage of up to 300 μl of 0.1 mg/ml CRISPR Cas to the skin.

[0758] Leachman et al. (Molecular Therapy, vol. 18 no. 2, 442-446 Feb. 2010) relates to a phase 1b clinical trial for treatment of a rare skin disorder pachyonychia congenita (PC), an autosomal dominant syndrome that includes a disabling plantar keratoderma, utilizing the first short-interfering RNA (siRNA)-based therapeutic for skin. This siRNA, called TD101, specifically and potently targets the keratin 6a (K6a) N171K mutant mRNA without affecting wild-type K6a mRNA.

[0759] Zheng et al. (PNAS, Jul. 24, 2012, vol. 109, no. 30, 11975-11980) show that spherical nucleic acid nanoparticle conjugates (SNA-NCs), gold cores surrounded by a dense shell of highly oriented, covalently immobilized siRNA, freely penetrate almost 100% of keratinocytes in vitro, mouse skin, and human epidermis within hours after application. Zheng et al. demonstrated that a single application of 25 nM epidermal growth factor receptor (EGFR) SNA-NCs for 60 h demonstrate effective gene knockdown in human skin. A similar dosage may be contemplated for CRISPR Cas immobilized in SNA-NCs for administration to the skin.

### Cancer

[0760] In some embodiments, the treatment, prophylaxis or diagnosis of cancer is provided. The target is preferably one or more of the FAS, BID, CTLA4, PDCD1, CBLB, PTPN6, TRAC or TRBC genes. The cancer may be one or more of lymphoma, chronic lymphocytic leukemia (CLL), B cell acute lymphocytic leukemia (B-ALL), acute lymphoblastic leukemia, acute myeloid leukemia, non-Hodgkin's lymphoma (NHL), diffuse large cell lymphoma (DLCL), multiple myeloma, renal cell carcinoma (RCC), neuroblastoma, colorectal cancer, breast cancer, ovarian cancer, melanoma, sarcoma, prostate cancer, lung cancer, esophageal cancer, hepatocellular carcinoma, pancreatic cancer, astrocytoma, mesothelioma, head and neck cancer, and medulloblastoma. This may be implemented with engineered chimeric antigen receptor (CAR) T cell. This is described in WO2015161276, the disclosure of which is hereby incorporated by reference and described herein below.

[0761] Target genes suitable for the treatment or prophylaxis of cancer may include, in some embodiments, those described in WO2015048577 the disclosure of which is hereby incorporated by reference.

### Usher Syndrome or Retinitis Pigmentosa-39

[0762] In some embodiments, the treatment, prophylaxis or diagnosis of Usher Syndrome or retinitis pigmentosa-39 is provided. The target is preferably the USH2A gene. In some embodiments, correction of a G deletion at position 2299 (2299delG) is provided. This is described in W02015134812A1, the disclosure of which is hereby incorporated by reference.

### Autoimmune and Inflammatory Disorders

[0763] In some embodiments, autoimmune and inflammatory disorders are treated. These include Multiple Sclerosis (MS) or Rheumatoid Arthritis (RA), for example.

### Cystic Fibrosis (CF)

[0764] In some embodiments, the treatment, prophylaxis or diagnosis of cystic fibrosis is provided. The target is preferably the SCNN1A or the CFTR gene. This is described in WO2015157070, the disclosure of which is hereby incorporated by reference.

[0765] Schwank et al. (Cell Stem Cell, 13:653-58, 2013) used CRISPR-Cas9 to correct a defect associated with cystic fibrosis in human stem cells. The team's target was the gene for an ion channel, cystic fibrosis transmembrane conductor receptor (CFTR). A deletion in CFTR causes the protein to misfold in cystic fibrosis patients. Using cultured intestinal stem cells developed from cell samples from two children with cystic fibrosis, Schwank et al. were able to correct the defect using CRISPR along with a donor plasmid containing the reparative sequence to be inserted. The researchers then grew the cells into intestinal “organoids,” or miniature guts, and showed that they functioned normally. In this case, about half of clonal organoids underwent the proper genetic correction.

[0766] In some embodiments, Cystic fibrosis is treated, for example. Delivery to the lungs is therefore preferred. The F508 mutation (delta-F508, full name CFTRAF508 or F508del-CFTR) is preferably corrected. In some embodiments, the targets may be ABCC7, CF or MRP7.

### Duchenne's Muscular Dystrophy

[0767] Duchenne's muscular dystrophy (DMD) is a recessive, sex-linked muscle wasting disease that affects approximately 1 in 5000 males at birth. Mutations of the dystrophin gene result in an absence of dystrophin in skeletal muscle, where it normally functions to connect the cytoskeleton of the muscle fiber to the basal lamina. The absence of dystrophin caused be these mutations results in excessive calcium entry into the soma which causes the mitochondria to rupture, destroying the cell. Current treatments are focused on easing the symptoms of DMD, and the average life expetency is approximately 26 years.

[0768] CRISPR/Cas efficacy as a treatment for certain types of DMD has been demonstrated in mouse models. In one such study, the muscular dystrophy phenotype was partially corrected in the mouse by knocking-out a mutant exon resulting in a functional protein (see Nelson et al. (2016) Science, Long et al. (2016) Science, and Tabebordbar et al. (2016) Science).

[0769] In some embodiments, DMD is treated. In some embodiments, delivery is to the muscle by injection.

### Glycogen Storage Diseases, Including 1a

[0770] Glycogen Storage Disease 1a is a genetic disease resulting from deficiency of the enzyme glucose-6-phosphatase. The deficiency impairs the ability of the liver to produce free glucose from glycogen and from gluconeogenesis. In some embodiments, the gene encoding the glucose-6-phosphatase enzyme is targeted. In some embodiments, Glycogen Storage Disease 1a is treated. In some embodiments, delivery is to the liver by encapsulation of the Cas (in protein or mRNA form) in a lipid particle, such as an LNP.

[0771] In some embodiments, Glycogen Storage Diseases, including 1a, are targeted and preferably treated, for example by targeting polynucleotides associated with the condition/disease/infection. The associated polynucleotides include DNA, which may include genes (where genes include any coding sequence and regulatory elements such as enhancers or promoters). In some embodiments, the associated polynucleotides may include the SLC2A2, GLUT2, G6PC, G6PT, G6PT1, GAA, LAMP2, LAMPB, AGL, GDE, GBE1, GYS2, PYGL, or PFKM genes.

### Hurler Syndrome

[0772] Hurler syndrome, also known as mucopolysaccharidosis type I (MPS I), Hurler's disease, is a genetic disorder that results in the buildup of glycosaminoglycans (formerly known as mucopolysaccharides) due to a deficiency of alpha-L iduronidase, an enzyme responsible for the degradation of mucopolysaccharides in lysosomes. Hurler syndrome is often classified as a lysosomal storage disease, and is clinically related to Hunter Syndrome. Hunter syndrome is X-linked while Hurler syndrome is autosomal recessive. MPS I is divided into three subtypes based on severity of symptoms. All three types result from an absence of, or insufficient levels of, the enzyme a-L-iduronidase. MPS I H or Hurler syndrome is the most severe of the MPS I subtypes. The other two types are MPS I S or Scheie syndrome and MPS I H-S or Hurler-Scheie syndrome. Children born to an MPS I parent carry a defective IDUA gene, which has been mapped to the 4p16.3 site on chromosome 4. The gene is named IDUA because of its iduronidase enzyme protein product. As of 2001, 52 different mutations in the IDUA gene have been shown to cause Hurler syndrome. Successful treatment of the mouse, dog, and cat models of MPS I by delivery of the iduronidase gene through retroviral, lentiviral, AAV, and even nonviral vectors.

[0773] In some embodiments, the a-L-iduronidase gene is targeted and a repair template preferably provided.

### HIV and AIDS

[0774] In some embodiments, the treatment, prophylaxis or diagnosis of HIV and AIDS is provided. The target is preferably the CCR5 gene in HIV. This is described in W02015148670A1, the disclosure of which is hereby incorporated by reference.

### Beta Thalassaemia

[0775] In some embodiments, the treatment, prophylaxis or diagnosis of Beta Thalassaemia is provided. The target is preferably the BCL11A gene. This is described in WO2015148860, the disclosure of which is hereby incorporated by reference.

### Sickle Cell Disease (SCD)

[0776] In some embodiments, the treatment, prophylaxis or diagnosis of Sickle Cell Disease (SCD) is provided. The target is preferably the HBB or BCL11A gene. This is described in WO2015148863, the disclosure of which is hereby incorporated by reference.

### Herpes Simplex Virus 1 and 2

[0777] Herpesviridae are a family of viruses composed of linear double-stranded DNA genomes with 75-200 genes. For the purposes of gene editing, the most commonly studied family member is Herpes Simplex Virus-1 (HSV-1), a virus which has a distinct number of advantages over other viral vectors (reviewed in Vannuci et al. (2003)). Thus, in some embodiments, the viral vector is an HSV viral vector. In some embodiments, the HSV viral vector is HSV-1.

[0778] HSV-1 has a large genome of approximately 152 kb of double stranded DNA. This genome comprises of more than 80 genes, many of which can be replaced or removed, allowing a gene insert of between 30-150 kb. The viral vectors derived from HSV-1 are generally separated into 3 groups: replication-competent attenuated vectors, replication-incompetent recombinant vectors, and defective helper-dependent vectors known as amplicons. Gene transfer using HSV-1 as a vector has been demonstrated previously, for instance for the treatment of neuropathic pain (see, e.g., Wolfe et al. (2009) Gene Ther) and rheumatoid arthritis (see e.g., Burton et al. (2001) Stem Cells).

[0779] Thus, in some embodiments, the viral vector is an HSV viral vector. In some embodiments, the HSV viral vector is HSV-1. In some embodiments, the vector is used for delivery of one or more CRISPR components. It may be particularly useful for delivery of the Cas9 and one or more guide RNAs, for example 2 or more, 3 or more, or 4 or more guide RNAs. In some embodiments, the vector is theretofore useful in a multiplex system. In some embodiments, this delivery is for the treatment of treatment of neuropathic pain or rheumatoid arthritis.

[0780] In some embodiments, the treatment, prophylaxis or diagnosis of HSV-1 (Herpes Simplex Virus 1) is provided. The target is preferably the UL19, UL30, UL48 or UL50 gene in HSV-1. This is described in WO2015153789, the disclosure of which is hereby incorporated by reference.

[0781] In other embodiments, the treatment, prophylaxis or diagnosis of HSV-2 (Herpes Simplex Virus 2) is provided. The target is preferably the UL19, UL30, UL48 or UL50 gene in HSV-2. This is described in WO2015153791, the disclosure of which is hereby incorporated by reference.

[0782] In some embodiments, the treatment, prophylaxis or diagnosis of Primary Open Angle Glaucoma (POAG) is provided. The target is preferably the MYOC gene. This is described in WO2015153780, the disclosure of which is hereby incorporated by reference.

### Adoptive Cell Therapies

[0783] The present invention also contemplates use of the CRISPR-Cas system described herein to modify cells for adoptive therapies. Aspects of the invention accordingly involve the adoptive transfer of immune system cells, such as T cells, specific for selected antigens, such as tumor associated antigens (see Maus et al., 2014, Adoptive Immunotherapy for Cancer or Viruses, Annual Review of Immunology, Vol. 32: 189-225; Rosenberg and Restifo, 2015, Adoptive cell transfer as personalized immunotherapy for human cancer, Science Vol. 348 no. 6230 pp. 62-68; and, Restifo et al., 2015, Adoptive immunotherapy for cancer: harnessing the T cell response. Nat. Rev. Immunol. 12(4): 269-281; and Jenson and Riddell, 2014, Design and implementation of adoptive therapy with chimeric antigen receptor-modified T cells. Immunol Rev. 257(1): 127-144). Various strategies may for example be employed to genetically modify T cells by altering the specificity of the T cell receptor (TCR) for example by introducing new TCR a and f3 chains with selected peptide specificity (see U.S. Pat. No. 8,697,854; PCT Patent Publications: WO2003020763, WO2004033685, WO2004044004, WO2005114215, WO2006000830, WO2008038002, WO2008039818, WO2004074322, WO2005113595, WO2006125962, WO2013166321, WO2013039889, WO2014018863, WO2014083173; U.S. Pat. No. 8,088,379).

[0784] As an alternative to, or addition to, TCR modifications, chimeric antigen receptors (CARs) may be used in order to generate immunoresponsive cells, such as T cells, specific for selected targets, such as malignant cells, with a wide variety of receptor chimera constructs having been described (see U.S. Pat. Nos. 5,843,728; 5,851,828; 5,912,170; 6,004,811; 6,284,240; 6,392,013; 6,410,014; 6,753,162; 8,211,422; and, PCT Publication WO9215322). Alternative CAR constructs may be characterized as belonging to successive generations. First-generation CARs typically consist of a single-chain variable fragment of an antibody specific for an antigen, for example comprising a VL linked to a VH of a specific antibody, linked by a flexible linker, for example by a CD8a hinge domain and a CD8a transmembrane domain, to the transmembrane and intracellular signaling domains of either CD3 or FcRγ (scFv-CD3ζ or scFv-FcRγ; see U.S. Pat. Nos. 7,741,465; 5,912,172; 5,906,936). Second-generation CARs incorporate the intracellular domains of one or more costimulatory molecules, such as CD28, OX40 (CD134), or 4-1BB (CD137) within the endodomain (for example scFv-CD28/OX40/4-1BB-CD3; see U.S. Pat. Nos. 8,911,993; 8,916,381; 8,975,071; 9,101,584; 9,102,760; 9,102,761). Third-generation CARs include a combination of costimulatory endodomains, such a CD3-chain, CD97, GDI 1a-CD18, CD2, ICOS, CD27, CD154, CDS, OX40, 4-1BB, or CD28 signaling domains (for example scFv-CD28-4-1BB-CD3t or scFv-CD28-OX40-CD3; see U.S. Pat. Nos. 8,906,682; 8,399,645; 5,686,281; PCT Publication No. WO2014134165; PCT Publication No. WO2012079000). Alternatively, costimulation may be orchestrated by expressing CARs in antigen-specific T cells, chosen so as to be activated and expanded following engagement of their native αβTCR, for example by antigen on professional antigen-presenting cells, with attendant costimulation. In addition, additional engineered receptors may be provided on the immunoresponsive cells, for example to improve targeting of a T-cell attack and/or minimize side effects.

[0785] Alternative techniques may be used to transform target immunoresponsive cells, such as protoplast fusion, lipofection, transfection or electroporation. A wide variety of vectors may be used, such as retroviral vectors, lentiviral vectors, adenoviral vectors, adeno-associated viral vectors, plasmids or transposons, such as a Sleeping Beauty transposon (see U.S. Pat. Nos. 6,489,458; 7,148,203; 7,160,682; 7,985,739; 8,227,432), may be used to introduce CARs, for example using 2nd generation antigen-specific CARs signaling through CD3t and either CD28 or CD137. Viral vectors may for example include vectors based on HIV, SV40, EBV, HSV or BPV.

[0786] Cells that are targeted for transformation may for example include T cells, Natural Killer (NK) cells, cytotoxic T lymphocytes (CTL), regulatory T cells, human embryonic stem cells, tumor-infiltrating lymphocytes (TIL) or a pluripotent stem cell from which lymphoid cells may be differentiated. T cells expressing a desired CAR may for example be selected through co-culture with y-irradiated activating and propagating cells (AaPC), which co-express the cancer antigen and co-stimulatory molecules. The engineered CAR T-cells may be expanded, for example by co-culture on AaPC in presence of soluble factors, such as IL-2 and IL-21. This expansion may for example be carried out so as to provide memory CAR+ T cells (which may for example be assayed by non-enzymatic digital array and/or multi-panel flow cytometry). In this way, CAR T cells may be provided that have specific cytotoxic activity against antigen-bearing tumors (optionally in conjunction with production of desired chemokines such as interferon-y). CAR T cells of this kind may for example be used in animal models, for example to threat tumor xenografts.

[0787] Approaches such as the foregoing may be adapted to provide methods of treating and/or increasing survival of a subject having a disease, such as a neoplasia, for example by administering an effective amount of an immunoresponsive cell comprising an antigen recognizing receptor that binds a selected antigen, wherein the binding activates the immunoreponsive cell, thereby treating or preventing the disease (such as a neoplasia, a pathogen infection, an autoimmune disorder, or an allogeneic transplant reaction). Dosing in CART cell therapies may for example involve administration of from 106 to 109 cells/kg, with or without a course of lymphodepletion, for example with cyclophosphamide.

[0788] In one embodiment, the treatment can be administrated into patients undergoing an immunosuppressive treatment. The cells or population of cells, may be made resistant to at least one immunosuppressive agent due to the inactivation of a gene encoding a receptor for such immunosuppressive agent. Not being bound by a theory, the immunosuppressive treatment should help the selection and expansion of the immunoresponsive or T cells according to the invention within the patient.

[0789] The administration of the cells or population of cells according to the present invention may be carried out in any convenient manner, including by aerosol inhalation, injection, ingestion, transfusion, implantation or transplantation. The cells or population of cells may be administered to a patient subcutaneously, intradermally, intratumorally, intranodally, intramedullary, intramuscularly, by intravenous or intralymphatic injection, or intraperitoneally. In one embodiment, the cell compositions of the present invention are preferably administered by intravenous injection.

[0790] The administration of the cells or population of cells can consist of the administration of 104-109 cells per kg body weight, preferably 105 to 106 cells/kg body weight including all integer values of cell numbers within those ranges. Dosing in CART cell therapies may for example involve administration of from 106 to 109 cells/kg, with or without a course of lymphodepletion, for example with cyclophosphamide. The cells or population of cells can be administrated in one or more doses. In another embodiment, the effective amount of cells are administrated as a single dose. In another embodiment, the effective amount of cells are administrated as more than one dose over a period time. Timing of administration is within the judgment of managing physician and depends on the clinical condition of the patient. The cells or population of cells may be obtained from any source, such as a blood bank or a donor. While individual needs vary, determination of optimal ranges of effective amounts of a given cell type for a particular disease or conditions are within the skill of one in the art. An effective amount means an amount which provides a therapeutic or prophylactic benefit. The dosage administrated will be dependent upon the age, health and weight of the recipient, kind of concurrent treatment, if any, frequency of treatment and the nature of the effect desired.

[0791] In another embodiment, the effective amount of cells or composition comprising those cells are administrated parenterally. The administration can be an intravenous administration. The administration can be directly done by injection within a tumor.

[0792] To guard against possible adverse reactions, engineered immunoresponsive cells may be equipped with a transgenic safety switch, in the form of a transgene that renders the cells vulnerable to exposure to a specific signal. For example, the herpes simplex viral thymidine kinase (TK) gene may be used in this way, for example by introduction into allogeneic T lymphocytes used as donor lymphocyte infusions following stem cell transplantation (Greco, et al., Improving the safety of cell therapy with the TK-suicide gene. Front. Pharmacol. 2015; 6: 95). In such cells, administration of a nucleoside prodrug such as ganciclovir or acyclovir causes cell death. Alternative safety switch constructs include inducible caspase 9, for example triggered by administration of a small-molecule dimerizer that brings together two nonfunctional icasp9 molecules to form the active enzyme. A wide variety of alternative approaches to implementing cellular proliferation controls have been described (see U.S. Patent Publication No. 20130071414; PCT Patent Publication WO2011146862; PCT Patent Publication WO2014011987; PCT Patent Publication WO2013040371; Zhou et al. BLOOD, 2014, 123/25:3895-3905; Di Stasi et al., The New England Journal of Medicine 2011; 365:1673-1683; Sadelain M, The New England Journal of Medicine 2011; 365:1735-173; Ramos et al., Stem Cells 28(6):1107-15 (2010)).

[0793] In a further refinement of adoptive therapies, genome editing with a CRISPR-Cas system as described herein may be used to tailor immunoresponsive cells to alternative implementations, for example providing edited CART cells (see Poirot et al., 2015, Multiplex genome edited T-cell manufacturing platform for “off-the-shelf” adoptive T-cell immunotherapies, Cancer Res 75 (18): 3853). For example, immunoresponsive cells may be edited to delete expression of some or all of the class of HLA type II and/or type I molecules, or to knockout selected genes that may inhibit the desired immune response, such as the PD1 gene.

[0794] Cells may be edited using any CRISPR system and method of use thereof as described herein. CRISPR systems may be delivered to an immune cell by any method described herein. In preferred embodiments, cells are edited ex vivo and transferred to a subject in need thereof. Immunoresponsive cells, CAR T cells or any cells used for adoptive cell transfer may be edited. Editing may be performed to eliminate potential alloreactive T-cell receptors (TCR), disrupt the target of a chemotherapeutic agent, block an immune checkpoint, activate a T cell, and/or increase the differentiation and/or proliferation of functionally exhausted or dysfunctional CD8+ T-cells (see PCT Patent Publications: WO2013176915, WO2014059173, WO2014172606, WO2014184744, and WO2014191128). Editing may result in inactivation of a gene.

[0795] By inactivating a gene it is intended that the gene of interest is not expressed in a functional protein form. In a particular embodiment, the CRISPR system specifically catalyzes cleavage in one targeted gene thereby inactivating said targeted gene. The nucleic acid strand breaks caused are commonly repaired through the distinct mechanisms of homologous recombination or non-homologous end joining (NHEJ). However, NHEJ is an imperfect repair process that often results in changes to the DNA sequence at the site of the cleavage. Repair via non-homologous end joining (NHEJ) often results in small insertions or deletions (Indel) and can be used for the creation of specific gene knockouts. Cells in which a cleavage induced mutagenesis event has occurred can be identified and/or selected by well-known methods in the art.

[0796] T cell receptors (TCR) are cell surface receptors that participate in the activation of T cells in response to the presentation of antigen. The TCR is generally made from two chains, α and β, which assemble to form a heterodimer and associates with the CD3-transducing subunits to form the T cell receptor complex present on the cell surface. Each α and β chain of the TCR consists of an immunoglobulin-like N-terminal variable (V) and constant (C) region, a hydrophobic transmembrane domain, and a short cytoplasmic region. As for immunoglobulin molecules, the variable region of the α and β chains are generated by V(D)J recombination, creating a large diversity of antigen specificities within the population of T cells. However, in contrast to immunoglobulins that recognize intact antigen, T cells are activated by processed peptide fragments in association with an MHC molecule, introducing an extra dimension to antigen recognition by T cells, known as MHC restriction. Recognition of MHC disparities between the donor and recipient through the T cell receptor leads to T cell proliferation and the potential development of graft versus host disease (GVHD). The inactivation of TCRα or TCRβ can result in the elimination of the TCR from the surface of T cells preventing recognition of alloantigen and thus GVHD. However, TCR disruption generally results in the elimination of the CD3 signaling component and alters the means of further T cell expansion.

[0797] Allogeneic cells are rapidly rejected by the host immune system. It has been demonstrated that, allogeneic leukocytes present in non-irradiated blood products will persist for no more than 5 to 6 days (Boni, Muranski et al. 2008 Blood 1; 112(12):4746-54). Thus, to prevent rejection of allogeneic cells, the host's immune system usually has to be suppressed to some extent. However, in the case of adoptive cell transfer the use of immunosuppressive drugs also have a detrimental effect on the introduced therapeutic T cells. Therefore, to effectively use an adoptive immunotherapy approach in these conditions, the introduced cells would need to be resistant to the immunosuppressive treatment. Thus, in a particular embodiment, the present invention further comprises a step of modifying T cells to make them resistant to an immunosuppressive agent, preferably by inactivating at least one gene encoding a target for an immunosuppressive agent. An immunosuppressive agent is an agent that suppresses immune function by one of several mechanisms of action. An immunosuppressive agent can be, but is not limited to a calcineurin inhibitor, a target of rapamycin, an interleukin-2 receptor α-chain blocker, an inhibitor of inosine monophosphate dehydrogenase, an inhibitor of dihydrofolic acid reductase, a corticosteroid or an immunosuppressive antimetabolite. The present invention allows conferring immunosuppressive resistance to T cells for immunotherapy by inactivating the target of the immunosuppressive agent in T cells. As non-limiting examples, targets for an immunosuppressive agent can be a receptor for an immunosuppressive agent such as: CD52, glucocorticoid receptor (GR), a FKBP family gene member and a cyclophilin family gene member.

[0798] Immune checkpoints are inhibitory pathways that slow down or stop immune reactions and prevent excessive tissue damage from uncontrolled activity of immune cells. In certain embodiments, the immune checkpoint targeted is the programmed death-1 (PD-1 or CD279) gene (PDCD1). In other embodiments, the immune checkpoint targeted is cytotoxic T-lymphocyte-associated antigen (CTLA-4). In additional embodiments, the immune checkpoint targeted is another member of the CD28 and CTLA4 Ig superfamily such as BTLA, LAG3, ICOS, PDL1 or KIR. In further additional embodiments, the immune checkpoint targeted is a member of the TNFR superfamily such as CD40, OX40, CD137, GITR, CD27 or TIM-3.

[0799] Additional immune checkpoints include Src homology 2 domain-containing protein tyrosine phosphatase 1 (SHP-1) (Watson H A, et al., SHP-1: the next checkpoint target for cancer immunotherapy? Biochem Soc Trans. 2016 Apr 15; 44(2):356-62). SHP-1 is a widely expressed inhibitory protein tyrosine phosphatase (PTP). In T-cells, it is a negative regulator of antigen-dependent activation and proliferation. It is a cytosolic protein, and therefore not amenable to antibody-mediated therapies, but its role in activation and proliferation makes it an attractive target for genetic manipulation in adoptive transfer strategies, such as chimeric antigen receptor (CAR) T cells. Immune checkpoints may also include T cell immunoreceptor with Ig and ITIM domains (TIGIT/Vstm3/WUCAM/VSIG9) and VISTA (Le Mercier I, et al., (2015) Beyond CTLA-4 and PD-1, the generation Z of negative checkpoint regulators. Front. Immunol. 6:418).

[0800] WO2014172606 relates to the use of MT1 and/or MT1 inhibitors to increase proliferation and/or activity of exhausted CD8+ T-cells and to decrease CD8+ T-cell exhaustion (e.g., decrease functionally exhausted or unresponsive CD8+ immune cells). In certain embodiments, metallothioneins are targeted by gene editing in adoptively transferred T cells.

[0801] In certain embodiments, targets of gene editing may be at least one targeted locus involved in the expression of an immune checkpoint protein. Such targets may include, but are not limited to CTLA4, PPP2CA, PPP2CB, PTPN6, PTPN22, PDCD1, ICOS (CD278), PDL1, KIR, LAG3, HAVCR2, BTLA, CD160, TIGIT, CD96, CRTAM, LAIR1, SIGLEC7, SIGLEC9, CD244 (2B4), TNFRSF10B, TNFRSF10A, CASP8, CASP10, CASP3, CASP6, CASP7, FADD, FAS, TGFBRII, TGFRBRI, SMAD2, SMAD3, SMAD4, SMAD10, SKI, SKIL, TGIF1, IL10RA, IL10RB, HMOX2, IL6R, IL6ST, EIF2AK4, CSK, PAG1, SIT1, FOXP3, PRDM1, BATF, VISTA, GUCY1A2, GUCY1A3, GUCY1B2, GUCY1B3, MT1, MT2, CD40, OX40, CD137, GITR, CD27, SHP-1 or TIM-3. In preferred embodiments, the gene locus involved in the expression of PD-1 or CTLA-4 genes is targeted. In other preferred embodiments, combinations of genes are targeted, such as but not limited to PD-1 and TIGIT.

[0802] In other embodiments, at least two genes are edited. Pairs of genes may include, but are not limited to PD1 and TCRα, PD1 and TCRβ, CTLA-4 and TCRα, CTLA-4 and TCRβ, LAG3 and TCRα, LAG3 and TCRβ, Tim3 and TCRα, Tim3 and TCRβ, BTLA and TCRα, BTLA and TCRβ, BY55 and TCRα, BY55 and TCRβ, TIGIT and TCRα, TIGIT and TCRβ, B7H5 and TCRα, B7H5 and TCRβ, LAIR1 and TCRα, LAIR1 and TCRβ, SIGLEC10 and TCRα, SIGLEC10 and TCRβ, 2B4 and TCRα, 2B4 and TCRβ.

[0803] Whether prior to or after genetic modification of the T cells, the T cells can be activated and expanded generally using methods as described, for example, in U.S. Pat. Nos. 6,352,694; 6,534,055; 6,905,680; 5,858,358; 6,887,466; 6,905,681; 7,144,575; 7,232,566; 7,175,843; 5,883,223; 6,905,874; 6,797,514; 6,867,041; and 7,572,631. T cells can be expanded in vitro or in vivo.

[0804] The practice of the present invention employs, unless otherwise indicated, conventional techniques of immunology, biochemistry, chemistry, molecular biology, microbiology, cell biology, genomics and recombinant DNA, which are within the skill of the art. See MOLECULAR CLONING: A LABORATORY MANUAL, 2nd edition (1989) (Sambrook, Fritsch and Maniatis); MOLECULAR CLONING: A LABORATORY MANUAL, 4th edition (2012) (Green and Sambrook); CURRENT PROTOCOLS IN MOLECULAR BIOLOGY (1987) (F. M. Ausubel, et al. eds.); the series METHODS IN ENZYMOLOGY (Academic Press, Inc.); PCR 2: A PRACTICAL APPROACH (1995) (M. J. MacPherson, B. D. Hames and G. R. Taylor eds.); ANTIBODIES, A LABORATORY MANUAL (1988) (Harlow and Lane, eds.); ANTIBODIES A LABORATORY MANUAL, 2nd edition (2013) (E. A. Greenfield ed.); and ANIMAL CELL CULTURE (1987) (R. I. Freshney, ed.).

[0805] The practice of the present invention employs, unless otherwise indicated, conventional techniques for generation of genetically modified mice. See Marten H. Hofker and Jan van Deursen, TRANSGENIC MOUSE METHODS AND PROTOCOLS, 2nd edition (2011).

[0806] In some embodiments, the invention described herein relates to a method for adoptive immunotherapy, in which T cells are edited ex vivo by CRISPR to modulate at least one gene and subsequently administered to a patient in need thereof. In some embodiments, the CRISPR editing comprising knocking-out or knocking-down the expression of a target gene in the edited T cells. In some embodiments, in addition to modulating the target gene, the T cells are also edited ex vivo by CRISPR to (1) knock-in an exogenous gene encoding a chimeric antigen receptor (CAR) or a T-cell receptor (TCR), (2) knock-out or knock-down expression of an immune checkpoint receptor, (3) knock-out or knock-down expression of an endogenous TCR, (4) knock-out or knock-down expression of a human leukocyte antigen class I (HLA-I) proteins, and/or (5) knock-out or knock-down expression of an endogenous gene encoding an antigen targeted by an exogenous CAR or TCR.

[0807] In some embodiments, the T cells are contacted ex vivo with an adeno-associated virus (AAV) vector encoding a CRISPR effector protein, and a guide molecule comprising a guide sequence hybridizable to a target sequence, a tracr mate sequence, and a tracr sequence hybridizable to the tracr mate sequence. In some embodiments, the T cells are contacted ex vivo (e.g., by electroporation) with a ribonucleoprotein (RNP) comprising a CRISPR effector protein complexed with a guide molecule, wherein the guide molecule comprising a guide sequence hybridizable to a target sequence, a tracr mate sequence, and a tracr sequence hybridizable to the tracr mate sequence. See Rupp et al., Scientific Reports 7:737 (2017); Liu et al., Cell Research 27:154-157 (2017). In some embodiments, the T cells are contacted ex vivo (e.g., by electroporation) with an mRNA encoding a CRISPR effector protein, and a guide molecule comprising a guide sequence hybridizable to a target sequence, a tracr mate sequence, and a tracr sequence hybridizable to the tracr mate sequence. See Eyquem et al., Nature 543:113-117 (2017). In some embodiments, the T cells are not contacted ex vivo with a lentivirus or retrovirus vector.

[0808] In some embodiments, the method comprises editing T cells ex vivo by CRISPR to knock-in an exogenous gene encoding a CAR, thereby allowing the edited T cells to recognize cancer cells based on the expression of specific proteins located on the cell surface. In some embodiments, T cells are edited ex vivo by CRISPR to knock-in an exogenous gene encoding a TCR, thereby allowing the edited T cells to recognize proteins derived from either the surface or inside of the cancer cells. In some embodiments, the method comprising providing an exogenous CAR-encoding or TCR-encoding sequence as a donor sequence, which can be integrated by homology-directed repair (HDR) into a genomic locus targeted by a CRISPR guide sequence. In some embodiments, targeting the exogenous CAR or TCR to an endogenous TCR a constant (TRAC) locus can reduce tonic CAR signaling and facilitate effective internalization and re-expression of the CAR following single or repeated exposure to antigen, thereby delaying effector T-cell differentiation and exhaustion. See Eyquem et al., Nature 543:113-117 (2017).

[0809] In some embodiments, the method comprises editing T cells ex vivo by CRISPR to block one or more immune checkpoint receptors to reduce immunosuppression by cancer cells. In some embodiments, T cells are edited ex vivo by CRISPR to knock-out or knock-down an endogenous gene involved in the programmed death-1 (PD-1) signaling pathway, such as PD-1 and PD-L1. In some embodiments, T cells are edited ex vivo by CRISPR to mutate the Pdcd1 locus or the CD274 locus. In some embodiments, T cells are edited ex vivo by CRISPR using one or more guide sequences targeting the first exon of PD-1. See Rupp et al., Scientific Reports 7:737 (2017); Liu et al., Cell Research 27:154-157 (2017).

[0810] In some embodiments, the method comprises editing T cells ex vivo by CRISPR to eliminate potential alloreactive TCRs to allow allogeneic adoptive transfer. In some embodiments, T cells are edited ex vivo by CRISPR to knock-out or knock-down an endogenous gene encoding a TCR (e.g., an αβ TCR) to avoid graft-versus-host-disease (GVHD). In some embodiments, T cells are edited ex vivo by CRISPR to mutate the TRAC locus. In some embodiments, T cells are edited ex vivo by CRISPR using one or more guide sequences targeting the first exon of TRAC. See Liu et al., Cell Research 27:154-157 (2017). In some embodiments, the method comprises use of CRISPR to knock-in an exogenous gene encoding a CAR or a TCR into the TRAC locus, while simultaneously knocking-out the endogenous TCR (e.g., with a donor sequence encoding a self-cleaving P2A peptide following the CAR cDNA). See Eyquem et al., Nature 543:113-117 (2017). In some embodiments, the exogenous gene comprises a promoter-less CAR-encoding or TCR-encoding sequence which is inserted operably downstream of an endogenous TCR promoter.

[0811] In some embodiments, the method comprises editing T cells ex vivo by CRISPR to knock-out or knock-down an endogenous gene encoding an HLA-I protein to minimize immunogenicity of the edited T cells. In some embodiments, T cells are edited ex vivo by CRISPR to mutate the beta-2 microglobulin (B2M) locus. In some embodiments, T cells are edited ex vivo by CRISPR using one or more guide sequences targeting the first exon of B2M. See Liu et al., Cell Research 27:154-157 (2017). In some embodiments, the method comprises use of CRISPR to knock-in an exogenous gene encoding a CAR or a TCR into the B2M locus, while simultaneously knocking-out the endogenous B2M (e.g., with a donor sequence encoding a self-cleaving P2A peptide following the CAR cDNA). See Eyquem et al., Nature 543:113-117 (2017). In some embodiments, the exogenous gene comprises a promoter-less CAR-encoding or TCR-encoding sequence which is inserted operably downstream of an endogenous B2M promoter.

[0812] In some embodiments, the method comprises editing T cells ex vivo by CRISPR to knock-out or knock-down an endogenous gene encoding an antigen targeted by an exogenous CAR or TCR. In some embodiments, the T cells are edited ex vivo by CRISPR to knock-out or knock-down the expression of a tumor antigen selected from human telomerase reverse transcriptase (hTERT), survivin, mouse double minute 2 homolog (MDM2), cytochrome P450 1B 1 (CYP1B), HER2/neu, Wilms' tumor gene 1 (WT1), livin, alphafetoprotein (AFP), carcinoembryonic antigen (CEA), mucin 16 (MUC16), MUC1, prostate-specific membrane antigen (PSMA), p53 or cyclin (DI) (see WO2016/011210). In some embodiments, the T cells are edited ex vivo by CRISPR to knock-out or knock-down the expression of an antigen selected from B cell maturation antigen (BCMA), transmembrane activator and CAML Interactor (TACT), or B-cell activating factor receptor (BAFF-R), CD38, CD138, CS-1, CD33, CD26, CD30, CD53, CD92, CD100, CD148, CD150, CD200, CD261, CD262, or CD362 (see WO2017/011804).

### Gene Drives

[0813] The present invention also contemplates use of the CRISPR-Cas system described herein to provide RNA-guided gene drives, for example in systems analogous to gene drives described in PCT Patent Publication WO 2015/105928. Systems of this kind may for example provide methods for altering eukaryotic germline cells, by introducing into the germline cell a nucleic acid sequence encoding an RNA-guided DNA nuclease and one or more guide RNAs. The guide RNAs may be designed to be complementary to one or more target locations on genomic DNA of the germline cell. The nucleic acid sequence encoding the RNA guided DNA nuclease and the nucleic acid sequence encoding the guide RNAs may be provided on constructs between flanking sequences, with promoters arranged such that the germline cell may express the RNA guided DNA nuclease and the guide RNAs, together with any desired cargo-encoding sequences that are also situated between the flanking sequences. The flanking sequences will typically include a sequence which is identical to a corresponding sequence on a selected target chromosome, so that the flanking sequences work with the components encoded by the construct to facilitate insertion of the foreign nucleic acid construct sequences into genomic DNA at a target cut site by mechanisms such as homologous recombination, to render the germline cell homozygous for the foreign nucleic acid sequence. In this way, gene-drive systems are capable of introgressing desired cargo genes throughout a breeding population (Gantz et al., 2015, Highly efficient Cas9-mediated gene drive for population modification of the malaria vector mosquito Anopheles stephensi, PNAS 2015, published ahead of print Nov. 23, 2015, doi:10.1073/pnas.1521077112; Esvelt et al., 2014, Concerning RNA-guided gene drives for the alteration of wild populations eLife 2014; 3:e03401). In select embodiments, target sequences may be selected which have few potential off-target sites in a genome. Targeting multiple sites within a target locus, using multiple guide RNAs, may increase the cutting frequency and hinder the evolution of drive resistant alleles. Truncated guide RNAs may reduce off-target cutting. Paired nickases may be used instead of a single nuclease, to further increase specificity. Gene drive constructs may include cargo sequences encoding transcriptional regulators, for example to activate homologous recombination genes and/or repress non-homologous end-joining. Target sites may be chosen within an essential gene, so that non-homologous end-joining events may cause lethality rather than creating a drive-resistant allele. The gene drive constructs can be engineered to function in a range of hosts at a range of temperatures (Cho et al. 2013, Rapid and Tunable Control of Protein Stability in Caenorhabditis elegans Using a Small Molecule, PLoS ONE 8(8): e72393. doi:10.1371/journal.pone.0072393).

### Xenotransplantation

[0814] The present invention also contemplates use of the CRISPR-Cas system described herein to provide RNA-guided DNA nucleases adapted to be used to provide modified tissues for transplantation. For example, RNA-guided DNA nucleases may be used to knockout, knockdown or disrupt selected genes in an animal, such as a transgenic pig (such as the human heme oxygenase-1 transgenic pig line), for example by disrupting expression of genes that encode epitopes recognized by the human immune system, i.e. xenoantigen genes. Candidate porcine genes for disruption may for example include a(1,3)-galactosyltransferase and cytidine monophosphate-N-acetylneuraminic acid hydroxylase genes (see PCT Patent Publication WO 2014/066505). In addition, genes encoding endogenous retroviruses may be disrupted, for example the genes encoding all porcine endogenous retroviruses (see Yang et al., 2015, Genome-wide inactivation of porcine endogenous retroviruses (PERVs), Science 27 Nov. 2015: Vol. 350 no. 6264 pp. 1101-1104). In addition, RNA-guided DNA nucleases may be used to target a site for integration of additional genes in xenotransplant donor animals, such as a human CD55 gene to improve protection against hyperacute rejection.

### General Gene Therapy Considerations

[0815] Examples of disease-associated genes and polynucleotides amd disease specific information is available from McKusick-Nathans Institute of Genetic Medicine, Johns Hopkins University (Baltimore, Md.) and National Center for Biotechnology Information, National Library of Medicine (Bethesda, Md.), available on the World Wide Web.

[0816] Mutations in these genes and pathways can result in production of improper proteins or proteins in improper amounts which affect function. Further examples of genes, diseases and proteins are hereby incorporated by reference from U.S. Provisional application 61/736,527 filed Dec. 12, 2012. Such genes, proteins and pathways may be the target polynucleotide of a CRISPR complex of the present invention. Examples of disease-associated genes and polynucleotides are listed in Tables 10 and 11. Examples of signaling biochemical pathway-associated genes and polynucleotides are listed in Table 10.

TABLE 12
Examples of signaling biochemical pathway-associated genes and polynucleotides.

| DISEASE/DISORDERS | GENE(S) |
|---|---|
| Neoplasia | PTEN; ATM; ATR; EGFR; ERBB2; ERBB3; ERBB4; |
| | Notch1; Notch2; Notch3; Notch4; AKT; AKT2; AKT3; HIF; |
| | HIF1a; HIF3a; Met; HRG; Bcl2; PPAR alpha; PPAR |
| | gamma; WT1 (Wilms Tumor); FGF Receptor Family |
| | members (5 members: 1, 2, 3, 4, 5); CDKN2a; APC; RB |
| | (retinoblastoma); MEN1; VHL; BRCA1; BRCA2; AR |
| | (Androgen Receptor); TSG101; IGF; IGF Receptor; Igf1 (4 |
| | variants); Igf2 (3 variants); Igf 1 Receptor; Igf 2 Receptor; |
| | Bax; Bcl2; caspases family (9 members: |
| | 1, 2, 3, 4, 6, 7, 8, 9, 12); Kras; Apc |
| Age-related Macular | Abcr; Ccl2; Cc2; cp (ceruloplasmin); Timp3; cathepsinD; |
| Degeneration | Vldlr; Ccr2 |
| Schizophrenia | Neuregulin1 (Nrg1); Erb4 (receptor for Neuregulin); |
| | Complexin1 (Cplx1); Tph1 Tryptophan hydroxylase; Tph2 |
| | Tryptophan hydroxylase 2; Neurexin 1; GSK3; GSK3a; |
| | GSK3b |
| Disorders | 5-HTT (Slc6a4); COMT; DRD (Drd1a); SLC6A3; DAOA; |
| | DTNBP1; Dao (Dao1) |
| Trinucleotide | HTT (Huntington's Dx); SBMA/SMAX1/AR (Kennedy's |
| Repeat Disorders | Dx); FXN/X25 (Friedrich's Ataxia); ATX3 (Machado- |
| | Joseph's Dx); ATXN1 and ATXN2 (spinocerebellar |
| | ataxias); DMPK (myotonic dystrophy); Atrophin-1 and Atn1 |
| | (DRPLA Dx); CBP (Creb-BP - global instability); VLDLR |
| | (Alzheimer's); Atxn7; Atxn10 |
| Fragile X Syndrome | FMR2; FXR1; FXR2; mGLUR5 |
| Secretase Related | APH-1 (alpha and beta); Presenilin (Psen1); nicastrin |
| Disorders | (Ncstn); PEN-2 |
| Others | Nos1; Parp1; Nat1; Nat2 |
| Prion - related disorders | Prp |
| ALS | SOD1; ALS2; STEX; FUS; TARDBP; VEGF (VEGF-a; |
| | VEGF-b; VEGF-c) |
| Drug addiction | Prkce (alcohol); Drd2; Drd4; ABAT (alcohol); GRIA2; |
| | Grm5; Grin1; Htr1b; Grin2a; Drd3; Pdyn; Gria1 (alcohol) |
| Autism | Mecp2; BZRAP1; MDGA2; Sema5A; Neurexin 1; Fragile X |
| | (FMR2 (AFF2); FXR1; FXR2; Mglur5) |
| Alzheimer's Disease | E1; CHIP; UCH; UBB; Tau; LRP; PICALM; Clusterin; PS1; |
| | SORL1; CR1; Vldlr; Uba1; Uba3; CHIP28 (Aqp1, |
| | Aquaporin 1); Uchl1; Uchl3; APP |
| Inflammation | IL-10; IL-1 (IL-1a; IL-1b); IL-13; IL-17 (IL-17a (CTLA8); IL- |
| | 17b; IL-17c; IL-17d; IL-17f); II-23; Cx3cr1; ptpn22; TNFa; |
| | NOD2/CARD15 for IBD; IL-6; IL-12 (IL-12a; IL-12b); |
| | CTLA4; Cx3cl1 |
| Parkinson's Disease | x-Synuclein; DJ-1; LRRK2; Parkin; PINK1 |

| | |
|---|---|
| Blood and | Anemia (CDAN1, CDA1, RPS19, DBA, PKLR, PK1, NT5C3, UMPH1, |
| coagulation diseases | PSN1, RHAG, RH50A, NRAMP2, SPTB, ALAS2, ANH1, ASB, |
| and disorders | ABCB7, ABC7, ASAT); Bare lymphocyte syndrome (TAPBP, TPSN, |
| | TAP2, ABCB3, PSF2, RING11, MHC2TA, C2TA, RFX5, RFXAP, |
| | RFX5), Bleeding disorders (TBXA2R, P2RX1, P2X1); Factor H and |
| | factor H-like 1 (HF1, CFH, HUS); Factor V and factor VIII (MCFD2); |
| | Factor VII deficiency (F7); Factor X deficiency (F10); Factor XI |
| | deficiency (F11); Factor XII deficiency (F12, HAF); Factor XIIIA |
| | deficiency (F13A1, F13A); Factor XIIIB deficiency (F13B); Fanconi |
| | anemia (FANCA, FACA, FA1, FA, FAA, FAAP95, FAAP90, FLJ34064, |
| | FANCB, FANCC, FACC, BRCA2, FANCD1, FANCD2, FANCD, |
| | FACD, FAD, FANCE, FACE, FANCF, XRCC9, FANCG, BRIP1, |
| | BACH1, FANCJ, PHF9, FANCL, FANCM, KIAA1596); |
| | Hemophagocytic lymphohistiocytosis disorders (PRF1, HPLH2, |
| | UNC13D, MUNC13-4, HPLH3, HLH3, FHL3); Hemophilia A (F8, F8C, |
| | HEMA); Hemophilia B (F9, HEMB), Hemorrhagic disorders (PI, ATT, |
| | F5); Leukocyde deficiencies and disorders (ITGB2, CD18, LCAMB, |
| | LAD, EIF2B1, EIF2BA, EIF2B2, EIF2B3, EIF2B5, LVWM, CACH, |
| | CLE, EIF2B4); Sickle cell anemia (HBB); Thalassemia (HBA2, HBB, |
| | HBD, LCRB, HBA1). |
| Cell dysregulation | B-cell non-Hodgkin lymphoma (BCL7A, BCL7); Leukemia (TAL1 |
| and oncology | TCL5, SCL, TAL2, FLT3, NBS1, NBS, ZNFN1A1, IK1, LYF1, |
| diseases and disorders | HOXD4, HOX4B, BCR, CML, PHL, ALL, ARNT, KRAS2, RASK2, |
| | GMPS, AF10, ARHGEF12, LARG, KIAA0382, CALM, CLTH, |
| | CEBPA, CEBP, CHIC2, BTL, FLT3, KIT, PBT, LPP, NPM1, NUP214, |
| | D9S46E, CAN, CAIN, RUNX1, CBFA2, AML1, WHSC1L1, NSD3, |
| | FLT3, AF1Q, NPM1, NUMA1, ZNF145, PLZF, PML, MYL, STAT5B, |
| | AF10, CALM, CLTH, ARL11, ARLTS1, P2RX7, P2X7, BCR, CML, |
| | PHL, ALL, GRAF, NF1, VRNF, WSS, NFNS, PTPN11, PTP2C, SHP2, |
| | NS1, BCL2, CCND1, PRAD1, BCL1, TCRA, GATA1, GF1, ERYF1, |
| | NFE1, ABL1, NQO1, DIA4, NMOR1, NUP214, D9S46E, CAN, CAIN). |
| Inflammation and | AIDS (KIR3DL1, NKAT3, NKB1, AMB11, KIR3DS1, IFNG, CXCL12, |
| immune related | SDF1); Autoimmune lymphoproliferative syndrome (TNFRSF6, APT1, |
| diseases and disorders | FAS, CD95, ALPS1A); Combined immunodeficiency, (IL2RG, |
| | SCIDX1, SCIDX, IMD4); HIV-1 (CCL5, SCYA5, D17S136E, TCP228), |
| | HIV susceptibility or infection (IL10, CSIF, CMKBR2, CCR2, |
| | CMKBR5, CCCKR5 (CCR5)); Immunodeficiencies (CD3E, CD3G, |
| | AICDA, AID, HIGM2, TNFRSF5, CD40, UNG, DGU, HIGM4, |
| | TNFSF5, CD40LG, HIGM1, IGM, FOXP3, IPEX, AIID, XPID, PIDX, |
| | TNFRSF14B, TACI); Inflammation (IL-10, IL-1 (IL-1a, IL-1b), IL-13, |
| | IL-17 (IL-17a (CTLA8), IL-17b, IL-17c, IL-17d, IL-17f), II-23, Cx3cr1, |
| | ptpn22, TNFa, NOD2/CARD15 for IBD, IL-6, IL-12 (IL-12a, IL-12b), |
| | CTLA4, Cx3cl1); Severe combined immunodeficiencies (SCIDs)(JAK3, |
| | JAKL, DCLRE1C, ARTEMIS, SCIDA, RAG1, RAG2, ADA, PTPRC, |
| | CD45, LCA, IL7R, CD3D, T3D, IL2RG, SCIDX1, SCIDX, IMD4). |
| Metabolic, liver, | Amyloid neuropathy (TTR, PALB); Amyloidosis (APOA1, APP, AAA, |
| kidney and protein | CVAP, AD1, GSN, FGA, LYZ, TTR, PALB); Cirrhosis (KRT18, KRT8, |
| diseases and disorders | CIRH1A, NAIC, TEX292, KIAA1988); Cystic fibrosis (CFTR, ABCC7, |
| | CF, MRP7); Glycogen storage diseases (SLC2A2, GLUT2, G6PC, |
| | G6PT, G6PT1, GAA, LAMP2, LAMPB, AGL, GDE, GBE1, GYS2, |
| | PYGL, PFKM); Hepatic adenoma, 142330 (TCF1, HNF1A, MODY3), |
| | Hepatic failure, early onset, and neurologic disorder (SCOD1, SCO1), |
| | Hepatic lipase deficiency (LIPC), Hepatoblastoma, cancer and |
| | carcinomas (CTNNB1, PDGFRL, PDGRL, PRLTS, AXIN1, AXIN, |
| | CTNNB1, TP53, P53, LFS1, IGF2R, MPRI, MET, CASP8, MCH5; |
| | Medullary cystic kidney disease (UMOD, HNFJ, FJHN, MCKD2, |
| | ADMCKD2); Phenylketonuria (PAH, PKU1, QDPR, DHPR, PTS); |
| | Polycystic kidney and hepatic disease (FCYT, PKHD1, ARPKD, PKD1, |
| | PKD2, PKD4, PKDTS, PRKCSH, G19P1, PCLD, SEC63). |
| Muscular/Skeletal | Becker muscular dystrophy (DMD, BMD, MYF6), Duchenne Muscular |
| diseases and disorders | Dystrophy (DMD, BMD); Emery-Dreifuss muscular dystrophy (LMNA, |
| | LMN1, EMD2, FPLD, CMD1A, HGPS, LGMD1B, LMNA, LMN1, |
| | EMD2, FPLD, CMD1A); Facioscapulohumeral muscular dystrophy |
| | (FSHMD1A, FSHD1A); Muscular dystrophy (FKRP, MDC1C, |
| | LGMD2I, LAMA2, LAMM, LARGE, KIAA0609, MDC1D, FCMD, |
| | TTID, MYOT, CAPN3, CANP3, DYSF, LGMD2B, SGCG, LGMD2C, |
| | DMDA1, SCG3, SGCA, ADL, DAG2, LGMD2D, DMDA2, SGCB, |
| | LGMD2E, SGCD, SGD, LGMD2F, CMD1L, TCAP, LGMD2G, |
| | CMD1N, TRIM32, HT2A, LGMD2H, FKRP, MDC1C, LGMD2I, TTN, |
| | CMD1G, TMD, LGMD2J, POMT1, CAV3, LGMD1C, SEPN1, SELN, |
| | RSMD1, PLEC1, PLTN, EBS1); Osteopetrosis (LRP5, BMND1, LRP7, |
| | LR3, OPPG, VBCH2, CLCN7, CLC7, OPTA2, OSTM1, GL, TCIRG1, |
| | TIRC7, OC116, OPTB1); Muscular atrophy (VAPB, VAPC, ALS8, |
| | SMN1, SMA1, SMA2, SMA3, SMA4, BSCL2, SPG17, GARS, SMAD1, |
| | CMT2D, HEXB, IGHMBP2, SMUBP2, CATF1, SMARD1). |
| Neurological and | ALS (SOD1, ALS2, STEX, FUS, TARDBP, VEGF (VEGF-a, VEGF-b, |
| neuronal diseases | VEGF-c); Alzheimer disease (APP, AAA, CVAP, AD1, APOE, AD2, |
| and disorders | PSEN2, AD4, STM2, APBB2, FE65L1, NOS3, PLAU, URK, ACE, |
| | DCP1, ACE1, MPO, PACIP1, PAXIP1L, PTIP, A2M, BLMH, BMH, |
| | PSEN1, AD3); Autism (Mecp2, BZRAP1, MDGA2, Sema5A, Neurexin |
| | 1, GLO1, MECP2, RTT, PPMX, MRX16, MRX79, NLGN3, NLGN4, |
| | KIAA1260, AUTSX2); Fragile X Syndrome (FMR2, FXR1, FXR2, |
| | mGLUR5); Huntington's disease and disease like disorders (HD, IT15, |
| | PRNP, PRIP, JPH3, JP3, HDL2, TBP, SCA17); Parkinson disease |
| | (NR4A2, NURR1, NOT, TINUR, SNCAIP, TBP, SCA17, SNCA, |
| | NACP, PARK1, PARK4, DJ1, PARK7, LRRK2, PARK8, PINK1, |
| | PARK6, UCHL1, PARK5, SNCA, NACP, PARK1, PARK4, PRKN, |
| | PARK2, PDJ, DBH, NDUFV2); Rett syndrome (MECP2, RTT, PPMX, |
| | MRX16, MRX79, CDKL5, STK9, MECP2, RTT, PPMX, MRX16, |
| | MRX79, x-Synuclein, DJ-1); Schizophrenia (Neuregulin1 (Nrg1), Erb4 |
| | (receptor for Neuregulin), Complexin1 (Cplx1), Tph1 Tryptophan |
| | hydroxylase, Tph2, Tryptophan hydroxylase 2, Neurexin 1, GSK3, |
| | GSK3a, GSK3b, 5-HTT (Slc6a4), COMT, DRD (Drd1a), SLC6A3, |
| | DAOA, DTNBP1, Dao (Dao1)); Secretase Related Disorders (APH-1 |
| | (alpha and beta), Presenilin (Psen1), nicastrin, (Ncstn), PEN-2, Nos1, |
| | Parp1, Nat1, Nat2); Trinucleotide Repeat Disorders (HTT (Huntington's |
| | Dx), SBMA/SMAX1/AR (Kennedy's Dx), FXN/X25 (Friedrich's |
| | Ataxia), ATX3 (Machado- Joseph's Dx), ATXN1 and ATXN2 |
| | (spinocerebellar ataxias), DMPK (myotonic dystrophy), Atrophin-1 and |
| | Atn1 (DRPLA Dx), CBP (Creb-BP - global instability), VLDLR |
| | (Alzheimer's), Atxn7, Atxn10). |
| Occular diseases | Age-related macular degeneration (Abcr, Ccl2, Cc2, cp (ceruloplasmin), |
| and disorders | Timp3, cathepsinD, Vldlr, Ccr2); Cataract (CRYAA, CRYA1, CRYBB2, |
| | CRYB2, PITX3, BFSP2, CP49, CP47, CRYAA, CRYA1, PAX6, AN2, |
| | MGDA, CRYBA1, CRYB1, CRYGC, CRYG3, CCL, LIM2, MP19, |
| | CRYGD, CRYG4, BFSP2, CP49, CP47, HSF4, CTM, HSF4, CTM, |
| | MIP, AQP0, CRYAB, CRYA2, CTPP2, CRYBB1, CRYGD, CRYG4, |
| | CRYBB2, CRYB2, CRYGC, CRYG3, CCL, CRYAA, CRYA1, GJA8, |
| | CX50, CAE1, GJA3, CX46, CZP3, CAE3, CCM1, CAM, KRIT1); |
| | Corneal clouding and dystrophy (APOA1, TGFBI, CSD2, CDGG1, |
| | CSD, BIGH3, CDG2, TACSTD2, TROP2, M1S1, VSX1, RINX, PPCD, |
| | PPD, KTCN, COL8A2, FECD, PPCD2, PIP5K3, CFD); Cornea plana |
| | congenital (KERA, CNA2); Glaucoma (MYOC, TIGR, GLC1A, JOAG, |
| | GPOA, OPTN, GLC1E, FIP2, HYPL, NRP, CYP1B1, GLC3A, OPA1, |
| | NTG, NPG, CYP1B1, GLC3A); Leber congenital amaurosis (CRB1, |
| | RP12, CRX, CORD2, CRD, RPGRIP1, LCA6, CORD9, RPE65, RP20, |
| | AIPL1, LCA4, GUCY2D, GUC2D, LCA1, CORD6, RDH12, LCA3); |
| | Macular dystrophy (ELOVL4, ADMD, STGD2, STGD3, RDS, RP7, |
| | PRPH2, PRPH, AVMD, AOFMD, VMD2). |

| CELLULAR | |
|---|---|
| FUNCTION | GENES |
| PI3K/AKT Signaling | PRKCE; ITGAM; ITGA5; IRAK1; PRKAA2; EIF2AK2; |
| | PTEN; EIF4E; PRKCZ; GRK6; MAPK1; TSC1; PLK1; |
| | AKT2; IKBKB; PIK3CA; CDK8; CDKN1B; NFKB2; BCL2; |
| | PIK3CB; PPP2R1A; MAPK8; BCL2L1; MAPK3; TSC2; |
| | ITGA1; KRAS; EIF4EBP1; RELA; PRKCD; NOS3; |
| | PRKAA1; MAPK9; CDK2; PPP2CA; PIM1; ITGB7; |
| | YWHAZ; ILK; TP53; RAF1; IKBKG; RELB; DYRK1A; |
| | CDKN1A; ITGB1; MAP2K2; JAK1; AKT1; JAK2; PIK3R1; |
| | CHUK; PDPK1; PPP2R5C; CTNNB1; MAP2K1; NFKB1; |
| | PAK3; ITGB3; CCND1; GSK3A; FRAP1; SFN; ITGA2; |
| | TTK; CSNK1A1; BRAF; GSK3B; AKT3; FOXO1; SGK; |
| | HSP90AA1; RPS6KB1 |
| ERK/MAPK Signaling | PRKCE; ITGAM; ITGA5; HSPB1; IRAK1; PRKAA2; |
| | EIF2AK2; RAC1; RAP1A; TLN1; EIF4E; ELK1; GRK6; |
| | MAPK1; RAC2; PLK1; AKT2; PIK3CA; CDK8; CREB1; |
| | PRKCI; PTK2; FOS; RPS6KA4; PIK3CB; PPP2R1A; |
| | PIK3C3; MAPK8; MAPK3; ITGA1; ETS1; KRAS; MYCN; |
| | EIF4EBP1; PPARG; PRKCD; PRKAA1; MAPK9; SRC; |
| | CDK2; PPP2CA; PIM1; PIK3C2A; ITGB7; YWHAZ; |
| | PPP1CC; KSR1; PXN; RAF1; FYN; DYRK1A; ITGB1; |
| | MAP2K2; PAK4; PIK3R1; STAT3; PPP2R5C; MAP2K1; |
| | PAK3; ITGB3; ESR1; ITGA2; MYC; TTK; CSNK1A1; |
| | CRKL; BRAF; ATF4; PRKCA; SRF; STAT1; SGK |
| Glucocorticoid Receptor | RAC1; TAF4B; EP300; SMAD2; TRAF6; PCAF; ELK1; |
| Signaling | MAPK1; SMAD3; AKT2; IKBKB; NCOR2; UBE2I; |
| | PIK3CA; CREB1; FOS; HSPA5; NFKB2; BCL2; |
| | MAP3K14; STAT5B; PIK3CB; PIK3C3; MAPK8; BCL2L1; |
| | MAPK3; TSC22D3; MAPK10; NRIP1; KRAS; MAPK13; |
| | RELA; STAT5A; MAPK9; NOS2A; PBX1; NR3C1; |
| | PIK3C2A; CDKN1C; TRAF2; SERPINE1; NCOA3; |
| | MAPK14; TNF; RAF1; IKBKG; MAP3K7; CREBBP; |
| | CDKN1A; MAP2K2; JAK1; IL8; NCOA2; AKT1; JAK2; |
| | PIK3R1; CHUK; STAT3; MAP2K1; NFKB1; TGFBR1; |
| | ESR1; SMAD4; CEBPB; JUN; AR; AKT3; CCL2; MMP1; |
| | STAT1; IL6; HSP90AA1 |
| Axonal Guidance | PRKCE; ITGAM; ROCK1; ITGA5; CXCR4; ADAM12; |
| Signaling | IGF1; RAC1; RAP1A; E1F4E; PRKCZ; NRP1; NTRK2; |
| | ARHGEF7; SMO; ROCK2; MAPK1; PGF; RAC2; |
| | PTPN11; GNAS; AKT2; PIK3CA; ERBB2; PRKCI; PTK2; |
| | CFL1; GNAQ; PIK3CB; CXCL12; PIK3C3; WNT11; |
| | PRKD1; GNB2L1; ABL1; MAPK3; ITGA1; KRAS; RHOA; |
| | PRKCD; PIK3C2A; ITGB7; GLI2; PXN; VASP; RAF1; |
| | FYN; ITGB1; MAP2K2; PAK4; ADAM17; AKT1; PIK3R1; |
| | GLI1; WNT5A; ADAM10; MAP2K1; PAK3; ITGB3; |
| | CDC42; VEGFA; ITGA2; EPHA8; CRKL; RND1; GSK3B; |
| | AKT3; PRKCA |
| Ephrin Receptor | PRKCE; ITGAM; ROCK1; ITGA5; CXCR4; IRAK1; |
| Signaling | PRKAA2; EIF2AK2; RAC1; RAP1A; GRK6; ROCK2; |
| | MAPK1; PGF; RAC2; PTPN11; GNAS; PLK1; AKT2; |
| | DOK1; CDK8; CREB1; PTK2; CFL1; GNAQ; MAP3K14; |
| | CXCL12; MAPK8; GNB2L1; ABL1; MAPK3; ITGA1; |
| | KRAS; RHOA; PRKCD; PRKAA1; MAPK9; SRC; CDK2; |
| | PIM1; ITGB7; PXN; RAF1; FYN; DYRK1A; ITGB1; |
| | MAP2K2; PAK4, AKT1; JAK2; STAT3; ADAM10; |
| | MAP2K1; PAK3; ITGB3; CDC42; VEGFA; ITGA2; |
| | EPHA8; TTK; CSNK1A1; CRKL; BRAF; PTPN13; ATF4; |
| | AKT3; SGK |
| Actin Cytoskeleton | ACTN4; PRKCE; ITGAM; ROCK1; ITGA5; IRAK1; |
| Signaling | PRKAA2; EIF2AK2; RAC1; INS; ARHGEF7; GRK6; |
| | ROCK2; MAPK1; RAC2; PLK1; AKT2; PIK3CA; CDK8; |
| | PTK2; CFL1; PIK3CB; MYH9; DIAPH1; PIK3C3; MAPK8; |
| | F2R; MAPK3; SLC9A1; ITGA1; KRAS; RHOA; PRKCD; |
| | PRKAA1; MAPK9; CDK2; PIM1; PIK3C2A; ITGB7; |
| | PPP1CC; PXN; VIL2; RAF1; GSN; DYRK1A; ITGB1; |
| | MAP2K2; PAK4; PIP5K1A; PIK3R1; MAP2K1; PAK3; |
| | ITGB3; CDC42; APC; ITGA2; TTK; CSNK1A1; CRKL; |
| | BRAF; VAV3; SGK |
| Huntington's Disease | PRKCE; IGF1; EP300; RCOR1; PRKCZ; HDAC4; TGM2; |
| Signaling | MAPK1; CAPNS1; AKT2; EGFR; NCOR2; SP1; CAPN2; |
| | PIK3CA; HDAC5; CREB1; PRKC1; HSPA5; REST; |
| | GNAQ; PIK3CB; PIK3C3; MAPK8; IGF1R; PRKD1; |
| | GNB2L1; BCL2L1; CAPN1; MAPK3; CASP8; HDAC2; |
| | HDAC7A; PRKCD; HDAC11; MAPK9; HDAC9; PIK3C2A; |
| | HDAC3; TP53; CASP9; CREBBP; AKT1; PIK3R1; |
| | PDPK1; CASP1; APAF1; FRAP1; CASP2; JUN; BAX; |
| | ATF4; AKT3; PRKCA; CLTC; SGK; HDAC6; CASP3 |
| Apoptosis Signaling | PRKCE; ROCK1; BID; IRAK1; PRKAA2; EIF2AK2; BAK1; |
| | BIRC4; GRK6; MAPK1; CAPNS1; PLK1; AKT2; IKBKB; |
| | CAPN2; CDK8; FAS; NFKB2; BCL2; MAP3K14; MAPK8; |
| | BCL2L1; CAPN1; MAPK3; CASP8; KRAS; RELA; |
| | PRKCD; PRKAA1; MAPK9; CDK2; PIM1; TP53; TNF; |
| | RAF1; IKBKG; RELB; CASP9; DYRK1A; MAP2K2; |
| | CHUK; APAF1; MAP2K1; NFKB1; PAK3; LMNA; CASP2; |
| | BIRC2; TTK; CSNK1A1; BRAF; BAX; PRKCA; SGK; |
| | CASP3; BIRC3; PARP1 |
| B Cell Receptor | RAC1; PTEN; LYN; ELK1; MAPK1; RAC2; PTPN11; |
| Signaling | AKT2; IKBKB; PIK3CA; CREB1; SYK; NFKB2; CAMK2A; |
| | MAP3K14; PIK3CB; PIK3C3; MAPK8; BCL2L1; ABL1; |
| | MAPK3; ETS1; KRAS; MAPK13; RELA; PTPN6; MAPK9; |
| | EGR1; PIK3C2A; BTK; MAPK14; RAF1; IKBKG; RELB; |
| | MAP3K7; MAP2K2; AKT1; PIK3R1; CHUK; MAP2K1; |
| | NFKB1; CDC42; GSK3A; FRAP1; BCL6; BCL10; JUN; |
| | GSK3B; ATF4; AKT3; VAV3; RPS6KB1 |
| Leukocyte Extravasation | ACTN4; CD44; PRKCE; ITGAM; ROCK1; CXCR4; CYBA; |
| Signaling | RAC1; RAP1A; PRKCZ; ROCK2; RAC2; PTPN11; |
| | MMP14; PIK3CA; PRKCI; PTK2; PIK3CB; CXCL12; |
| | PIK3C3; MAPK8; PRKD1; ABL1; MAPK10; CYBB; |
| | MAPK13; RHOA; PRKCD; MAPK9; SRC; PIK3C2A; BTK; |
| | MAPK14; NOX1; PXN; VIL2; VASP; ITGB1; MAP2K2; |
| | CTNND1; PIK3R1; CTNNB1; CLDN1; CDC42; F11R; ITK; |
| | CRKL; VAV3; CTTN; PRKCA; MMP1; MMP9 |
| Integrin Signaling | ACTN4; ITGAM; ROCK1; ITGA5; RAC1; PTEN; RAP1A; |
| | TLN1; ARHGEF7; MAPK1; RAC2; CAPNS1; AKT2; |
| | CAPN2; PIK3CA; PTK2; PIK3CB; PIK3C3; MAPK8; |
| | CAV1; CAPN1; ABL1; MAPK3; ITGA1; KRAS; RHOA; |
| | SRC; PIK3C2A; ITGB7; PPP1CC; ILK; PXN; VASP; |
| | RAF1; FYN; ITGB1; MAP2K2; PAK4; AKT1; PIK3R1; |
| | TNK2; MAP2K1; PAK3; ITGB3; CDC42; RND3; ITGA2; |
| | CRKL; BRAF; GSK3B; AKT3 |
| Acute Phase Response | IRAK1; SOD2; MYD88; TRAF6; ELK1; MAPK1; PTPN11; |
| Signaling | AKT2; IKBKB; PIK3CA; FOS; NFKB2; MAP3K14; |
| | PIK3CB; MAPK8; RIPK1; MAPK3; IL6ST; KRAS; |
| | MAPK13; IL6R; RELA; SOCS1; MAPK9; FTL; NR3C1; |
| | TRAF2; SERPINE1; MAPK14; TNF; RAF1; PDK1; |
| | IKBKG; RELB; MAP3K7; MAP2K2; AKT1; JAK2; PIK3R1; |
| | CHUK; STAT3; MAP2K1; NFKB1; FRAP1; CEBPB; JUN; |
| | AKT3; IL1R1; IL6 |
| PTEN Signaling | ITGAM; ITGA5; RAC1; PTEN; PRKCZ; BCL2L11; |
| | MAPK1; RAC2; AKT2; EGFR; IKBKB; CBL; PIK3CA; |
| | CDKN1B; PTK2; NFKB2; BCL2; PIK3CB; BCL2L1; |
| | MAPK3; ITGA1; KRAS; ITGB7; ILK; PDGFRB; INSR; |
| | RAF1; IKBKG; CASP9; CDKN1A; ITGB1; MAP2K2; |
| | AKT1; PIK3R1; CHUK; PDGFRA; PDPK1; MAP2K1; |
| | NFKB1; ITGB3; CDC42; CCND1; GSK3A; ITGA2; |
| | GSK3B; AKT3; FOXO1; CASP3; RPS6KB1 |
| p53 Signaling | PTEN; EP300; BBC3; PCAF; FASN; BRCA1; GADD45A; |
| | BIRC5; AKT2; PIK3CA; CHEK1; TP53INP1; BCL2; |
| | PIK3CB; PIK3C3; MAPK8; THBS1; ATR; BCL2L1; E2F1; |
| | PMAIP1; CHEK2; TNFRSF10B; TP73; RB1; HDAC9; |
| | CDK2; PIK3C2A; MAPK14; TP53; LRDD; CDKN1A; |
| | HIPK2; AKT1; PIK3R1; RRM2B; APAF1; CTNNB1; |
| | SIRT1; CCND1; PRKDC; ATM; SFN; CDKN2A; JUN; |
| | SNAI2; GSK3B; BAX; AKT3 |
| Aryl Hydrocarbon | HSPB1; EP300; FASN; TGM2; RXRA; MAPK1; NQO1; |
| Receptor | NCOR2; SP1; ARNT; CDKN1B; FOS; CHEK1; |
| Signaling | SMARCA4; NFKB2; MAPK8; ALDH1A1; ATR; E2F1; |
| | MAPK3; NRIP1; CHEK2; RELA; TP73; GSTP1; RB1; |
| | SRC; CDK2; AHR; NFE2L2; NCOA3; TP53; TNF; |
| | CDKN1A; NCOA2; APAF1; NFKB1; CCND1; ATM; ESR1; |
| | CDKN2A; MYC; JUN; ESR2; BAX; IL6; CYP1B1; |
| | HSP90AA1 |
| Xenobiotic Metabolism | PRKCE; EP300; PRKCZ; RXRA; MAPK1; NQO1; |
| Signaling | NCOR2; PIK3CA; ARNT; PRKCI; NFKB2; CAMK2A; |
| | PIK3CB; PPP2R1A; PIK3C3; MAPK8; PRKD1; |
| | ALDH1A1; MAPK3; NRIP1; KRAS; MAPK13; PRKCD; |
| | GSTP1; MAPK9; NOS2A; ABCB1; AHR; PPP2CA; FTL; |
| | NFE2L2; PIK3C2A; PPARGC1A; MAPK14; TNF; RAF1; |
| | CREBBP; MAP2K2; PIK3R1; PPP2R5C; MAP2K1; |
| | NFKB1; KEAP1; PRKCA; EIF2AK3; IL6; CYP1B1; |
| | HSP90AA1 |
| SAPK/JNK Signaling | PRKCE; IRAK1; PRKAA2; EIF2AK2; RAC1; ELK1; |
| | GRK6; MAPK1; GADD45A; RAC2; PLK1; AKT2; PIK3CA; |
| | FADD; CDK8; PIK3CB; PIK3C3; MAPK8; RIPK1; |
| | GNB2L1; IRS1; MAPK3; MAPK10; DAXX; KRAS; |
| | PRKCD; PRKAA1; MAPK9; CDK2; PIM1; PIK3C2A; |
| | TRAF2; TP53; LCK; MAP3K7; DYRK1A; MAP2K2; |
| | PIK3R1; MAP2K1; PAK3; CDC42; JUN; TTK; CSNK1A1; |
| | CRKL; BRAF; SGK |
| PPAr/RXR Signaling | PRKAA2; EP300; INS; SMAD2; TRAF6; PPARA; FASN; |
| | RXRA; MAPK1; SMAD3; GNAS; IKBKB; NCOR2; |
| | ABCA1; GNAQ; NFKB2; MAP3K14; STAT5B; MAPK8; |
| | IRS1; MAPK3; KRAS; RELA; PRKAA1; PPARGC1A; |
| | NCOA3; MAPK14; INSR; RAF1; IKBKG; RELB; MAP3K7; |
| | CREBBP; MAP2K2; JAK2; CHUK; MAP2K1; NFKB1; |
| | TGFBR1; SMAD4; JUN; IL1R1; PRKCA; IL6; HSP90AA1; |
| | ADIPOQ |
| NF-KB Signaling | IRAK1; EIF2AK2; EP300; INS; MYD88; PRKCZ: TRAF6; |
| | TBK1; AKT2; EGFR; IKBKB; PIK3CA; BTRC; NFKB2; |
| | MAP3K14; PIK3CB; PIK3C3; MAPK8; RIPK1; HDAC2; |
| | KRAS; RELA; PIK3C2A; TRAF2; TLR4: PDGFRB; TNF; |
| | INSR; LCK; IKBKG; RELB; MAP3K7; CREBBP; AKT1; |
| | PIK3R1; CHUK; PDGFRA; NFKB1; TLR2; BCL10; |
| | GSK3B; AKT3; TNFAIP3; IL1R1 |
| Neuregulin Signaling | ERBB4; PRKCE; ITGAM; ITGA5: PTEN; PRKCZ; ELK1; |
| | MAPK1; PTPN11; AKT2; EGFR; ERBB2; PRKCI; |
| | CDKN1B; STAT5B; PRKD1; MAPK3; ITGA1; KRAS; |
| | PRKCD; STAT5A; SRC; ITGB7; RAF1; ITGB1; MAP2K2; |
| | ADAM17; AKT1; PIK3R1; PDPK1; MAP2K1; ITGB3; |
| | EREG; FRAP1; PSEN1; ITGA2; MYC; NRG1; CRKL; |
| | AKT3; PRKCA; HSP90AA1; RPS6KB1 |
| Wnt & Beta catenin | CD44; EP300; LRP6; DVL3; CSNK1E; GJA1; SMO; |
| Signaling | AKT2; PIN1; CDH1; BTRC; GNAQ; MARK2; PPP2R1A; |
| | WNT11; SRC; DKK1; PPP2CA; SOX6; SFRP2: ILK; |
| | LEF1; SOX9; TP53; MAP3K7; CREBBP; TCF7L2; AKT1; |
| | PPP2R5C; WNT5A; LRP5; CTNNB1; TGFBR1; CCND1; |
| | GSK3A; DVL1; APC; CDKN2A; MYC; CSNK1A1; GSK3B; |
| | AKT3; SOX2 |
| Insulin Receptor | PTEN; INS; EIF4E; PTPN1; PRKCZ; MAPK1; TSC1; |
| Signaling | PTPN11; AKT2; CBL; PIK3CA; PRKCI; PIK3CB; PIK3C3; |
| | MAPK8; IRS1; MAPK3; TSC2; KRAS; EIF4EBP1; |
| | SLC2A4; PIK3C2A; PPP1CC; INSR; RAF1; FYN; |
| | MAP2K2; JAK1; AKT1; JAK2; PIK3R1; PDPK1; MAP2K1; |
| | GSK3A; FRAP1; CRKL; GSK3B; AKT3; FOXO1; SGK; |
| | RPS6KB1 |
| IL-6 Signaling | HSPB1; TRAF6; MAPKAPK2; ELK1; MAPK1; PTPN11; |
| | IKBKB; FOS; NFKB2: MAP3K14; MAPK8; MAPK3; |
| | MAPK10; IL6ST; KRAS; MAPK13; IL6R; RELA; SOCS1; |
| | MAPK9; ABCB1; TRAF2; MAPK14; TNF; RAF1; IKBKG; |
| | RELB; MAP3K7; MAP2K2; IL8; JAK2; CHUK; STAT3; |
| | MAP2K1; NFKB1; CEBPB; JUN; IL1R1; SRF; IL6 |
| Hepatic Cholestasis | PRKCE; IRAK1; INS; MYD88; PRKCZ; TRAF6; PPARA; |
| | RXRA; IKBKB; PRKCI; NFKB2; MAP3K14; MAPK8; |
| | PRKD1; MAPK10; RELA; PRKCD; MAPK9; ABCB1; |
| | TRAF2; TLR4; TNF; INSR; IKBKG; RELB; MAP3K7; IL8; |
| | CHUK; NR1H2; TJP2; NFKB1; ESR1; SREBF1; FGFR4; |
| | JUN; IL1R1; PRKCA; IL6 |
| IGF-1 Signaling | IGF1; PRKCZ; ELK1; MAPK1; PTPN11; NEDD4; AKT2; |
| | PIK3CA; PRKCI; PTK2; FOS; PIK3CB; PIK3C3; MAPK8; |
| | IGF1R; IRS1; MAPK3; IGFBP7; KRAS; PIK3C2A; |
| | YWHAZ; PXN; RAF1; CASP9; MAP2K2; AKT1; PIK3R1; |
| | PDPK1; MAP2K1; IGFBP2; SFN; JUN; CYR61; AKT3; |
| | FOXO1; SRF; CTGF; RPS6KB1 |
| NRF2-mediated | PRKCE; EP300; SOD2; PRKCZ; MAPK1; SQSTM1; |
| Oxidative | NQO1; PIK3CA; PRKCI; FOS; PIK3CB; PIK3C3; MAPK8; |
| Stress Response | PRKD1; MAPK3; KRAS; PRKCD; GSTP1; MAPK9; FTL; |
| | NFE2L2; PIK3C2A; MAPK14; RAF1; MAP3K7; CREBBP; |
| | MAP2K2; AKT1; PIK3R1; MAP2K1; PPIB; JUN; KEAP1; |
| | GSK3B; ATF4; PRKCA; EIF2AK3; HSP90AA1 |
| Hepatic Fibrosis/Hepatic | EDN1; IGF1; KDR; FLT1; SMAD2; FGFR1; MET; PGF; |
| Stellate Cell Activation | SMAD3; EGFR; FAS; CSF1; NFKB2; BCL2; MYH9; |
| | IGF1R; IL6R; RELA; TLR4; PDGFRB; TNF; RELB; IL8; |
| | PDGFRA; NFKB1; TGFBR1; SMAD4; VEGFA; BAX; |
| | IL1R1; CCL2; HGF; MMP1; STAT1; IL6; CTGF; MMP9 |
| PPAR Signaling | EP300; INS; TRAF6; PPARA; RXRA; MAPK1; IKBKB; |
| | NCOR2; FOS; NFKB2; MAP3K14; STAT5B; MAPK3; |
| | NRIP1; KRAS; PPARG; RELA; STAT5A; TRAF2; |
| | PPARGC1A; PDGFRB; TNF; INSR; RAF1; IKBKG; |
| | RELB; MAP3K7; CREBBP; MAP2K2; CHUK; PDGFRA; |
| | MAP2K1; NFKB1; JUN; IL1R1; HSP90AA1 |
| Fc Epsilon RI Signaling | PRKCE; RAC1; PRKCZ; LYN; MAPK1; RAC2; PTPN11; |
| | AKT2; PIK3CA; SYK; PRKCI; PIK3CB; PIK3C3; MAPK8; |
| | PRKD1; MAPK3; MAPK10; KRAS; MAPK13; PRKCD; |
| | MAPK9; PIK3C2A; BTK; MAPK14; TNF; RAF1; FYN; |
| | MAP2K2; AKT1; PIK3R1; PDPK1; MAP2K1; AKT3; |
| | VAV3; PRKCA |
| G-Protein Coupled | PRKCE; RAP1A; RGS16; MAPK1; GNAS; AKT2; IKBKB; |
| Receptor Signaling | PIK3CA; CREB1; GNAQ; NFKB2; CAMK2A; PIK3CB; |
| | PIK3C3; MAPK3; KRAS; RELA; SRC; PIK3C2A; RAF1; |
| | IKBKG; RELB; FYN; MAP2K2; AKT1; PIK3R1; CHUK; |
| | PDPK1; STAT3; MAP2K1; NFKB1; BRAF; ATF4; AKT3; |
| | PRKCA |
| Inositol Phosphate | PRKCE; IRAK1; PRKAA2; EIF2AK2; PTEN; GRK6; |
| Metabolism | MAPK1; PLK1; AKT2; PIK3CA; CDK8; PIK3CB; PIK3C3; |
| | MAPK8; MAPK3; PRKCD; PRKAA1; MAPK9; CDK2; |
| | PIM1; PIK3C2A; DYRK1A; MAP2K2; PIP5K1A; PIK3R1; |
| | MAP2K1; PAK3; ATM; TTK; CSNK1A1; BRAF; SGK |
| PDGF Signaling | EIF2AK2; ELK1; ABL2; MAPK1; PIK3CA; FOS; PIK3CB; |
| | PIK3C3; MAPK8; CAV1; ABL1; MAPK3; KRAS; SRC; |
| | PIK3C2A; PDGFRB; RAF1; MAP2K2; JAK1; JAK2; |
| | PIK3R1; PDGFRA; STAT3; SPHK1; MAP2K1; MYC; |
| | JUN; CRKL; PRKCA; SRF; STAT1; SPHK2 |
| VEGF Signaling | ACTN4; ROCK1; KDR; FLT1; ROCK2; MAPK1; PGF; |
| | AKT2; PIK3CA; ARNT; PTK2; BCL2; PIK3CB; PIK3C3; |
| | BCL2L1; MAPK3; KRAS; HIF1A; NOS3; PIK3C2A; PXN; |
| | RAF1; MAP2K2; ELAVL1; AKT1; PIK3R1; MAP2K1; SFN; |
| | VEGFA; AKT3; FOXO1; PRKCA |
| Natural Killer Cell | PRKCE; RAC1; PRKCZ; MAPK1; RAC2; PTPN11; |
| Signaling | KIR2DL3; AKT2; PIK3CA; SYK; PRKCI; PIK3CB; |
| | PIK3C3; PRKD1; MAPK3; KRAS; PRKCD; PTPN6; |
| | PIK3C2A; LCK; RAF1; FYN; MAP2K2; PAK4; AKT1; |
| | PIK3R1; MAP2K1; PAK3; AKT3; VAV3; PRKCA |
| Cell Cycle: G1/S | HDAC4; SMAD3; SUV39H1; HDAC5; CDKN1B; BTRC; |
| Checkpoint Regulation | ATR; ABL1; E2F1; HDAC2; HDAC7A; RB1; HDAC11; |
| | HDAC9; CDK2; E2F2; HDAC3; TP53; CDKN1A; CCND1; |
| | E2F4; ATM; RBL2; SMAD4; CDKN2A; MYC; NRG1; |
| | GSK3B; RBL1; HDAC6 |
| T Cell Receptor | RAC1; ELK1; MAPK1; IKBKB; CBL; PIK3CA; FOS; |
| Signaling | NFKB2; PIK3CB; PIK3C3; MAPK8; MAPK3; KRAS; |
| | RELA, PIK3C2A; BTK; LCK; RAF1; IKBKG; RELB, FYN; |
| | MAP2K2; PIK3R1; CHUK; MAP2K1; NFKB1; ITK; BCL10; |
| | JUN; VAV3 |
| Death Receptor Signaling | CRADD; HSPB1; BID; BIRC4; TBK1; IKBKB; FADD; |
| | FAS; NFKB2; BCL2; MAP3K14; MAPK8; RIPK1; CASP8; |
| | DAXX; TNFRSF10B; RELA; TRAF2; TNF; IKBKG; RELB; |
| | CASP9; CHUK; APAF1; NFKB1; CASP2; BIRC2; CASP3; |
| | BIRC3 |
| FGF Signaling | RAC1; FGFR1; MET; MAPKAPK2; MAPK1; PTPN11; |
| | AKT2; PIK3CA; CREB1; PIK3CB; PIK3C3; MAPK8; |
| | MAPK3; MAPK13; PTPN6; PIK3C2A; MAPK14; RAF1; |
| | AKT1; PIK3R1; STAT3; MAP2K1; FGFR4; CRKL; ATF4; |
| | AKT3; PRKCA; HGF |
| GM-CSF Signaling | LYN; ELK1; MAPK1; PTPN11; AKT2; PIK3CA; CAMK2A; |
| | STAT5B; PIK3CB; PIK3C3; GNB2L1; BCL2L1; MAPK3; |
| | ETS1; KRAS; RUNX1; PIM1; PIK3C2A; RAF1; MAP2K2; |
| | AKT1; JAK2; PIK3R1; STAT3; MAP2K1; CCND1; AKT3; |
| | STAT1 |
| Amyotrophic Lateral | BID; IGF1; RAC1; BIRC4; PGF; CAPNS1; CAPN2; |
| Sclerosis Signaling | PIK3CA; BCL2; PIK3CB; PIK3C3; BCL2L1; CAPN1; |
| | PIK3C2A; TP53; CASP9; PIK3R1; RAB5A; CASP1; |
| | APAF1; VEGFA; BIRC2; BAX; AKT3; CASP3; BIRC3 |
| JAK/Stat Signaling | PTPN1; MAPK1; PTPN11; AKT2; PIK3CA; STAT5B; |
| | PIK3CB; PIK3C3; MAPK3; KRAS; SOCS1; STAT5A; |
| | PTPN6; PIK3C2A; RAF1; CDKN1A; MAP2K2; JAK1; |
| | AKT1; JAK2; PIK3R1; STAT3; MAP2K1; FRAP1; AKT3; |
| | STAT1 |
| Nicotinate and | PRKCE; IRAK1; PRKAA2; EIF2AK2; GRK6; MAPK1; |
| Nicotinamide | PLK1; AKT2; CDK8; MAPK8; MAPK3; PRKCD; PRKAA1; |
| Metabolism | PBEF1; MAPK9; CDK2; PIM1; DYRK1A; MAP2K2; |
| | MAP2K1; PAK3; NT5E; TTK; CSNK1A1; BRAF; SGK |
| Chemokine Signaling | CXCR4; ROCK2; MAPK1; PTK2; FOS; CFL1; GNAQ; |
| | CAMK2A; CXCL12; MAPK8; MAPK3; KRAS; MAPK13; |
| | RHOA; CCR3; SRC; PPP1CC; MAPK14; NOX1; RAF1; |
| | MAP2K2; MAP2K1; JUN; CCL2; PRKCA |
| IL-2 Signaling | ELK1; MAPK1; PTPN11; AKT2; PIK3CA; SYK; FOS; |
| | STAT5B; PIK3CB; PIK3C3; MAPK8; MAPK3; KRAS; |
| | SOCS1; STAT5A; PIK3C2A; LCK; RAF1; MAP2K2; |
| | JAK1; AKT1; PIK3R1; MAP2K1; JUN; AKT3 |
| Synaptic Long Term | PRKCE; IGF1; PRKCZ; PRDX6; LYN; MAPK1; GNAS; |
| Depression | PRKCI; GNAQ; PPP2R1A; IGF1R; PRKD1; MAPK3; |
| | KRAS; GRN; PRKCD; NOS3; NOS2A; PPP2CA; |
| | YWHAZ; RAF1; MAP2K2; PPP2R5C; MAP2K1; PRKCA |
| Estrogen Receptor | TAF4B; EP300; CARM1; PCAF; MAPK1; NCOR2; |
| Signaling | SMARCA4; MAPK3; NRIP1; KRAS; SRC; NR3C1; |
| | HDAC3; PPARGC1A; RBM9; NCOA3; RAF1; CREBBP; |
| | MAP2K2; NCOA2; MAP2K1; PRKDC; ESR1; ESR2 |
| Protein Ubiquitination | TRAF6; SMURF1; BIRC4; BRCA1; UCHL1; NEDD4; |
| Pathway | CBL; UBE2I; BTRC; HSPA5; USP7; USP10; FBXW7; |
| | USP9X; STUB1; USP22; B2M; BIRC2; PARK2; USP8; |
| | USP1; VHL; HSP90AA1; BIRC3 |
| IL-10 Signaling | TRAF6; CCR1; ELK1; IKBKB; SP1; FOS; NFKB2; |
| | MAP3K14; MAPK8; MAPK13; RELA; MAPK14; TNF; |
| | IKBKG; RELB; MAP3K7; JAK1; CHUK; STAT3; NFKB1; |
| | JUN; IL1R1; IL6 |
| VDR/RXR Activation | PRKCE; EP300; PRKCZ; RXRA; GADD45A; HES1; |
| | NCOR2; SP1; PRKC1; CDKN1B; PRKD1; PRKCD; |
| | RUNX2; KLF4; YY1; NCOA3; CDKN1A; NCOA2; SPP1; |
| | LRP5; CEBPB; FOXO1; PRKCA |
| TGF-beta Signaling | EP300; SMAD2; SMURF1; MAPK1; SMAD3; SMAD1; |
| | FOS; MAPK8; MAPK3; KRAS; MAPK9; RUNX2; |
| | SERPINE1; RAF1; MAP3K7; CREBBP; MAP2K2; |
| | MAP2K1; TGFBR1; SMAD4; JUN; SMAD5 |
| Toll-like Receptor | IRAK1; EIF2AK2; MYD88; TRAF6; PPARA; ELK1; |
| Signaling | IKBKB; FOS; NFKB2; MAP3K14; MAPK8; MAPK13; |
| | RELA; TLR4; MAPK14; IKBKG; RELB; MAP3K7; CHUK; |
| | NFKB1; TLR2; JUN |
| p38 MAPK Signaling | HSPB1; IRAK1; TRAF6; MAPKAPK2; ELK1; FADD; FAS; |
| | CREB1; DDIT3; RPS6KA4; DAXX; MAPK13; TRAF2; |
| | MAPK14; TNF; MAP3K7; TGFBR1; MYC; ATF4; IL1R1; |
| | SRF; STAT1 |
| Neurotrophin/TRK | NTRK2; MAPK1; PTPN11; PIK3CA; CREB1; FOS; |
| Signaling | PIK3CB; PIK3C3; MAPK8; MAPK3; KRAS; PIK3C2A; |
| | RAF1; MAP2K2; AKT1; PIK3R1; PDPK1; MAP2K1; |
| | CDC42; JUN; ATF4 |
| FXR/RXR Activation | INS; PPARA; FASN; RXRA; AKT2; SDC1; MAPK8; |
| | APOB; MAPK10; PPARG; MTTP; MAPK9; PPARGC1A; |
| | TNF; CREBBP; AKT1; SREBF1; FGFR4; AKT3; FOXO1 |
| Synaptic Long Term | PRKCE; RAP1A; EP300; PRKCZ; MAPK1; CREB1; |
| Potentiation | PRKCI; GNAQ; CAMK2A; PRKD1; MAPK3; KRAS; |
| | PRKCD; PPP1CC; RAF1; CREBBP; MAP2K2; MAP2K1; |
| | ATF4; PRKCA |
| Calcium Signaling | RAP1A; EP300; HDAC4; MAPK1; HDAC5; CREB1; |
| | CAMK2A; MYH9; MAPK3; HDAC2; HDAC7A; HDAC11; |
| | HDAC9; HDAC3; CREBBP; CALR; CAMKK2; ATF4; |
| | HDAC6 |
| EGF Signaling | ELK1; MAPK1; EGFR; PIK3CA; FOS; PIK3CB; PIK3C3; |
| | MAPK8; MAPK3; PIK3C2A; RAF1; JAK1; PIK3R1; |
| | STAT3; MAP2K1; JUN; PRKCA; SRF; STAT1 |
| Hypoxia Signaling in the | EDN1; PTEN; EP300; NQO1; UBE2I; CREB1; ARNT; |
| Cardiovascular System | HIF1A; SLC2A4; NOS3; TP53; LDHA; AKT1; ATM; |
| | VEGFA; JUN; ATF4; VHL; HSP90AA1 |
| LPS/IL-1 Mediated | IRAK1; MYD88; TRAF6; PPARA; RXRA; ABCA1, |
| Inhibition | MAPK8; ALDH1A1; GSTP1; MAPK9; ABCB1; TRAF2; |
| of RXR Function | TLR4; TNF; MAP3K7; NR1H2; SREBF1; JUN; IL1R1 |
| LXR/RXR Activation | FASN; RXRA; NCOR2; ABCA1; NFKB2; IRF3; RELA; |
| | NOS2A; TLR4; TNF; RELB; LDLR; NR1H2; NFKB1; |
| | SREBF1; IL1R1; CCL2; IL6; MMP9 |
| Amyloid Processing | PRKCE; CSNK1E; MAPK1; CAPNS1; AKT2; CAPN2; |
| | CAPN1; MAPK3; MAPK13; MAPT; MAPK14; AKT1; |
| | PSEN1; CSNK1A1; GSK3B; AKT3; APP |
| IL-4 Signaling | AKT2; PIK3CA; PIK3CB; PIK3C3; IRS1; KRAS; SOCS1; |
| | PTPN6; NR3C1; PIK3C2A; JAK1; AKT1; JAK2; PIK3R1; |
| | FRAP1; AKT3; RPS6KB1 |
| Cell Cycle: G2/M DNA | EP300; PCAF; BRCA1; GADD45A; PLK1; BTRC; |
| Damage Checkpoint | CHEK1; ATR; CHEK2; YWHAZ; TP53; CDKN1A; |
| Regulation | PRKDC; ATM; SFN; CDKN2A |
| Nitric Oxide Signaling in | KDR; FLT1; PGF; AKT2; PIK3CA; PIK3CB; PIK3C3; |
| the Cardiovascular System | CAV1; PRKCD; NOS3; PIK3C2A; AKT1; PIK3R1; |
| | VEGFA; AKT3; HSP90AA1 |
| Purine Metabolism | NME2; SMARCA4; MYH9; RRM2; ADAR; EIF2AK4; |
| | PKM2; ENTPD1; RAD51; RRM2B; TJP2; RAD51C; |
| | NT5E; POLD1; NME1 |
| cAMP-mediated | RAP1A; MAPK1; GNAS; CREB1; CAMK2A; MAPK3; |
| Signaling | SRC; RAF1; MAP2K2; STAT3; MAP2K1; BRAF; ATF4 |
| Mitochondrial | SOD2; MAPK8; CASP8; MAPK10; MAPK9; CASP9; |
| Dysfunction | PARK7; PSEN1; PARK2; APP; CASP3 |
| Notch Signaling | HES1; JAG1; NUMB; NOTCH4; ADAM17; NOTCH2; |
| | PSEN1; NOTCH3; NOTCH1; DLL4 |
| Endoplasmic Reticulum | HSPA5; MAPK8; XBP1; TRAF2; ATF6; CASP9; ATF4; |
| Stress Pathway | EIF2AK3; CASP3 |
| Pyrimidine Metabolism | NME2; AICDA; RRM2; EIF2AK4; ENTPD1; RRM2B; |
| | NT5E; POLD1; NME1 |
| Parkinson's Signaling | UCHL1; MAPK8; MAPK13; MAPK14; CASP9; PARK7; |
| | PARK2; CASP3 |
| Cardiac & Beta | GNAS; GNAQ; PPP2R1A; GNB2L1; PPP2CA; PPP1CC; |
| Adrenergic Signaling | PPP2R5C |
| Glycolysis/ | HK2; GCK; GPI; ALDH1A1; PKM2; LDHA; HK1 |
| Gluconeogenesis | |
| Interferon Signaling | IRF1; SOCS1; JAK1; JAK2; IFITM1; STAT1; IFIT3 |
| Sonic Hedgehog | ARRB2; SMO; GLI2; DYRK1A; GLI1; GSK3B; DYRKIB |
| Signaling | |
| Glycerophospholipid | PLD1; GRN; GPAM; YWHAZ; SPHK1; SPHK2 |
| Metabolism | |
| Phospholipid | PRDX6; PLD1; GRN; YWHAZ; SPHK1; SPHK2 |
| Degradation | |
| Tryptophan Metabolism | SIAH2; PRMT5; NEDD4; ALDH1A1; CYP1B1; SIAH1 |
| Lysine Degradation | SUV39H1; EHMT2; NSD1; SETD7; PPP2R5C |
| Nucleotide Excision | ERCC5; ERCC4; XPA; XPC; ERCC1 |
| Repair Pathway | |
| Starch and Sucrose | UCHL1; HK2; GCK; GPI; HK1 |
| Metabolism | |
| Aminosugars Metabolism | NQO1; HK2; GCK; HK1 |
| Arachidonic Acid | PRDX6; GRN; YWHAZ; CYP1B1 |
| Metabolism | |
| Circadian Rhythm | CSNK1E; CREB1; ATF4; NR1D1 |
| Signaling | |
| Coagulation System | BDKRB1; F2R; SERPINE1; F3 |
| Dopamine Receptor | PPP2R1A; PPP2CA; PPP1CC; PPP2R5C |
| Signaling | |
| Glutathione Metabolism | IDH2; GSTP1; ANPEP; IDH1 |
| Glycerolipid Metabolism | ALDH1A1; GPAM; SPHK1; SPHK2 |
| Linoleic Acid Metabolism | PRDX6; GRN; YWHAZ; CYP1B1 |
| Methionine Metabolism | DNMT1; DNMT3B; AHCY; DNMT3A |
| Pyruvate Metabolism | GLO1; ALDH1A1; PKM2; LDHA |
| Arginine and Proline | ALDH1A1; NOS3; NOS2A |
| Metabolism | |
| Eicosanoid Signaling | PRDX6; GRN; YWHAZ |
| Fructose and Mannose | HK2; GCK; HK1 |
| Metabolism | |
| Galactose Metabolism | HK2; GCK; HK1 |
| Stilbene, Coumarine and | PRDX6; PRDX1; TYR |
| Lignin Biosynthesis | |
| Antigen Presentation | CALR; B2M |
| Pathway | |
| Biosynthesis of Steroids | NQO1; DHCR7 |
| Butanoate Metabolism | ALDH1A1; NLGN1 |
| Citrate Cycle | IDH2; IDH1 |
| Fatty Acid Metabolism | ALDH1A1; CYP1B1 |
| Glycerophospholipid | PRDX6; CHKA |
| Metabolism | |
| Histidine Metabolism | PRMT5; ALDH1A1 |
| Inositol Metabolism | ERO1L; APEX1 |
| Metabolism of | GSTP1; CYP1B1 |
| Xenobiotics | |
| by Cytochrome p450 | |
| Methane Metabolism | PRDX6; PRDX1 |
| Phenylalanine | PRDX6; PRDX1 |
| Metabolism | |
| Propanoate Metabolism | ALDH1A1; LDHA |
| Selenoamino Acid | PRMT5; AHCY |
| Metabolism | |
| Sphingolipid Metabolism | SPHK1; SPHK2 |
| Aminophosphonate | PRMT5 |
| Metabolism | |
| Androgen and Estrogen | PRMT5 |
| Metabolism | |
| Ascorbate and Aldarate | ALDH1A1 |
| Metabolism | |
| Bile Acid Biosynthesis | ALDH1A1 |
| Cysteine Metabolism | LDHA |
| Fatty Acid Biosynthesis | FASN |
| Glutamate Receptor | GNB2L1 |
| Signaling | |
| NRF2-mediated | PRDX1 |
| Oxidative | |
| Stress Response | |
| Pentose Phosphate | GPI |
| Pathway | |
| Pentose and Glucuronate | UCHL1 |
| Interconversions | |
| Retinol Metabolism | ALDH1A1 |
| Riboflavin Metabolism | TYR |
| Tyrosine Metabolism | PRMT5, TYR |
| Ubiquinone Biosynthesis | PRMT5 |
| Valine, Leucine and | ALDH1A1 |
| Isoleucine Degradation | |
| Glycine, Serine and | CHKA |
| Threonine Metabolism | |
| Lysine Degradation | ALDH1A1 |
| Pain/Taste | TRPM5; TRPA1 |
| Pain | TRPM7; TRPC5; TRPC6; TRPC1; Cnr1; cnr2; Grk2; |
| | Trpa1; Pomc; Cgrp; Crf; Pka; Era; Nr2b; TRPM5; Prkaca; |
| | Prkacb; Prkar1a; Prkar2a |
| Mitochondrial Function | AIF; CytC; SMAC (Diablo); Aifm-1; Aifm-2 |
| Developmental | BMP-4; Chordin (Chrd); Noggin (Nog); WNT (Wnt2; |
| Neurology | Wnt2b; Wnt3a; Wnt4; Wnt5a; Wnt6; Wnt7b; Wnt8b; |
| | Wnt9a; Wnt9b; Wnt10a; Wnt10b; Wnt16); beta-catenin; |
| | Dkk-1; Frizzled related proteins; Otx-2; Gbx2; FGF-8; |
| | Reelin; Dab1; unc-86 (Pou4fl or Brn3a); Numb; Reln |

[0817] Embodiments of the invention also relate to methods and compositions related to knocking out genes, amplifying genes and repairing particular mutations associated with DNA repeat instability and neurological disorders (Robert D. Wells, Tetsuo Ashizawa, Genetic Instabilities and Neurological Diseases, Second Edition, Academic Press, Oct. 13, 2011—Medical). Specific aspects of tandem repeat sequences have been found to be responsible for more than twenty human diseases (New insights into repeat instability: role of RNADNA hybrids. McIvor E I, Polak U, Napierala M. RNA Biol. 2010 September-October; 7(5):551-8). The present effector protein systems may be harnessed to correct these defects of genomic instability.

[0818] Several further aspects of the invention relate to correcting defects associated with a wide range of genetic diseases which are further described on the website of the National Institutes of Health under the topic subsection Genetic Disorders (website at health.nih.gov/topic/GeneticDisorders). The genetic brain diseases may include but are not limited to Adrenoleukodystrophy, Agenesis of the Corpus Callosum, Aicardi Syndrome, Alpers' Disease, Alzheimer's Disease, Barth Syndrome, Batten Disease, CADASIL, Cerebellar Degeneration, Fabry's Disease, Gerstmann-Straussler-Scheinker Disease, Huntington's Disease and other Triplet Repeat Disorders, Leigh's Disease, Lesch-Nyhan Syndrome, Menkes Disease, Mitochondrial Myopathies and NINDS Colpocephaly. These diseases are further described on the website of the National Institutes of Health under the subsection Genetic Brain Disorders.

### Adoptive Cell Transfer

[0819] The systems herein may be used for adoptive cell transfer treatments. As used herein, “ACT”, “adoptive cell therapy” and “adoptive cell transfer” may be used interchangeably. In certain embodiments, Adoptive cell therapy (ACT) can refer to the transfer of cells to a patient with the goal of transferring the functionality and characteristics into the new host by engraftment of the cells (see, e.g., Mettananda et al., Editing an a-globin enhancer in primary human hematopoietic stem cells as a treatment for β-thalassemia, Nat Commun. 2017 Sep. 4; 8(1):424). As used herein, the term “engraft” or “engraftment” refers to the process of cell incorporation into a tissue of interest in vivo through contact with existing cells of the tissue. Adoptive cell therapy (ACT) can refer to the transfer of cells, most commonly immune-derived cells, back into the same patient or into a new recipient host with the goal of transferring the immunologic functionality and characteristics into the new host. If possible, use of autologous cells helps the recipient by minimizing GVHD issues. The adoptive transfer of autologous tumor infiltrating lymphocytes (TIL) (Zacharakis et al., (2018) Nat Med. 2018 June; 24(6):724-730; Besser et al., (2010) Clin. Cancer Res 16 (9) 2646-55; Dudley et al., (2002) Science 298 (5594): 850-4; and Dudley et al., (2005) Journal of Clinical Oncology 23 (10): 2346-57.) or genetically re-directed peripheral blood mononuclear cells (Johnson et al., (2009) Blood 114 (3): 535-46; and Morgan et al., (2006) Science 314(5796) 126-9) has been used to successfully treat patients with advanced solid tumors, including melanoma, metastatic breast cancer and colorectal carcinoma, as well as patients with CD19-expressing hematologic malignancies (Kalos et al., (2011) Science Translational Medicine 3 (95): 95ra73). In certain embodiments, allogenic cells immune cells are transferred (see, e.g., Ren et al., (2017) Clin Cancer Res 23 (9) 2255-2266). As described further herein, allogenic cells can be edited to reduce alloreactivity and prevent graft-versus-host disease. Thus, use of allogenic cells allows for cells to be obtained from healthy donors and prepared for use in patients as opposed to preparing autologous cells from a patient after diagnosis.

[0820] Aspects of the invention involve the adoptive transfer of immune system cells, such as T cells, specific for selected antigens, such as tumor associated antigens or tumor specific neoantigens (see, e.g., Maus et al., 2014, Adoptive Immunotherapy for Cancer or Viruses, Annual Review of Immunology, Vol. 32: 189-225; Rosenberg and Restifo, 2015, Adoptive cell transfer as personalized immunotherapy for human cancer, Science Vol. 348 no. 6230 pp. 62-68; Restifo et al., 2015, Adoptive immunotherapy for cancer: harnessing the T cell response. Nat. Rev. Immunol. 12(4): 269-281; and Jenson and Riddell, 2014, Design and implementation of adoptive therapy with chimeric antigen receptor-modified T cells. Immunol Rev. 257(1): 127-144; and Rajasagi et al., 2014, Systematic identification of personal tumor-specific neoantigens in chronic lymphocytic leukemia. Blood. 2014 Jul. 17; 124(3):453-62).

[0821] In certain embodiments, an antigen (such as a tumor antigen) to be targeted in adoptive cell therapy (such as particularly CAR or TCR T-cell therapy) of a disease (such as particularly of tumor or cancer) may be selected from a group consisting of: B cell maturation antigen (BCMA) (see, e.g., Friedman et al., Effective Targeting of Multiple BCMA-Expressing Hematological Malignancies by Anti-BCMA CAR T Cells, Hum Gene Ther. 2018 Mar. 8; Berdeja J G, et al. Durable clinical responses in heavily pretreated patients with relapsed/refractory multiple myeloma: updated results from a multicenter study of bb2121 anti-Bcma CAR T cell therapy. Blood. 2017; 130:740; and Mouhieddine and Ghobrial, Immunotherapy in Multiple Myeloma: The Era of CAR T Cell Therapy, Hematologist, May-June 2018, Volume 15, issue 3); PSA (prostate-specific antigen); prostate-specific membrane antigen (PSMA); PSCA (Prostate stem cell antigen); Tyrosine-protein kinase transmembrane receptor ROR1; fibroblast activation protein (FAP); Tumor-associated glycoprotein 72 (TAG72); Carcinoembryonic antigen (CEA); Epithelial cell adhesion molecule (EPCAM); Mesothelin; Human Epidermal growth factor Receptor 2 (ERBB2 (Her2/neu)); Prostate; Prostatic acid phosphatase (PAP); elongation factor 2 mutant (ELF2M); Insulin-like growth factor 1 receptor (IGF-1R); gp100; BCR-ABL (breakpoint cluster region-Abelson); tyrosinase; New York esophageal squamous cell carcinoma 1 (NY-ESO-1); K-light chain, LAGE (L antigen); MAGE (melanoma antigen); Melanoma-associated antigen 1 (MAGE-A1); MAGE A3; MAGE A6; legumain; Human papillomavirus (HPV) E6; HPV E7; prostein; survivin; PCTA1 (Galectin 8); Melan-A/MART-1; Ras mutant; TRP-1 (tyrosinase related protein 1, or gp75); Tyrosinase-related Protein 2 (TRP2); TRP-2/INT2 (TRP-2/intron 2); RAGE (renal antigen); receptor for advanced glycation end products 1 (RAGE1); Renal ubiquitous 1, 2 (RU1, RU2); intestinal carboxyl esterase (iCE); Heat shock protein 70-2 (HSP70-2) mutant; thyroid stimulating hormone receptor (TSHR); CD123; CD171; CD19; CD20; CD22; CD26; CD30; CD33; CD44v7/8 (cluster of differentiation 44, exons 7/8); CD53; CD92; CD100; CD148; CD150; CD200; CD261; CD262; CD362; CS-1 (CD2 subset 1, CRACC, SLAMF7, CD319, and 19A24); C-type lectin-like molecule-1 (CLL-1); ganglioside GD3 (aNeu5Ac(2-8)aNeu5Ac(2-3)bDGalp(1-4)bDG1cp(1-1)Cer); Tn antigen (Tn Ag); Fms-Like Tyrosine Kinase 3 (FLT3); CD38; CD138; CD44v6; B7H3 (CD276); KIT (CD117); Interleukin-13 receptor subunit alpha-2 (IL-13Ra2); Interleukin 11 receptor alpha (IL-11Ra); prostate stem cell antigen (PSCA); Protease Serine 21 (PRSS21); vascular endothelial growth factor receptor 2 (VEGFR2); Lewis(Y) antigen; CD24; Platelet-derived growth factor receptor beta (PDGFR-beta); stage-specific embryonic antigen-4 (SSEA-4); Mucin 1, cell surface associated (MUC1); mucin 16 (MUC16); epidermal growth factor receptor (EGFR); epidermal growth factor receptor variant III (EGFRvIII); neural cell adhesion molecule (NCAM); carbonic anhydrase IX (CAIX); Proteasome (Prosome, Macropain) Subunit, Beta Type, 9 (LMP2); ephrin type-A receptor 2 (EphA2); Ephrin B2; Fucosyl GM1; sialyl Lewis adhesion molecule (sLe); ganglioside GM3 (aNeu5Ac(2-3)bDGalp(1-4)bDG1cp(1-1)Cer); TGS5; high molecular weight-melanoma-associated antigen (HMWMAA); o-acetyl-GD2 ganglioside (OAcGD2); Folate receptor alpha; Folate receptor beta; tumor endothelial marker 1 (TEM1/CD248); tumor endothelial marker 7-related (TEM7R); claudin 6 (CLDN6); G protein-coupled receptor class C group 5, member D (GPRC5D); chromosome X open reading frame 61 (CXORF61); CD97; CD179a; anaplastic lymphoma kinase (ALK); Polysialic acid; placenta-specific 1 (PLAC1); hexasaccharide portion of globoH glycoceramide (GloboH); mammary gland differentiation antigen (NY-BR-1); uroplakin 2 (UPK2); Hepatitis A virus cellular receptor 1 (HAVCR1); adrenoceptor beta 3 (ADRB3); pannexin 3 (PANX3); G protein-coupled receptor 20 (GPR20); lymphocyte antigen 6 complex, locus K 9 (LY6K); Olfactory receptor 51E2 (OR51E2); TCR Gamma Alternate Reading Frame Protein (TARP); Wilms tumor protein (WT1); ETS translocation-variant gene 6, located on chromosome 12p (ETV6-AML); sperm protein 17 (SPA17); X Antigen Family, Member 1A (XAGE1); angiopoietin-binding cell surface receptor 2 (Tie 2); CT (cancer/testis (antigen)); melanoma cancer testis antigen-1 (MAD-CT-1); melanoma cancer testis antigen-2 (MAD-CT-2); Fos-related antigen 1; p53; p53 mutant; human Telomerase reverse transcriptase (hTERT); sarcoma translocation breakpoints; melanoma inhibitor of apoptosis (ML-IAP); ERG (transmembrane protease, serine 2 (TMPRSS2) ETS fusion gene); N-Acetyl glucosaminyl-transferase V (NA17); paired box protein Pax-3 (PAX3); Androgen receptor; Cyclin B1; Cyclin D1; v-myc avian myelocytomatosis viral oncogene neuroblastoma derived homolog (MYCN); Ras Homolog Family Member C (RhoC); Cytochrome P450 1B1 (CYP1B1); CCCTC-Binding Factor (Zinc Finger Protein)-Like (BORIS); Squamous Cell Carcinoma Antigen Recognized By T Cells-1 or 3 (SART1, SART3); Paired box protein Pax-5 (PAX5); proacrosin binding protein sp32 (OY-TES1); lymphocyte-specific protein tyrosine kinase (LCK); A kinase anchor protein 4 (AKAP-4); synovial sarcoma, X breakpoint-1, -2, -3 or -4 (SSX1, SSX2, SSX3, SSX4); CD79a; CD79b; CD72; Leukocyte-associated immunoglobulin-like receptor 1 (LAIR1); Fc fragment of IgA receptor (FCAR); Leukocyte immunoglobulin-like receptor subfamily A member 2 (LILRA2); CD300 molecule-like family member f (CD300LF); C-type lectin domain family 12 member A (CLEC12A); bone marrow stromal cell antigen 2 (BST2); EGF-like module-containing mucin-like hormone receptor-like 2 (EMR2); lymphocyte antigen 75 (LY75); Glypican-3 (GPC3); Fc receptor-like 5 (FCRL5); mouse double minute 2 homolog (MDM2); livin; alphafetoprotein (AFP); transmembrane activator and CAML Interactor (TACI); B-cell activating factor receptor (BAFF-R); V-Ki-ras2 Kirsten rat sarcoma viral oncogene homolog (KRAS); immunoglobulin lambda-like polypeptide 1 (IGLL1); 707-AP (707 alanine proline); ART-4 (adenocarcinoma antigen recognized by T4 cells); BAGE (B antigen; b-catenin/m, b-catenin/mutated); CAMEL (CTL-recognized antigen on melanoma); CAP1 (carcinoembryonic antigen peptide 1); CASP-8 (caspase-8); CDC27m (cell-division cycle 27 mutated); CDK4/m (cycline-dependent kinase 4 mutated); Cyp-B (cyclophilin B); DAM (differentiation antigen melanoma); EGP-2 (epithelial glycoprotein 2); EGP-40 (epithelial glycoprotein 40); Erbb2, 3, 4 (erythroblastic leukemia viral oncogene homolog-2, -3, 4); FBP (folate binding protein); fAchR (Fetal acetylcholine receptor); G250 (glycoprotein 250); GAGE (G antigen); GnT-V (N-acetylglucosaminyltransferase V); HAGE (helicose antigen); ULA-A (human leukocyte antigen-A); HST2 (human signet ring tumor 2); KIAA0205; KDR (kinase insert domain receptor); LDLR/FUT (low density lipid receptor/GDP L-fucose: b-D-galactosidase 2-a-L fucosyltransferase); L1CAM (L1 cell adhesion molecule); MC1R (melanocortin 1 receptor); Myosin/m (myosin mutated); MUM-1, -2, -3 (melanoma ubiquitous mutated 1, 2, 3); NA88-A (NA cDNA clone of patient M88); KG2D (Natural killer group 2, member D) ligands; oncofetal antigen (h5T4); p190 minor bcr-abl (protein of 190KD bcr-abl); Pml/RARa (promyelocytic leukaemia/retinoic acid receptor a); PRAIVIE (preferentially expressed antigen of melanoma); SAGE (sarcoma antigen); TEL/AML1 (translocation Ets-family leukemia/acute myeloid leukemia 1); TPI/m (triosephosphate isomerase mutated); CD70; and any combination thereof.

[0822] In certain embodiments, an antigen to be targeted in adoptive cell therapy (such as particularly CAR or TCR T-cell therapy) of a disease (such as particularly of tumor or cancer) is a tumor-specific antigen (TSA).

[0823] In certain embodiments, an antigen to be targeted in adoptive cell therapy (such as particularly CAR or TCR T-cell therapy) of a disease (such as particularly of tumor or cancer) is a neoantigen.

[0824] In certain embodiments, an antigen to be targeted in adoptive cell therapy (such as particularly CAR or TCR T-cell therapy) of a disease (such as particularly of tumor or cancer) is a tumor-associated antigen (TAA).

[0825] In certain embodiments, an antigen to be targeted in adoptive cell therapy (such as particularly CAR or TCR T-cell therapy) of a disease (such as particularly of tumor or cancer) is a universal tumor antigen. In certain preferred embodiments, the universal tumor antigen is selected from the group consisting of: a human telomerase reverse transcriptase (hTERT), survivin, mouse double minute 2 homolog (MDM2), cytochrome P450 1B 1 (CYP1B), HER2/neu, Wilms' tumor gene 1 (WT1), livin, alphafetoprotein (AFP), carcinoembryonic antigen (CEA), mucin 16 (MUC16), MUC1, prostate-specific membrane antigen (PSMA), p53, cyclin (D1), and any combinations thereof.

[0826] In certain embodiments, an antigen (such as a tumor antigen) to be targeted in adoptive cell therapy (such as particularly CAR or TCR T-cell therapy) of a disease (such as particularly of tumor or cancer) may be selected from a group consisting of: CD19, BCMA, CD70, CLL-1, MAGE A3, MAGE A6, HPV E6, HPV E7, WT1, CD22, CD171, ROR1, MUC16, and SSX2. In certain preferred embodiments, the antigen may be CD19. For example, CD19 may be targeted in hematologic malignancies, such as in lymphomas, more particularly in B-cell lymphomas, such as without limitation in diffuse large B-cell lymphoma, primary mediastinal b-cell lymphoma, transformed follicular lymphoma, marginal zone lymphoma, mantle cell lymphoma, acute lymphoblastic leukemia including adult and pediatric ALL, non-Hodgkin lymphoma, indolent non-Hodgkin lymphoma, or chronic lymphocytic leukemia. For example, BCMA may be targeted in multiple myeloma or plasma cell leukemia (see, e.g., 2018 American Association for Cancer Research (AACR) Annual meeting Poster: Allogeneic Chimeric Antigen Receptor T Cells Targeting B Cell Maturation Antigen). For example, CLL1 may be targeted in acute myeloid leukemia. For example, MAGE A3, MAGE A6, SSX2, and/or KRAS may be targeted in solid tumors. For example, HPV E6 and/or HPV E7 may be targeted in cervical cancer or head and neck cancer. For example, WT1 may be targeted in acute myeloid leukemia (AML), myelodysplastic syndromes (MDS), chronic myeloid leukemia (CML), non-small cell lung cancer, breast, pancreatic, ovarian or colorectal cancers, or mesothelioma. For example, CD22 may be targeted in B cell malignancies, including non-Hodgkin lymphoma, diffuse large B-cell lymphoma, or acute lymphoblastic leukemia. For example, CD171 may be targeted in neuroblastoma, glioblastoma, or lung, pancreatic, or ovarian cancers. For example, ROR1 may be targeted in ROR1+ malignancies, including non-small cell lung cancer, triple negative breast cancer, pancreatic cancer, prostate cancer, ALL, chronic lymphocytic leukemia, or mantle cell lymphoma. For example, MUC16 may be targeted in MUC16ecto+epithelial ovarian, fallopian tube or primary peritoneal cancer. For example, CD70 may be targeted in both hematologic malignancies as well as in solid cancers such as renal cell carcinoma (RCC), gliomas (e.g., GBM), and head and neck cancers (HNSCC). CD70 is expressed in both hematologic malignancies as well as in solid cancers, while its expression in normal tissues is restricted to a subset of lymphoid cell types (see, e.g., 2018 American Association for Cancer Research (AACR) Annual meeting Poster: Allogeneic CRISPR Engineered Anti-CD70 CAR-T Cells Demonstrate Potent Preclinical Activity Against Both Solid and Hematological Cancer Cells).

[0827] Various strategies may for example be employed to genetically modify T cells by altering the specificity of the T cell receptor (TCR) for example by introducing new TCR α and β chains with selected peptide specificity (see U.S. Pat. No. 8,697,854; PCT Patent Publications: WO2003020763, WO2004033685, WO2004044004, WO2005114215, WO2006000830, WO2008038002, WO2008039818, WO2004074322, WO2005113595, WO2006125962, WO2013166321, WO2013039889, WO2014018863, WO2014083173; U.S. Pat. No. 8,088,379).

[0828] As an alternative to, or addition to, TCR modifications, chimeric antigen receptors (CARs) may be used in order to generate immunoresponsive cells, such as T cells, specific for selected targets, such as malignant cells, with a wide variety of receptor chimera constructs having been described (see U.S. Pat. Nos. 5,843,728; 5,851,828; 5,912,170; 6,004,811; 6,284,240; 6,392,013; 6,410,014; 6,753,162; 8,211,422; and, PCT Publication WO9215322).

[0829] In general, CARs are comprised of an extracellular domain, a transmembrane domain, and an intracellular domain, wherein the extracellular domain comprises an antigen-binding domain that is specific for a predetermined target. While the antigen-binding domain of a CAR is often an antibody or antibody fragment (e.g., a single chain variable fragment, scFv), the binding domain is not particularly limited so long as it results in specific recognition of a target. For example, in some embodiments, the antigen-binding domain may comprise a receptor, such that the CAR is capable of binding to the ligand of the receptor. Alternatively, the antigen-binding domain may comprise a ligand, such that the CAR is capable of binding the endogenous receptor of that ligand.

[0830] The antigen-binding domain of a CAR is generally separated from the transmembrane domain by a hinge or spacer. The spacer is also not particularly limited, and it is designed to provide the CAR with flexibility. For example, a spacer domain may comprise a portion of a human Fc domain, including a portion of the CH3 domain, or the hinge region of any immunoglobulin, such as IgA, IgD, IgE, IgG, or IgM, or variants thereof. Furthermore, the hinge region may be modified so as to prevent off-target binding by FcRs or other potential interfering objects. For example, the hinge may comprise an IgG4 Fc domain with or without a S228P, L235E, and/or N297Q mutation (according to Kabat numbering) in order to decrease binding to FcRs. Additional spacers/hinges include, but are not limited to, CD4, CD8, and CD28 hinge regions.

[0831] The transmembrane domain of a CAR may be derived either from a natural or from a synthetic source. Where the source is natural, the domain may be derived from any membrane bound or transmembrane protein. Transmembrane regions of particular use in this disclosure may be derived from CD8, CD28, CD3, CD45, CD4, CD5, CDS, CD9, CD 16, CD22, CD33, CD37, CD64, CD80, CD86, CD 134, CD137, CD 154, TCR. Alternatively, the transmembrane domain may be synthetic, in which case it will comprise predominantly hydrophobic residues such as leucine and valine. Preferably a triplet of phenylalanine, tryptophan and valine will be found at each end of a synthetic transmembrane domain. Optionally, a short oligo- or polypeptide linker, preferably between 2 and 10 amino acids in length may form the linkage between the transmembrane domain and the cytoplasmic signaling domain of the CAR. A glycine-serine doublet provides a particularly suitable linker.

[0832] Alternative CAR constructs may be characterized as belonging to successive generations. First-generation CARs typically consist of a single-chain variable fragment of an antibody specific for an antigen, for example comprising a VL linked to a VH of a specific antibody, linked by a flexible linker, for example by a CD8α hinge domain and a CD8α transmembrane domain, to the transmembrane and intracellular signaling domains of either CD3ζ or FcRγ (scFv-CD3ζ or scFv-FcRγ; see U.S. Pat. Nos. 7,741,465; 5,912,172; 5,906,936). Second-generation CARs incorporate the intracellular domains of one or more costimulatory molecules, such as CD28, OX40 (CD134), or 4-1BB (CD137) within the endodomain (for example scFv-CD28/OX40/4-1BB-CD3; see U.S. Pat. Nos. 8,911,993; 8,916,381; 8,975,071; 9,101,584; 9,102,760; 9,102,761). Third-generation CARs include a combination of costimulatory endodomains, such a CD3-chain, CD97, GDI 1a-CD18, CD2, ICOS, CD27, CD154, CDS, OX40, 4-1BB, CD2, CD7, LIGHT, LFA-1, NKG2C, B7-H3, CD30, CD40, PD-1, or CD28 signaling domains (for example scFv-CD28-4-1BB-CD3t or scFv-CD28-OX40-CD3; see U.S. Pat. Nos. 8,906,682; 8,399,645; 5,686,281; PCT Publication No. WO2014134165; PCT Publication No. WO2012079000). In certain embodiments, the primary signaling domain comprises a functional signaling domain of a protein selected from the group consisting of CD3 zeta, CD3 gamma, CD3 delta, CD3 epsilon, common FcR gamma (FCERIG), FcR beta (Fc Epsilon Rib), CD79a, CD79b, Fc gamma RIIa, DAP10, and DAP12. In certain preferred embodiments, the primary signaling domain comprises a functional signaling domain of CD3ζ or FcRγ. In certain embodiments, the one or more costimulatory signaling domains comprise a functional signaling domain of a protein selected, each independently, from the group consisting of: CD27, CD28, 4-1BB (CD137), OX40, CD30, CD40, PD-1, ICOS, lymphocyte function-associated antigen-1 (LFA-1), CD2, CD7, LIGHT, NKG2C, B7-H3, a ligand that specifically binds with CD83, CDS, ICAM-1, GITR, BAFFR, HVEM (LIGHTR), SLAMF7, NKp80 (KLRF1), CD160, CD19, CD4, CD8 alpha, CD8 beta, IL2R beta, IL2R gamma, IL7R alpha, ITGA4, VLA1, CD49a, ITGA4, IA4, CD49D, ITGA6, VLA-6, CD49f, ITGAD, CD11d, ITGAE, CD103, ITGAL, CD11a, LFA-1, ITGAM, CD11b, ITGAX, CD11c, ITGB1, CD29, ITGB2, CD18, ITGB7, TNFR2, TRANCE/RANKL, DNAM1 (CD226), SLAMF4 (CD244, 2B4), CD84, CD96 (Tactile), CEACAM1, CRTAM, Ly9 (CD229), CD160 (BY55), PSGL1, CD100 (SEMA4D), CD69, SLAMF6 (NTB-A, Ly108), SLAM (SLAMF1, CD150, IPO-3), BLAME (SLAMF8), SELPLG (CD162), LTBR, LAT, GADS, SLP-76, PAG/Cbp, NKp44, NKp30, NKp46, and NKG2D. In certain embodiments, the one or more costimulatory signaling domains comprise a functional signaling domain of a protein selected, each independently, from the group consisting of: 4-1BB, CD27, and CD28. In certain embodiments, a chimeric antigen receptor may have the design as described in U.S. Pat. No. 7,446,190, comprising an intracellular domain of CD3 chain (such as amino acid residues 52-163 of the human CD3 zeta chain, as shown in SEQ ID NO: 14 of U.S. Pat. No. 7,446,190), a signaling region from CD28 and an antigen-binding element (or portion or domain; such as scFv). The CD28 portion, when between the zeta chain portion and the antigen-binding element, may suitably include the transmembrane and signaling domains of CD28 (such as amino acid residues 114-220 of SEQ ID NO: 10, full sequence shown in SEQ ID NO: 6 of U.S. Pat. No. 7,446,190; these can include the following portion of CD28 as set forth in Genbank identifier NM_006139 (sequence version 1, 2 or 3): IEVMYPPPYLDNEKSNGTIIHVKGKHLCPSPLFPGPSKPFWVLVVVGGVLACYSLLVT VAFIIFWVRSKRSRLLHSDYMNMTPRRPGPTRKHYQPYAPPRDFAAYRS)) (SEQ ID NO:453). Alternatively, when the zeta sequence lies between the CD28 sequence and the antigen-binding element, intracellular domain of CD28 can be used alone (such as amino sequence set forth in SEQ ID NO: 9 of U.S. Pat. No. 7,446,190). Hence, certain embodiments employ a CAR comprising (a) a zeta chain portion comprising the intracellular domain of human CD3t chain, (b) a costimulatory signaling region, and (c) an antigen-binding element (or portion or domain), wherein the costimulatory signaling region comprises the amino acid sequence encoded by SEQ ID NO: 6 of U.S. Pat. No. 7,446,190.

[0833] Alternatively, costimulation may be orchestrated by expressing CARs in antigen-specific T cells, chosen so as to be activated and expanded following engagement of their native αβTCR, for example by antigen on professional antigen-presenting cells, with attendant costimulation. In addition, additional engineered receptors may be provided on the immunoresponsive cells, for example to improve targeting of a T-cell attack and/or minimize side effects

[0834] By means of an example and without limitation, Kochenderfer et al., (2009) J Immunother. 32 (7): 689-702 described anti-CD19 chimeric antigen receptors (CAR). FMC63-28Z CAR contained a single chain variable region moiety (scFv) recognizing CD19 derived from the FMC63 mouse hybridoma (described in Nicholson et al., (1997) Molecular Immunology 34: 1157-1165), a portion of the human CD28 molecule, and the intracellular component of the human TCR-molecule. FMC63-CD828BBZ CAR contained the FMC63 scFv, the hinge and transmembrane regions of the CD8 molecule, the cytoplasmic portions of CD28 and 4-1BB, and the cytoplasmic component of the TCR-t molecule. The exact sequence of the CD28 molecule included in the FMC63-28Z CAR corresponded to Genbank identifier NM_006139; the sequence included all amino acids starting with the amino acid sequence IEVMYPPPY (SEQ ID NO:454) and continuing all the way to the carboxy-terminus of the protein. To encode the anti-CD19 scFv component of the vector, the authors designed a DNA sequence which was based on a portion of a previously published CAR (Cooper et al., (2003) Blood 101: 1637-1644). This sequence encoded the following components in frame from the 5′ end to the 3′ end: an XhoI site, the human granulocyte-macrophage colony-stimulating factor (GM-CSF) receptor α-chain signal sequence, the FMC63 light chain variable region (as in Nicholson et al., supra), a linker peptide (as in Cooper et al., supra), the FMC63 heavy chain variable region (as in Nicholson et al., supra), and a NotI site. A plasmid encoding this sequence was digested with XhoI and NotI. To form the MSGV-FMC63-28Z retroviral vector, the XhoI and NotI-digested fragment encoding the FMC63 scFv was ligated into a second XhoI and NotI-digested fragment that encoded the MSGV retroviral backbone (as in Hughes et al., (2005) Human Gene Therapy 16: 457-472) as well as part of the extracellular portion of human CD28, the entire transmembrane and cytoplasmic portion of human CD28, and the cytoplasmic portion of the human TCR-molecule (as in Maher et al., 2002) Nature Biotechnology 20: 70-75). The FMC63-28Z CAR is included in the KTE-C19 (axicabtagene ciloleucel) anti-CD19 CAR-T therapy product in development by Kite Pharma, Inc. for the treatment of inter alia patients with relapsed/refractory aggressive B-cell non-Hodgkin lymphoma (NHL). Accordingly, in certain embodiments, cells intended for adoptive cell therapies, more particularly immunoresponsive cells such as T cells, may express the FMC63-28Z CAR as described by Kochenderfer et al. (supra). Hence, in certain embodiments, cells intended for adoptive cell therapies, more particularly immunoresponsive cells such as T cells, may comprise a CAR comprising an extracellular antigen-binding element (or portion or domain; such as scFv) that specifically binds to an antigen, an intracellular signaling domain comprising an intracellular domain of a CD3 chain, and a costimulatory signaling region comprising a signaling domain of CD28. Preferably, the CD28 amino acid sequence is as set forth in Genbank identifier NM_006139 (sequence version 1, 2 or 3) starting with the amino acid sequence IEVMYPPPY and continuing all the way to the carboxy-terminus of the protein. The sequence is reproduced herein: IEVMYPPPYLDNEKSNGTIIHVKGKHLCPSPLFPGPSKPFWVLVVVGGVLACYSLLVT VAFIIFWVRSKRSRLLHSDYMNMTPRRPGPTRKHYQPYAPPRDFAAYRS. Preferably, the antigen is CD19, more preferably the antigen-binding element is an anti-CD19 scFv, even more preferably the anti-CD19 scFv as described by Kochenderfer et al. (supra).

[0835] Additional anti-CD19 CARs are further described in WO2015187528. More particularly Example 1 and Table 1 of WO2015187528, incorporated by reference herein, demonstrate the generation of anti-CD19 CARs based on a fully human anti-CD19 monoclonal antibody (47G4, as described in US20100104509) and murine anti-CD19 monoclonal antibody (as described in Nicholson et al. and explained above). Various combinations of a signal sequence (human CD8-alpha or GM-CSF receptor), extracellular and transmembrane regions (human CD8-alpha) and intracellular T-cell signalling domains (CD28-CD3; 4-1BB-CD3; CD27-CD3; CD28-CD27-CD3, 4-1BB-CD27-CD3; CD27-4-1BB-CD3; CD28-CD27-FccRI gamma chain; or CD28-FccRI gamma chain) were disclosed. Hence, in certain embodiments, cells intended for adoptive cell therapies, more particularly immunoresponsive cells such as T cells, may comprise a CAR comprising an extracellular antigen-binding element that specifically binds to an antigen, an extracellular and transmembrane region as set forth in Table 1 of WO2015187528 and an intracellular T-cell signalling domain as set forth in Table 1 of WO2015187528. Preferably, the antigen is CD19, more preferably the antigen-binding element is an anti-CD19 scFv, even more preferably the mouse or human anti-CD19 scFv as described in Example 1 of WO2015187528. In certain embodiments, the CAR comprises, consists essentially of or consists of an amino acid sequence of SEQ ID NO: 1, SEQ ID NO: 2, SEQ ID NO: 3, SEQ ID NO: 4, SEQ ID NO: 5, SEQ ID NO: 6, SEQ ID NO: 7, SEQ ID NO: 8, SEQ ID NO: 9, SEQ ID NO: 10, SEQ ID NO: 11, SEQ ID NO: 12, or SEQ ID NO: 13 as set forth in Table 1 of WO2015187528.

[0836] By means of an example and without limitation, chimeric antigen receptor that recognizes the CD70 antigen is described in W02012058460A2 (see also, Park et al., CD70 as a target for chimeric antigen receptor T cells in head and neck squamous cell carcinoma, Oral Oncol. 2018 March; 78:145-150; and Jin et al., CD70, a novel target of CAR T-cell therapy for gliomas, Neuro Oncol. 2018 Jan. 10; 20(1):55-65). CD70 is expressed by diffuse large B-cell and follicular lymphoma and also by the malignant cells of Hodgkins lymphoma, Waldenstrom's macroglobulinemia and multiple myeloma, and by HTLV-1- and EBV-associated malignancies. (Agathanggelou et al. Am. J. Pathol. 1995; 147: 1152-1160; Hunter et al., Blood 2004; 104:4881. 26; Lens et al., J Immunol. 2005; 174:6212-6219; Baba et al., J Virol. 2008; 82:3843-3852.) In addition, CD70 is expressed by non-hematological malignancies such as renal cell carcinoma and glioblastoma. (Junker et al., J Urol. 2005; 173:2150-2153; Chahlavi et al., Cancer Res 2005; 65:5428-5438) Physiologically, CD70 expression is transient and restricted to a subset of highly activated T, B, and dendritic cells.

[0837] By means of an example and without limitation, chimeric antigen receptor that recognizes BCMA has been described (see, e.g., US20160046724A1; W02016014789A2; W02017211900A1; W02015158671A1; US20180085444A1; W02018028647A1; US20170283504A1; and W02013154760A1).

[0838] In certain embodiments, the immune cell may, in addition to a CAR or exogenous TCR as described herein, further comprise a chimeric inhibitory receptor (inhibitory CAR) that specifically binds to a second target antigen and is capable of inducing an inhibitory or immunosuppressive or repressive signal to the cell upon recognition of the second target antigen. In certain embodiments, the chimeric inhibitory receptor comprises an extracellular antigen-binding element (or portion or domain) configured to specifically bind to a target antigen, a transmembrane domain, and an intracellular immunosuppressive or repressive signaling domain. In certain embodiments, the second target antigen is an antigen that is not expressed on the surface of a cancer cell or infected cell or the expression of which is downregulated on a cancer cell or an infected cell. In certain embodiments, the second target antigen is an WIC-class I molecule. In certain embodiments, the intracellular signaling domain comprises a functional signaling portion of an immune checkpoint molecule, such as for example PD-1 or CTLA4. Advantageously, the inclusion of such inhibitory CAR reduces the chance of the engineered immune cells attacking non-target (e.g., non-cancer) tissues.

[0839] Alternatively, T-cells expressing CARs may be further modified to reduce or eliminate expression of endogenous TCRs in order to reduce off-target effects. Reduction or elimination of endogenous TCRs can reduce off-target effects and increase the effectiveness of the T cells (U.S. Pat. No. 9,181,527). T cells stably lacking expression of a functional TCR may be produced using a variety of approaches. T cells internalize, sort, and degrade the entire T cell receptor as a complex, with a half-life of about 10 hours in resting T cells and 3 hours in stimulated T cells (von Essen, M. et al. 2004. J. Immunol. 173:384-393). Proper functioning of the TCR complex requires the proper stoichiometric ratio of the proteins that compose the TCR complex. TCR function also requires two functioning TCR zeta proteins with ITAM motifs. The activation of the TCR upon engagement of its WIC-peptide ligand requires the engagement of several TCRs on the same T cell, which all must signal properly. Thus, if a TCR complex is destabilized with proteins that do not associate properly or cannot signal optimally, the T cell will not become activated sufficiently to begin a cellular response.

[0840] Accordingly, in some embodiments, TCR expression may eliminated using RNA interference (e.g., shRNA, siRNA, miRNA, etc.), CRISPR, or other methods that target the nucleic acids encoding specific TCRs (e.g., TCR-α and TCR-β) and/or CD3 chains in primary T cells. By blocking expression of one or more of these proteins, the T cell will no longer produce one or more of the key components of the TCR complex, thereby destabilizing the TCR complex and preventing cell surface expression of a functional TCR.

[0841] In some instances, CAR may also comprise a switch mechanism for controlling expression and/or activation of the CAR. For example, a CAR may comprise an extracellular, transmembrane, and intracellular domain, in which the extracellular domain comprises a target-specific binding element that comprises a label, binding domain, or tag that is specific for a molecule other than the target antigen that is expressed on or by a target cell. In such embodiments, the specificity of the CAR is provided by a second construct that comprises a target antigen binding domain (e.g., an scFv or a bispecific antibody that is specific for both the target antigen and the label or tag on the CAR) and a domain that is recognized by or binds to the label, binding domain, or tag on the CAR. See, e.g., WO 2013/044225, WO 2016/000304, WO 2015/057834, WO 2015/057852, WO 2016/070061, U.S. Pat. No. 9,233,125, US 2016/0129109. In this way, a T-cell that expresses the CAR can be administered to a subject, but the CAR cannot bind its target antigen until the second composition comprising an antigen-specific binding domain is administered.

[0842] Alternative switch mechanisms include CARs that require multimerization in order to activate their signaling function (see, e.g., US 2015/0368342, US 2016/0175359, US 2015/0368360) and/or an exogenous signal, such as a small molecule drug (US 2016/0166613, Yung et al., Science, 2015), in order to elicit a T-cell response. Some CARs may also comprise a “suicide switch” to induce cell death of the CAR T-cells following treatment (Buddee et al., PLoS One, 2013) or to downregulate expression of the CAR following binding to the target antigen (WO 2016/011210).

[0843] Alternative techniques may be used to transform target immunoresponsive cells, such as protoplast fusion, lipofection, transfection or electroporation. A wide variety of vectors may be used, such as retroviral vectors, lentiviral vectors, adenoviral vectors, adeno-associated viral vectors, plasmids or transposons, such as a Sleeping Beauty transposon (see U.S. Pat. Nos. 6,489,458; 7,148,203; 7,160,682; 7,985,739; 8,227,432), may be used to introduce CARs, for example using 2nd generation antigen-specific CARs signaling through CD3t and either CD28 or CD137. Viral vectors may for example include vectors based on HIV, SV40, EBV, HSV or BPV.

[0844] Cells that are targeted for transformation may for example include T cells, Natural Killer (NK) cells, cytotoxic T lymphocytes (CTL), regulatory T cells, human embryonic stem cells, tumor-infiltrating lymphocytes (TIL) or a pluripotent stem cell from which lymphoid cells may be differentiated. T cells expressing a desired CAR may for example be selected through co-culture with y-irradiated activating and propagating cells (AaPC), which co-express the cancer antigen and co-stimulatory molecules. The engineered CAR T-cells may be expanded, for example by co-culture on AaPC in presence of soluble factors, such as IL-2 and IL-21. This expansion may for example be carried out so as to provide memory CAR+ T cells (which may for example be assayed by non-enzymatic digital array and/or multi-panel flow cytometry). In this way, CAR T cells may be provided that have specific cytotoxic activity against antigen-bearing tumors (optionally in conjunction with production of desired chemokines such as interferon-y). CAR T cells of this kind may for example be used in animal models, for example to treat tumor xenografts.

[0845] In certain embodiments, ACT includes co-transferring CD4+ Th1 cells and CD8+ CTLs to induce a synergistic antitumor response (see, e.g., Li et al., Adoptive cell therapy with CD4+ T helper 1 cells and CD8+ cytotoxic T cells enhances complete rejection of an established tumor, leading to generation of endogenous memory responses to non-targeted tumor epitopes. Clin Transl Immunology. 2017 October; 6(10): e160).

[0846] In certain embodiments, Th17 cells are transferred to a subject in need thereof. Th17 cells have been reported to directly eradicate melanoma tumors in mice to a greater extent than Th1 cells (Muranski P, et al., Tumor-specific Th17-polarized cells eradicate large established melanoma. Blood. 2008 Jul 15; 112(2):362-73; and Martin-Orozco N, et al., T helper 17 cells promote cytotoxic T cell activation in tumor immunity. Immunity. 2009 Nov. 20; 31(5):787-98). Those studies involved an adoptive T cell transfer (ACT) therapy approach, which takes advantage of CD4⁺ T cells that express a TCR recognizing tyrosinase tumor antigen. Exploitation of the TCR leads to rapid expansion of Th17 populations to large numbers ex vivo for reinfusion into the autologous tumor-bearing hosts.

[0847] In certain embodiments, ACT may include autologous iPSC-based vaccines, such as irradiated iPSCs in autologous anti-tumor vaccines (see e.g., Kooreman, Nigel G. et al., Autologous iPSC-Based Vaccines Elicit Anti-tumor Responses In Vivo, Cell Stem Cell 22, 1-13, 2018, doi.org/10.1016/j.stem.2018.01.016).

[0848] Unlike T-cell receptors (TCRs) that are MHC restricted, CARs can potentially bind any cell surface-expressed antigen and can thus be more universally used to treat patients (see Irving et al., Engineering Chimeric Antigen Receptor T-Cells for Racing in Solid Tumors: Don't Forget the Fuel, Front. Immunol., 3 Apr. 2017, doi.org/10.3389/fimmu.2017.00267). In certain embodiments, in the absence of endogenous T-cell infiltrate (e.g., due to aberrant antigen processing and presentation), which precludes the use of TIL therapy and immune checkpoint blockade, the transfer of CAR T-cells may be used to treat patients (see, e.g., Hinrichs C S, Rosenberg S A. Exploiting the curative potential of adoptive T-cell therapy for cancer. Immunol Rev (2014) 257(1):56-71. doi:10.1111/imr.12132).

[0849] Approaches such as the foregoing may be adapted to provide methods of treating and/or increasing survival of a subject having a disease, such as a neoplasia, for example by administering an effective amount of an immunoresponsive cell comprising an antigen recognizing receptor that binds a selected antigen, wherein the binding activates the immunoresponsive cell, thereby treating or preventing the disease (such as a neoplasia, a pathogen infection, an autoimmune disorder, or an allogeneic transplant reaction).

[0850] In certain embodiments, the treatment can be administered after lymphodepleting pretreatment in the form of chemotherapy (typically a combination of cyclophosphamide and fludarabine) or radiation therapy. Initial studies in ACT had short lived responses and the transferred cells did not persist in vivo for very long (Houot et al., T-cell-based immunotherapy: adoptive cell transfer and checkpoint inhibition. Cancer Immunol Res (2015) 3(10):1115-22; and Kamta et al., Advancing Cancer Therapy with Present and Emerging Immuno-Oncology Approaches. Front. Oncol. (2017) 7:64). Immune suppressor cells like Tregs and MDSCs may attenuate the activity of transferred cells by outcompeting them for the necessary cytokines. Not being bound by a theory lymphodepleting pretreatment may eliminate the suppressor cells allowing the TILs to persist.

[0851] In one embodiment, the treatment can be administrated into patients undergoing an immunosuppressive treatment (e.g., glucocorticoid treatment). The cells or population of cells, may be made resistant to at least one immunosuppressive agent due to the inactivation of a gene encoding a receptor for such immunosuppressive agent. In certain embodiments, the immunosuppressive treatment provides for the selection and expansion of the immunoresponsive T cells within the patient.

[0852] In certain embodiments, the treatment can be administered before primary treatment (e.g., surgery or radiation therapy) to shrink a tumor before the primary treatment. In another embodiment, the treatment can be administered after primary treatment to remove any remaining cancer cells.

[0853] In certain embodiments, immunometabolic barriers can be targeted therapeutically prior to and/or during ACT to enhance responses to ACT or CAR T-cell therapy and to support endogenous immunity (see, e.g., Irving et al., Engineering Chimeric Antigen Receptor T-Cells for Racing in Solid Tumors: Don't Forget the Fuel, Front. Immunol., 3 Apr. 2017, doi.org/10.3389/fimmu.2017.00267).

[0854] The administration of cells or population of cells, such as immune system cells or cell populations, such as more particularly immunoresponsive cells or cell populations, as disclosed herein may be carried out in any convenient manner, including by aerosol inhalation, injection, ingestion, transfusion, implantation or transplantation. The cells or population of cells may be administered to a patient subcutaneously, intradermally, intratumorally, intranodally, intramedullary, intramuscularly, intrathecally, by intravenous or intralymphatic injection, or intraperitoneally. In some embodiments, the disclosed CARs may be delivered or administered into a cavity formed by the resection of tumor tissue (i.e. intracavity delivery) or directly into a tumor prior to resection (intratumoral delivery). In one embodiment, the cell compositions of the present invention are preferably administered by intravenous injection.

[0855] The administration of the cells or population of cells can consist of the administration of 10⁴-10⁹ cells per kg body weight, preferably 10⁵ to 10⁶ cells/kg body weight including all integer values of cell numbers within those ranges. Dosing in CART cell therapies may for example involve administration of from 10⁶ to 10⁹ cells/kg, with or without a course of lymphodepletion, for example with cyclophosphamide. The cells or population of cells can be administrated in one or more doses. In another embodiment, the effective amount of cells are administrated as a single dose. In another embodiment, the effective amount of cells are administrated as more than one dose over a period time. Timing of administration is within the judgment of managing physician and depends on the clinical condition of the patient. The cells or population of cells may be obtained from any source, such as a blood bank or a donor. While individual needs vary, determination of optimal ranges of effective amounts of a given cell type for a particular disease or conditions are within the skill of one in the art. An effective amount means an amount which provides a therapeutic or prophylactic benefit. The dosage administrated will be dependent upon the age, health and weight of the recipient, kind of concurrent treatment, if any, frequency of treatment and the nature of the effect desired.

[0856] In another embodiment, the effective amount of cells or composition comprising those cells are administrated parenterally. The administration can be an intravenous administration. The administration can be directly done by injection within a tumor.

[0857] To guard against possible adverse reactions, engineered immunoresponsive cells may be equipped with a transgenic safety switch, in the form of a transgene that renders the cells vulnerable to exposure to a specific signal. For example, the herpes simplex viral thymidine kinase (TK) gene may be used in this way, for example by introduction into allogeneic T lymphocytes used as donor lymphocyte infusions following stem cell transplantation (Greco, et al., Improving the safety of cell therapy with the TK-suicide gene. Front. Pharmacol. 2015; 6: 95). In such cells, administration of a nucleoside prodrug such as ganciclovir or acyclovir causes cell death. Alternative safety switch constructs include inducible caspase 9, for example triggered by administration of a small-molecule dimerizer that brings together two nonfunctional icasp9 molecules to form the active enzyme. A wide variety of alternative approaches to implementing cellular proliferation controls have been described (see U.S. Patent Publication No. 20130071414; PCT Patent Publication WO2011146862; PCT Patent Publication WO2014011987; PCT Patent Publication WO2013040371; Zhou et al. BLOOD, 2014, 123/25:3895-3905; Di Stasi et al., The New England Journal of Medicine 2011; 365:1673-1683; Sadelain M, The New England Journal of Medicine 2011; 365:1735-173; Ramos et al., Stem Cells 28(6):1107-15 (2010)).

[0858] In a further refinement of adoptive therapies, genome editing may be used to tailor immunoresponsive cells to alternative implementations, for example providing edited CAR T cells (see Poirot et al., 2015, Multiplex genome edited T-cell manufacturing platform for “off-the-shelf”adoptive T-cell immunotherapies, Cancer Res 75 (18): 3853; Ren et al., 2017, Multiplex genome editing to generate universal CAR T cells resistant to PD1 inhibition, Clin Cancer Res. 2017 May 1; 23(9):2255-2266. doi: 10.1158/1078-0432.CCR-16-1300. Epub 2016 Nov. 4; Qasim et al., 2017, Molecular remission of infant B-ALL after infusion of universal TALEN gene-edited CAR T cells, Sci Transl Med. 2017 Jan. 25; 9(374); Legut, et al., 2018, CRISPR-mediated TCR replacement generates superior anticancer transgenic T cells. Blood, 131(3), 311-322; and Georgiadis et al., Long Terminal Repeat CRISPR-CAR-Coupled “Universal” T Cells Mediate Potent Anti-leukemic Effects, Molecular Therapy, In Press, Corrected Proof, Available online 6 Mar. 2018). Cells may be edited using any CRISPR system and method of use thereof as described herein. CRISPR systems may be delivered to an immune cell by any method described herein. In preferred embodiments, cells are edited ex vivo and transferred to a subject in need thereof. Immunoresponsive cells, CAR T cells or any cells used for adoptive cell transfer may be edited. Editing may be performed for example to insert or knock-in an exogenous gene, such as an exogenous gene encoding a CAR or a TCR, at a preselected locus in a cell (e.g. TRAC locus); to eliminate potential alloreactive T-cell receptors (TCR) or to prevent inappropriate pairing between endogenous and exogenous TCR chains, such as to knock-out or knock-down expression of an endogenous TCR in a cell; to disrupt the target of a chemotherapeutic agent in a cell; to block an immune checkpoint, such as to knock-out or knock-down expression of an immune checkpoint protein or receptor in a cell; to knock-out or knock-down expression of other gene or genes in a cell, the reduced expression or lack of expression of which can enhance the efficacy of adoptive therapies using the cell; to knock-out or knock-down expression of an endogenous gene in a cell, said endogenous gene encoding an antigen targeted by an exogenous CAR or TCR; to knock-out or knock-down expression of one or more MHC constituent proteins in a cell; to activate a T cell; to modulate cells such that the cells are resistant to exhaustion or dysfunction; and/or increase the differentiation and/or proliferation of functionally exhausted or dysfunctional CD8+ T-cells (see PCT Patent Publications: WO2013176915, WO2014059173, WO2014172606, WO2014184744, and WO2014191128).

[0859] In certain embodiments, editing may result in inactivation of a gene. By inactivating a gene, it is intended that the gene of interest is not expressed in a functional protein form. In a particular embodiment, the CRISPR system specifically catalyzes cleavage in one targeted gene thereby inactivating said targeted gene. The nucleic acid strand breaks caused are commonly repaired through the distinct mechanisms of homologous recombination or non-homologous end joining (NHEJ). However, NHEJ is an imperfect repair process that often results in changes to the DNA sequence at the site of the cleavage. Repair via non-homologous end joining (NHEJ) often results in small insertions or deletions (Indel) and can be used for the creation of specific gene knockouts. Cells in which a cleavage induced mutagenesis event has occurred can be identified and/or selected by well-known methods in the art. In certain embodiments, homology directed repair (HDR) is used to concurrently inactivate a gene (e.g., TRAC) and insert an endogenous TCR or CAR into the inactivated locus.

[0860] Hence, in certain embodiments, editing of cells (such as by CRISPR/Cas), particularly cells intended for adoptive cell therapies, more particularly immunoresponsive cells such as T cells, may be performed to insert or knock-in an exogenous gene, such as an exogenous gene encoding a CAR or a TCR, at a preselected locus in a cell. Conventionally, nucleic acid molecules encoding CARs or TCRs are transfected or transduced to cells using randomly integrating vectors, which, depending on the site of integration, may lead to clonal expansion, oncogenic transformation, variegated transgene expression and/or transcriptional silencing of the transgene. Directing of transgene(s) to a specific locus in a cell can minimize or avoid such risks and advantageously provide for uniform expression of the transgene(s) by the cells. Without limitation, suitable ‘safe harbor’ loci for directed transgene integration include CCR5 or AAVS1. Homology-directed repair (HDR) strategies are known and described elsewhere in this specification allowing to insert transgenes into desired loci (e.g., TRAC locus).

[0861] Further suitable loci for insertion of transgenes, in particular CAR or exogenous TCR transgenes, include without limitation loci comprising genes coding for constituents of endogenous T-cell receptor, such as T-cell receptor alpha locus (TRA) or T-cell receptor beta locus (TRB), for example T-cell receptor alpha constant (TRAC) locus, T-cell receptor beta constant 1 (TRBC1) locus or T-cell receptor beta constant 2 (TRBC1) locus. Advantageously, insertion of a transgene into such locus can simultaneously achieve expression of the transgene, potentially controlled by the endogenous promoter, and knock-out expression of the endogenous TCR. This approach has been exemplified in Eyquem et al., (2017) Nature 543: 113-117, wherein the authors used CRISPR/Cas9 gene editing to knock-in a DNA molecule encoding a CD19-specific CAR into the TRAC locus downstream of the endogenous promoter; the CAR-T cells obtained by CRISPR were significantly superior in terms of reduced tonic CAR signaling and exhaustion.

[0862] T cell receptors (TCR) are cell surface receptors that participate in the activation of T cells in response to the presentation of antigen. The TCR is generally made from two chains, α and β, which assemble to form a heterodimer and associates with the CD3-transducing subunits to form the T cell receptor complex present on the cell surface. Each α and β chain of the TCR consists of an immunoglobulin-like N-terminal variable (V) and constant (C) region, a hydrophobic transmembrane domain, and a short cytoplasmic region. As for immunoglobulin molecules, the variable region of the α and β chains are generated by V(D)J recombination, creating a large diversity of antigen specificities within the population of T cells. However, in contrast to immunoglobulins that recognize intact antigen, T cells are activated by processed peptide fragments in association with an MHC molecule, introducing an extra dimension to antigen recognition by T cells, known as MHC restriction. Recognition of MHC disparities between the donor and recipient through the T cell receptor leads to T cell proliferation and the potential development of graft versus host disease (GVHD). The inactivation of TCRα or TCRβ can result in the elimination of the TCR from the surface of T cells preventing recognition of alloantigen and thus GVHD. However, TCR disruption generally results in the elimination of the CD3 signaling component and alters the means of further T cell expansion.

[0863] Hence, in certain embodiments, editing of cells (such as by CRISPR/Cas), particularly cells intended for adoptive cell therapies, more particularly immunoresponsive cells such as T cells, may be performed to knock-out or knock-down expression of an endogenous TCR in a cell. For example, NHEJ-based or HDR-based gene editing approaches can be employed to disrupt the endogenous TCR alpha and/or beta chain genes. For example, gene editing system or systems, such as CRISPR/Cas system or systems, can be designed to target a sequence found within the TCR beta chain conserved between the beta 1 and beta 2 constant region genes (TRBC1 and TRBC2) and/or to target the constant region of the TCR alpha chain (TRAC) gene.

[0864] Allogeneic cells are rapidly rejected by the host immune system. It has been demonstrated that, allogeneic leukocytes present in non-irradiated blood products will persist for no more than 5 to 6 days (Boni, Muranski et al. 2008 Blood 1; 112(12):4746-54). Thus, to prevent rejection of allogeneic cells, the host's immune system usually has to be suppressed to some extent. However, in the case of adoptive cell transfer the use of immunosuppressive drugs also have a detrimental effect on the introduced therapeutic T cells. Therefore, to effectively use an adoptive immunotherapy approach in these conditions, the introduced cells would need to be resistant to the immunosuppressive treatment. Thus, in a particular embodiment, the present invention further comprises a step of modifying T cells to make them resistant to an immunosuppressive agent, preferably by inactivating at least one gene encoding a target for an immunosuppressive agent. An immunosuppressive agent is an agent that suppresses immune function by one of several mechanisms of action. An immunosuppressive agent can be, but is not limited to a calcineurin inhibitor, a target of rapamycin, an interleukin-2 receptor α-chain blocker, an inhibitor of inosine monophosphate dehydrogenase, an inhibitor of dihydrofolic acid reductase, a corticosteroid or an immunosuppressive antimetabolite. The present invention allows conferring immunosuppressive resistance to T cells for immunotherapy by inactivating the target of the immunosuppressive agent in T cells. As non-limiting examples, targets for an immunosuppressive agent can be a receptor for an immunosuppressive agent such as: CD52, glucocorticoid receptor (GR), a FKBP family gene member and a cyclophilin family gene member.

[0865] In certain embodiments, editing of cells (such as by CRISPR/Cas), particularly cells intended for adoptive cell therapies, more particularly immunoresponsive cells such as T cells, may be performed to block an immune checkpoint, such as to knock-out or knock-down expression of an immune checkpoint protein or receptor in a cell. Immune checkpoints are inhibitory pathways that slow down or stop immune reactions and prevent excessive tissue damage from uncontrolled activity of immune cells. In certain embodiments, the immune checkpoint targeted is the programmed death-1 (PD-1 or CD279) gene (PDCD1). In other embodiments, the immune checkpoint targeted is cytotoxic T-lymphocyte-associated antigen (CTLA-4). In additional embodiments, the immune checkpoint targeted is another member of the CD28 and CTLA4 Ig superfamily such as BTLA, LAG3, ICOS, PDL1 or KIR. In further additional embodiments, the immune checkpoint targeted is a member of the TNFR superfamily such as CD40, OX40, CD137, GITR, CD27 or TIM-3.

[0866] Additional immune checkpoints include Src homology 2 domain-containing protein tyrosine phosphatase 1 (SHP-1) (Watson H A, et al., SHP-1: the next checkpoint target for cancer immunotherapy? Biochem Soc Trans. 2016 Apr 15; 44(2):356-62). SHP-1 is a widely expressed inhibitory protein tyrosine phosphatase (PTP). In T-cells, it is a negative regulator of antigen-dependent activation and proliferation. It is a cytosolic protein, and therefore not amenable to antibody-mediated therapies, but its role in activation and proliferation makes it an attractive target for genetic manipulation in adoptive transfer strategies, such as chimeric antigen receptor (CAR) T cells. Immune checkpoints may also include T cell immunoreceptor with Ig and ITIM domains (TIGIT/Vstm3/WUCAM/VSIG9) and VISTA (Le Mercier I, et al., (2015) Beyond CTLA-4 and PD-1, the generation Z of negative checkpoint regulators. Front. Immunol. 6:418).

[0867] WO2014172606 relates to the use of MTI and/or MT2 inhibitors to increase proliferation and/or activity of exhausted CD8+ T-cells and to decrease CD8+ T-cell exhaustion (e.g., decrease functionally exhausted or unresponsive CD8+ immune cells). In certain embodiments, metallothioneins are targeted by gene editing in adoptively transferred T cells.

[0868] In certain embodiments, targets of gene editing may be at least one targeted locus involved in the expression of an immune checkpoint protein. Such targets may include, but are not limited to CTLA4, PPP2CA, PPP2CB, PTPN6, PTPN22, PDCD1, ICOS (CD278), PDL1, KIR, LAG3, HAVCR2, BTLA, CD160, TIGIT, CD96, CRTAM, LAIR1, SIGLEC7, SIGLEC9, CD244 (2B4), TNFRSF10B, TNFRSF10A, CASP8, CASP10, CASP3, CASP6, CASP7, FADD, FAS, TGFBRII, TGFRBRI, SMAD2, SMAD3, SMAD4, SMAD10, SKI, SKIL, TGIF1, IL10RA, IL10RB, HMOX2, IL6R, IL6ST, EIF2AK4, CSK, PAG1, SIT1, FOXP3, PRDM1, BATF, VISTA, GUCY1A2, GUCY1A3, GUCY1B2, GUCY1B3, MT1, MT2, CD40, OX40, CD137, GITR, CD27, SHP-1, TIM-3, CEACAM-1, CEACAM-3, or CEACAM-5. In preferred embodiments, the gene locus involved in the expression of PD-1 or CTLA-4 genes is targeted. In other preferred embodiments, combinations of genes are targeted, such as but not limited to PD-1 and TIGIT.

[0869] By means of an example and without limitation, WO2016196388 concerns an engineered T cell comprising (a) a genetically engineered antigen receptor that specifically binds to an antigen, which receptor may be a CAR; and (b) a disrupted gene encoding a PD-L1, an agent for disruption of a gene encoding a PD-L1, and/or disruption of a gene encoding PD-L1, wherein the disruption of the gene may be mediated by a gene editing nuclease, a zinc finger nuclease (ZFN), CRISPR/Cas9 and/or TALEN. WO2015142675 relates to immune effector cells comprising a CAR in combination with an agent (such as CRISPR, TALEN or ZFN) that increases the efficacy of the immune effector cells in the treatment of cancer, wherein the agent may inhibit an immune inhibitory molecule, such as PD1, PD-L1, CTLA-4, TIM-3, LAG-3, VISTA, BTLA, TIGIT, LAIR1, CD160, 2B4, TGFR beta, CEACAM-1, CEACAM-3, or CEACAM-5. Ren et al., (2017) Clin Cancer Res 23 (9) 2255-2266 performed lentiviral delivery of CAR and electro-transfer of Cas mRNA and gRNAs targeting endogenous TCR, β-2 microglobulin (B2M) and PD1 simultaneously, to generate gene-disrupted allogeneic CART cells deficient of TCR, HLA class I molecule and PD1.

[0870] In certain embodiments, cells may be engineered to express a CAR, wherein expression and/or function of methylcytosine dioxygenase genes (TET1, TET2 and/or TET3) in the cells has been reduced or eliminated, such as by CRISPR, ZNF or TALEN (for example, as described in W0201704916).

[0871] In certain embodiments, editing of cells (such as by CRISPR/Cas), particularly cells intended for adoptive cell therapies, more particularly immunoresponsive cells such as T cells, may be performed to knock-out or knock-down expression of an endogenous gene in a cell, said endogenous gene encoding an antigen targeted by an exogenous CAR or TCR, thereby reducing the likelihood of targeting of the engineered cells. In certain embodiments, the targeted antigen may be one or more antigen selected from the group consisting of CD38, CD138, CS-1, CD33, CD26, CD30, CD53, CD92, CD100, CD148, CD150, CD200, CD261, CD262, CD362, human telomerase reverse transcriptase (hTERT), survivin, mouse double minute 2 homolog (MDM2), cytochrome P450 1B1 (CYP1B), HER2/neu, Wilms' tumor gene 1 (WT1), livin, alphafetoprotein (AFP), carcinoembryonic antigen (CEA), mucin 16 (MUC16), MUC1, prostate-specific membrane antigen (PSMA), p53, cyclin (D1), B cell maturation antigen (BCMA), transmembrane activator and CAML Interactor (TACI), and B-cell activating factor receptor (BAFF-R) (for example, as described in WO2016011210 and WO2017011804).

[0872] In certain embodiments, editing of cells (such as by CRISPR/Cas), particularly cells intended for adoptive cell therapies, more particularly immunoresponsive cells such as T cells, may be performed to knock-out or knock-down expression of one or more MHC constituent proteins, such as one or more HLA proteins and/or beta-2 microglobulin (B2M), in a cell, whereby rejection of non-autologous (e.g., allogeneic) cells by the recipient's immune system can be reduced or avoided. In preferred embodiments, one or more HLA class I proteins, such as HLA-A, B and/or C, and/or B2M may be knocked-out or knocked-down. Preferably, B2M may be knocked-out or knocked-down. By means of an example, Ren et al., (2017) Clin Cancer Res 23 (9) 2255-2266 performed lentiviral delivery of CAR and electro-transfer of Cas9 mRNA and gRNAs targeting endogenous TCR, β-2 microglobulin (B2M) and PD1 simultaneously, to generate gene-disrupted allogeneic CAR T cells deficient of TCR, HLA class I molecule and PD1.

[0873] In other embodiments, at least two genes are edited. Pairs of genes may include, but are not limited to PD1 and TCRα, PD1 and TCRβ, CTLA-4 and TCRα, CTLA-4 and TCRβ, LAG3 and TCRα, LAG3 and TCRβ, Tim3 and TCRα, Tim3 and TCRβ, BTLA and TCRα, BTLA and TCRβ, BY55 and TCRα, BY55 and TCRβ, TIGIT and TCRα, TIGIT and TCRβ, B7H5 and TCRα, B7H5 and TCRβ, LAIR1 and TCRα, LAIR1 and TCRβ, SIGLEC10 and TCRα, SIGLEC10 and TCRβ, 2B4 and TCRα, 2B4 and TCRβ, B2M and TCRα, B2M and TCRβ.

[0874] In certain embodiments, a cell may be multiplied edited (multiplex genome editing) as taught herein to (1) knock-out or knock-down expression of an endogenous TCR (for example, TRBC1, TRBC2 and/or TRAC), (2) knock-out or knock-down expression of an immune checkpoint protein or receptor (for example PD1, PD-L 1 and/or CTLA4); and (3) knock-out or knock-down expression of one or more MEW constituent proteins (for example, HLA-A, B and/or C, and/or B2M, preferably B2M).

[0875] Whether prior to or after genetic modification of the T cells, the T cells can be activated and expanded generally using methods as described, for example, in U.S. Pat. Nos. 6,352,694; 6,534,055; 6,905,680; 5,858,358; 6,887,466; 6,905,681; 7,144,575; 7,232,566; 7,175,843; 5,883,223; 6,905,874; 6,797,514; 6,867,041; and 7,572,631. T cells can be expanded in vitro or in vivo.

[0876] Immune cells may be obtained using any method known in the art. In one embodiment, allogenic T cells may be obtained from healthy subjects. In one embodiment T cells that have infiltrated a tumor are isolated. T cells may be removed during surgery. T cells may be isolated after removal of tumor tissue by biopsy. T cells may be isolated by any means known in the art. In one embodiment, T cells are obtained by apheresis. In one embodiment, the method may comprise obtaining a bulk population of T cells from a tumor sample by any suitable method known in the art. For example, a bulk population of T cells can be obtained from a tumor sample by dissociating the tumor sample into a cell suspension from which specific cell populations can be selected. Suitable methods of obtaining a bulk population of T cells may include, but are not limited to, any one or more of mechanically dissociating (e.g., mincing) the tumor, enzymatically dissociating (e.g., digesting) the tumor, and aspiration (e.g., as with a needle).

[0877] The bulk population of T cells obtained from a tumor sample may comprise any suitable type of T cell. Preferably, the bulk population of T cells obtained from a tumor sample comprises tumor infiltrating lymphocytes (TILs).

[0878] The tumor sample may be obtained from any mammal. Unless stated otherwise, as used herein, the term “mammal” refers to any mammal including, but not limited to, mammals of the order Logomorpha, such as rabbits; the order Carnivora, including Felines (cats) and Canines (dogs); the order Artiodactyla, including Bovines (cows) and Swines (pigs); or of the order Perssodactyla, including Equines (horses). The mammals may be non-human primates, e.g., of the order Primates, Ceboids, or Simoids (monkeys) or of the order Anthropoids (humans and apes). In some embodiments, the mammal may be a mammal of the order Rodentia, such as mice and hamsters. Preferably, the mammal is a non-human primate or a human. An especially preferred mammal is the human.

[0879] T cells can be obtained from a number of sources, including peripheral blood mononuclear cells (PBMC), bone marrow, lymph node tissue, spleen tissue, and tumors. In certain embodiments of the present invention, T cells can be obtained from a unit of blood collected from a subject using any number of techniques known to the skilled artisan, such as Ficoll separation. In one preferred embodiment, cells from the circulating blood of an individual are obtained by apheresis or leukapheresis. The apheresis product typically contains lymphocytes, including T cells, monocytes, granulocytes, B cells, other nucleated white blood cells, red blood cells, and platelets. In one embodiment, the cells collected by apheresis may be washed to remove the plasma fraction and to place the cells in an appropriate buffer or media for subsequent processing steps. In one embodiment of the invention, the cells are washed with phosphate buffered saline (PBS). In an alternative embodiment, the wash solution lacks calcium and may lack magnesium or may lack many if not all divalent cations. Initial activation steps in the absence of calcium lead to magnified activation. As those of ordinary skill in the art would readily appreciate a washing step may be accomplished by methods known to those in the art, such as by using a semi-automated “flow-through” centrifuge (for example, the Cobe 2991 cell processor) according to the manufacturer's instructions. After washing, the cells may be resuspended in a variety of biocompatible buffers, such as, for example, Ca-free, Mg-free PBS. Alternatively, the undesirable components of the apheresis sample may be removed and the cells directly resuspended in culture media.

[0880] In another embodiment, T cells are isolated from peripheral blood lymphocytes by lysing the red blood cells and depleting the monocytes, for example, by centrifugation through a PERCOLL™ gradient. A specific subpopulation of T cells, such as CD28+, CD4+, CDC, CD45RA+, and CD45RO+ T cells, can be further isolated by positive or negative selection techniques. For example, in one preferred embodiment, T cells are isolated by incubation with anti-CD³/anti-CD28 (i.e., 3×28)-conjugated beads, such as DYNABEADS® M-450 CD3/CD28 T, or XCYTE DYNABEADS™ for a time period sufficient for positive selection of the desired T cells. In one embodiment, the time period is about 30 minutes. In a further embodiment, the time period ranges from 30 minutes to 36 hours or longer and all integer values there between. In a further embodiment, the time period is at least 1, 2, 3, 4, 5, or 6 hours. In yet another preferred embodiment, the time period is 10 to 24 hours. In one preferred embodiment, the incubation time period is 24 hours. For isolation of T cells from patients with leukemia, use of longer incubation times, such as 24 hours, can increase cell yield. Longer incubation times may be used to isolate T cells in any situation where there are few T cells as compared to other cell types, such in isolating tumor infiltrating lymphocytes (TIL) from tumor tissue or from immunocompromised individuals. Further, use of longer incubation times can increase the efficiency of capture of CD8+ T cells.

[0881] Enrichment of a T cell population by negative selection can be accomplished with a combination of antibodies directed to surface markers unique to the negatively selected cells. A preferred method is cell sorting and/or selection via negative magnetic immunoadherence or flow cytometry that uses a cocktail of monoclonal antibodies directed to cell surface markers present on the cells negatively selected. For example, to enrich for CD4+ cells by negative selection, a monoclonal antibody cocktail typically includes antibodies to CD14, CD20, CD11b, CD16, HLA-DR, and CD8.

[0882] Further, monocyte populations (CD14+ cells) may be depleted from blood preparations by a variety of methodologies, including anti-CD14 coated beads or columns, or utilization of the phagocytotic activity of these cells to facilitate removal. Accordingly, in one embodiment, the invention uses paramagnetic particles of a size sufficient to be engulfed by phagocytotic monocytes. In certain embodiments, the paramagnetic particles are commercially available beads, for example, those produced by Life Technologies under the trade name DynabeadsTM. In one embodiment, other non-specific cells are removed by coating the paramagnetic particles with “irrelevant” proteins (e.g., serum proteins or antibodies). Irrelevant proteins and antibodies include those proteins and antibodies or fragments thereof that do not specifically target the T cells to be isolated. In certain embodiments, the irrelevant beads include beads coated with sheep anti-mouse antibodies, goat anti-mouse antibodies, and human serum albumin.

[0883] In brief, such depletion of monocytes is performed by preincubating T cells isolated from whole blood, apheresed peripheral blood, or tumors with one or more varieties of irrelevant or non-antibody coupled paramagnetic particles at any amount that allows for removal of monocytes (approximately a 20:1 bead:cell ratio) for about 30 minutes to 2 hours at 22 to 37 degrees C., followed by magnetic removal of cells which have attached to or engulfed the paramagnetic particles. Such separation can be performed using standard methods available in the art. For example, any magnetic separation methodology may be used including a variety of which are commercially available, (e.g., DYNAL® Magnetic Particle Concentrator (DYNAL MPC®)). Assurance of requisite depletion can be monitored by a variety of methodologies known to those of ordinary skill in the art, including flow cytometric analysis of CD14 positive cells, before and after depletion.

[0884] For isolation of a desired population of cells by positive or negative selection, the concentration of cells and surface (e.g., particles such as beads) can be varied. In certain embodiments, it may be desirable to significantly decrease the volume in which beads and cells are mixed together (i.e., increase the concentration of cells), to ensure maximum contact of cells and beads. For example, in one embodiment, a concentration of 2 billion cells/ml is used. In one embodiment, a concentration of 1 billion cells/ml is used. In a further embodiment, greater than 100 million cells/ml is used. In a further embodiment, a concentration of cells of 10, 15, 20, 25, 30, 35, 40, 45, or 50 million cells/ml is used. In yet another embodiment, a concentration of cells from 75, 80, 85, 90, 95, or 100 million cells/ml is used. In further embodiments, concentrations of 125 or 150 million cells/ml can be used. Using high concentrations can result in increased cell yield, cell activation, and cell expansion. Further, use of high cell concentrations allows more efficient capture of cells that may weakly express target antigens of interest, such as CD28-negative T cells, or from samples where there are many tumor cells present (i.e., leukemic blood, tumor tissue, etc.). Such populations of cells may have therapeutic value and would be desirable to obtain. For example, using high concentration of cells allows more efficient selection of CD8+ T cells that normally have weaker CD28 expression.

[0885] In a related embodiment, it may be desirable to use lower concentrations of cells. By significantly diluting the mixture of T cells and surface (e.g., particles such as beads), interactions between the particles and cells is minimized. This selects for cells that express high amounts of desired antigens to be bound to the particles. For example, CD4+ T cells express higher levels of CD28 and are more efficiently captured than CD8+ T cells in dilute concentrations. In one embodiment, the concentration of cells used is 5×10⁶/ml. In other embodiments, the concentration used can be from about 1×10⁵/ml to 1×10⁶/ml, and any integer value in between.

[0886] T cells can also be frozen. Wishing not to be bound by theory, the freeze and subsequent thaw step provides a more uniform product by removing granulocytes and to some extent monocytes in the cell population. After a washing step to remove plasma and platelets, the cells may be suspended in a freezing solution. While many freezing solutions and parameters are known in the art and will be useful in this context, one method involves using PBS containing 20% DMSO and 8% human serum albumin, or other suitable cell freezing media, the cells then are frozen to ˜80° C. at a rate of 1° per minute and stored in the vapor phase of a liquid nitrogen storage tank. Other methods of controlled freezing may be used as well as uncontrolled freezing immediately at ˜20° C. or in liquid nitrogen.

[0887] T cells for use in the present invention may also be antigen-specific T cells. For example, tumor-specific T cells can be used. In certain embodiments, antigen-specific T cells can be isolated from a patient of interest, such as a patient afflicted with a cancer or an infectious disease. In one embodiment, neoepitopes are determined for a subject and T cells specific to these antigens are isolated. Antigen-specific cells for use in expansion may also be generated in vitro using any number of methods known in the art, for example, as described in U.S. Patent Publication No. US 20040224402 entitled, Generation and Isolation of Antigen-Specific T Cells, or in U.S. Pat. No. 6,040,177. Antigen-specific cells for use in the present invention may also be generated using any number of methods known in the art, for example, as described in Current Protocols in Immunology, or Current Protocols in Cell Biology, both published by John Wiley & Sons, Inc., Boston, Mass.

[0888] In a related embodiment, it may be desirable to sort or otherwise positively select (e.g. via magnetic selection) the antigen specific cells prior to or following one or two rounds of expansion. Sorting or positively selecting antigen-specific cells can be carried out using peptide-WIC tetramers (Altman, et al., Science. 1996 Oct. 4; 274(5284):94-6). In another embodiment, the adaptable tetramer technology approach is used (Andersen et al., 2012 Nat Protoc. 7:891-902). Tetramers are limited by the need to utilize predicted binding peptides based on prior hypotheses, and the restriction to specific HLAs. Peptide-MHC tetramers can be generated using techniques known in the art and can be made with any MHC molecule of interest and any antigen of interest as described herein. Specific epitopes to be used in this context can be identified using numerous assays known in the art. For example, the ability of a polypeptide to bind to MHC class I may be evaluated indirectly by monitoring the ability to promote incorporation of ¹²⁵I labeled β2-microglobulin (β2m) into WIC class I/β2m/peptide heterotrimeric complexes (see Parker et al., J. Immunol. 152:163, 1994).

[0889] In one embodiment cells are directly labeled with an epitope-specific reagent for isolation by flow cytometry followed by characterization of phenotype and TCRs. In one embodiment, T cells are isolated by contacting with T cell specific antibodies. Sorting of antigen-specific T cells, or generally any cells of the present invention, can be carried out using any of a variety of commercially available cell sorters, including, but not limited to, MoFlo sorter (DakoCytomation, Fort Collins, Colo.), FACSAria™, FACSArray™, FACSVantage™, BD™ LSR II, and FACSCalibur™ (BD Biosciences, San Jose, Calif.).

[0890] In a preferred embodiment, the method comprises selecting cells that also express CD3. The method may comprise specifically selecting the cells in any suitable manner. Preferably, the selecting is carried out using flow cytometry. The flow cytometry may be carried out using any suitable method known in the art. The flow cytometry may employ any suitable antibodies and stains. Preferably, the antibody is chosen such that it specifically recognizes and binds to the particular biomarker being selected. For example, the specific selection of CD3, CD8, TIM-3, LAG-3, 4-1BB, or PD-1 may be carried out using anti-CD3, anti-CD8, anti-TIM-3, anti-LAG-3, anti-4-1BB, or anti-PD-1 antibodies, respectively. The antibody or antibodies may be conjugated to a bead (e.g., a magnetic bead) or to a fluorochrome. Preferably, the flow cytometry is fluorescence-activated cell sorting (FACS). TCRs expressed on T cells can be selected based on reactivity to autologous tumors. Additionally, T cells that are reactive to tumors can be selected for based on markers using the methods described in patent publication Nos. WO2014133567 and WO2014133568, herein incorporated by reference in their entirety. Additionally, activated T cells can be selected for based on surface expression of CD107a.

[0891] In one embodiment of the invention, the method further comprises expanding the numbers of T cells in the enriched cell population. Such methods are described in U.S. Pat. No. 8,637,307 and is herein incorporated by reference in its entirety. The numbers of T cells may be increased at least about 3-fold (or 4-, 5-, 6-, 7-, 8-, or 9-fold), more preferably at least about 10-fold (or 20-, 30-, 40-, 50-, 60-, 70-, 80-, or 90-fold), more preferably at least about 100-fold, more preferably at least about 1,000 fold, or most preferably at least about 100,000-fold. The numbers of T cells may be expanded using any suitable method known in the art. Exemplary methods of expanding the numbers of cells are described in patent publication No. WO 2003057171, U.S. Pat. No. 8,034,334, and U.S. Patent Application Publication No. 2012/0244133, each of which is incorporated herein by reference.

[0892] In one embodiment, ex vivo T cell expansion can be performed by isolation of T cells and subsequent stimulation or activation followed by further expansion. In one embodiment of the invention, the T cells may be stimulated or activated by a single agent. In another embodiment, T cells are stimulated or activated with two agents, one that induces a primary signal and a second that is a co-stimulatory signal. Ligands useful for stimulating a single signal or stimulating a primary signal and an accessory molecule that stimulates a second signal may be used in soluble form. Ligands may be attached to the surface of a cell, to an Engineered Multivalent Signaling Platform (EMSP), or immobilized on a surface. In a preferred embodiment both primary and secondary agents are co-immobilized on a surface, for example a bead or a cell. In one embodiment, the molecule providing the primary activation signal may be a CD3 ligand, and the co-stimulatory molecule may be a CD28 ligand or 4-1BB ligand.

[0893] In certain embodiments, T cells comprising a CAR or an exogenous TCR, may be manufactured as described in WO2015120096, by a method comprising: enriching a population of lymphocytes obtained from a donor subject; stimulating the population of lymphocytes with one or more T-cell stimulating agents to produce a population of activated T cells, wherein the stimulation is performed in a closed system using serum-free culture medium; transducing the population of activated T cells with a viral vector comprising a nucleic acid molecule which encodes the CAR or TCR, using a single cycle transduction to produce a population of transduced T cells, wherein the transduction is performed in a closed system using serum-free culture medium; and expanding the population of transduced T cells for a predetermined time to produce a population of engineered T cells, wherein the expansion is performed in a closed system using serum-free culture medium. In certain embodiments, T cells comprising a CAR or an exogenous TCR, may be manufactured as described in WO2015120096, by a method comprising: obtaining a population of lymphocytes; stimulating the population of lymphocytes with one or more stimulating agents to produce a population of activated T cells, wherein the stimulation is performed in a closed system using serum-free culture medium; transducing the population of activated T cells with a viral vector comprising a nucleic acid molecule which encodes the CAR or TCR, using at least one cycle transduction to produce a population of transduced T cells, wherein the transduction is performed in a closed system using serum-free culture medium; and expanding the population of transduced T cells to produce a population of engineered T cells, wherein the expansion is performed in a closed system using serum-free culture medium. The predetermined time for expanding the population of transduced T cells may be 3 days. The time from enriching the population of lymphocytes to producing the engineered T cells may be 6 days. The closed system may be a closed bag system. Further provided is population of T cells comprising a CAR or an exogenous TCR obtainable or obtained by said method, and a pharmaceutical composition comprising such cells.

[0894] In certain embodiments, T cell maturation or differentiation in vitro may be delayed or inhibited by the method as described in WO2017070395, comprising contacting one or more T cells from a subject in need of a T cell therapy with an AKT inhibitor (such as, e.g., one or a combination of two or more AKT inhibitors disclosed in claim 8 of WO2017070395) and at least one of exogenous Interleukin-7 (IL-7) and exogenous Interleukin-15 (IL-15), wherein the resulting T cells exhibit delayed maturation or differentiation, and/or wherein the resulting T cells exhibit improved T cell function (such as, e.g., increased T cell proliferation; increased cytokine production; and/or increased cytolytic activity) relative to a T cell function of a T cell cultured in the absence of an AKT inhibitor.

[0895] In certain embodiments, a patient in need of a T cell therapy may be conditioned by a method as described in WO2016191756 comprising administering to the patient a dose of cyclophosphamide between 200 mg/m2/day and 2000 mg/m2/day and a dose of fludarabine between 20 mg/m2/day and 900 mg/m²/day.

### Kits

[0896] In one aspect, the invention provides kits containing any one or more of the elements disclosed in the above methods and compositions. In some embodiments, the kit comprises a vector system as taught herein or one or more of the components of the CRISPR-Cas system or complex as taught herein, such as crRNAs and/or Cas protein or Cas protein encoding mRNA, and instructions for using the kit. Elements may be provided individually or in combinations, and may be provided in any suitable container, such as a vial, a bottle, or a tube. In some embodiments, the kit includes instructions in one or more languages, for example in more than one language. The instructions may be specific to the applications and methods described herein. In some embodiments, a kit comprises one or more reagents for use in a process utilizing one or more of the elements described herein. Reagents may be provided in any suitable container. For example, a kit may provide one or more reaction or storage buffers. Reagents may be provided in a form that is usable in a particular assay, or in a form that requires addition of one or more other components before use (e.g., in concentrate or lyophilized form). A buffer can be any buffer, including but not limited to a sodium carbonate buffer, a sodium bicarbonate buffer, a borate buffer, a Tris buffer, a MOPS buffer, a HEPES buffer, and combinations thereof. In some embodiments, the buffer is alkaline. In some embodiments, the buffer has a pH from about 7 to about 10. In some embodiments, the kit comprises one or more oligonucleotides corresponding to a guide sequence for insertion into a vector so as to operably link the guide or crRNA sequence and a regulatory element. In some embodiments, the kit comprises a homologous recombination template polynucleotide. In some embodiments, the kit comprises one or more of the vectors and/or one or more of the polynucleotides described herein. The kit may advantageously allow to provide all elements of the systems of the invention.

[0897] The invention is further described in the following examples, which do not limit the scope of the invention described in the claims.

### EXAMPLES

### Example 1—Exemplary Type IV Cas Loci

[0898] Sequences of exemplary Type IV Cas loci are shown and direct repeat sequences in Table 1.

[0899] Nucleic acids sequences of exemplary Type IV Cas proteins are shown in SEQ ID NOs: 1-8 in the Sequence Listing herein. All loci sequences of exemplary Type IV Cas proteins are shown in SEQ ID NOs. 9-317 in the Sequence Listing herein. Complete loci sequences of exemplary Type IV Cas proteins are shown in SEQ ID NOs: 318-405 in the Sequence Listing herein.

### Determining PAM Sequences of Exemplary Type IV

[0900] PAM sequences of exemplary Type IV Cas were determined and the results are shown in FIG. 1.

### Example 2

[0901] Alignment of sequences of exemplary Type IV Cas proteins comprising HNH and DinG domains is shown in FIG. 2. FIG. 3 shows examples of loci comprising DinG and HNH sequences. The loci can have different configurations. Spacer BLAST was performed to identify PAM sequences (FIG. 4). (C/T)CN was determined as a PAM for the Type IV Cas. An exemplary Type IV Cas comprising DinG and HNH domains performed plasmid interference with 5′ (C/T)CN PAM (FIG. 5).

### Example 3— Exemplary Class 1, Type I Cas Loci

[0902] Sequences of exemplary class 1, Type I Cas loci are shown and direct repeat sequences in Table 2.

[0903] PAM sequences of exemplary Type I Cas were determined and the results are shown in FIG. 6.

[0904] Various modifications and variations of the described methods, pharmaceutical compositions, and kits of the invention will be apparent to those skilled in the art without departing from the scope and spirit of the invention. Although the invention has been described in connection with specific embodiments, it will be understood that it is capable of further modifications and that the invention as claimed should not be unduly limited to such specific embodiments. Indeed, various modifications of the described modes for carrying out the invention that are obvious to those skilled in the art are intended to be within the scope of the invention. This application is intended to cover any variations, uses, or adaptations of the invention following, in general, the principles of the invention and including such departures from the present disclosure come within known customary practice within the art to which the invention pertains and may be applied to the essential features herein before set forth.

The application's sequence listing, which the Patent Office published only in electronic form, follows.

SEQUENCE LISTING (1213 sequences)

SEQ ID NO: 1 - DNA, 31604 bp, Artificial Sequence
  Synthetic Oligonucleotide
ggagaccggcgtgcaccggctggtgcgaaagtcgccgttcgattcctcgggcggccgccacaccagcttcgccagcctttacgtgtatcccgagatcgacgattcgatcgagatcgagatcaaccccgccgacctgcgcaccgataccttccgcgcctccggcgccggcggccagcacatcaacaagaccgactcggcgatccgcatcacccatatccccaccggcatcgtcgtgcagtgccagagcgaccgctcgcagcacaggaaccgcgccgaggcgatgaccatgctgaagtcgcgcctctatgaactcgaactgcgcaagcgccaggccgaggccgacaagctcgaggccggcaagaccgacgtcggctggggccaccagattcgcagctacgtgctggacaattcccgcatcaaggatctgcgtaccaacgtcgaaatctccgcgacgcagaaggtactcgacggcgacctcgaccagttcatcgaagccagcctgaagcagggcgtttaatcccgcatccaatccaacatttccgctaccggaccaccatcatgagcgaccagccacagctacctgccgacgaaaaccgcctgattgccgagcgccgcgaaaagctcgcgcaatggcgcgccaccggcaaagccttccccaacgatttctcgcgcgaaaacttcgccggccggctcgacgaactctacagcgccaggacgcgggaggaacttgaagccgcgccgatcgaggtcaaggtcgccggccgcatcatgttgaagcgcgtcatgggcaaggccagctttgccagcatccaggacgtttccggccggatccagatctttgtcagcaacgacgtctccggcgaagaagtgcacaagcagttcaagggctgggacatgggcgacatcgtcggttgcgagggcacgctgttcaagaccaagaccggcgaattgaccgtgcactgcgccggcatccgcctgctcaccaagtcactgcgcccgctgcccgagaagttccatggccttaccgacgtcgagcagaaataccgcagccgcgaactggacctgatcaccaacgagcagacgcgtttcaccttcgtcgcccgcagccggatgatccagtcgattcgcggctacatgatgcatcacggcttcctcgaggtggaaacgccgatgatgcaccccattccgggtggcgcaaccgccaagcctttcaccacccaccacaatgcgctggacatggaactgttcctgcgcatcgcgccggaactgtatctgaagcgcctggtggtcggcggcttcgaaaaggtattcgaggtcaaccgcaacttccgcaacgaaggactcagcccgcgccacaatcccgaattcaccatgatggagttctacgaggcctataccgactaccgccgcctgatggacttcaccgagggcctgttgcgccactcggcccgcgaagcgctgggcaccgaggtgttcgagtatcagggacgccagctggacctttccaagcccttcgcccggctgaccatcgtcggcgcgattcatcactaccaccccggctacagcttcgagcaactgaacgatgccgactggctgcggcaaaagctcaaggatctgcgggtcgacctgaagtcgccgcacatggcccgcgccggactgggaacgctgcaactggcgctgttcgaagaaaccaccgaggccgaactgtgggatcccacctacatcatcgactacccggccgaggtctcgccgctggcgcgcagcagcgacacaaacccggaaatcaccgagcgcttcgagctgttcatcgtcggccgcgagatcgccaacggattttccgaactcaacgatcccgaagaccaggccgcgcgcttcatgcagcaggccaaggccaaggaagccggcgacgaggaagccatgtactacgacgccgactacatacgcgccctggaatacgggctgccgccgacgggcggctgcggcatcggcatcgaccgcctggtcatgctgctgaccaactcggcctcgatccgcgacgtcatcctgttcccgcagatgcgcccggagtgatgccggggtgatgtcatctccgctggttcccgccgaaccggcggcagccggcgatggcacgccgtattcaacaacctacgacgacgtctatcacacggctcacggcgggctggagcaggcccgccacgtgttcctcgccggcaacgatttgccggcgcgctggatcggcagcgacagcttcgtcatctgcgaaaccggcttcggcctcggcctgacttttctcgctacctggcaagcctggcgcgaatcgaaggcgcgcggccggctgcattttgtctcggtcgaaaagcatcccttccgccgcgatgacctggccgccttgctggcccgctatcccgaactggcgcccctgtcccgcgaactgctgcggcagtggccaccgctcacgccgggctttcaccgcctgcatttcgacgatggcaggctcacgctgacgctgctctttggcgacgcccaggcattgctgccgcaactggtggcaaacatcgatgcggtctatctcgacggttttgcgccgtcgaagaatccggggttatggtcgtccgctttgctcgcgacggtcacccgtctgtgccgccccaatgcgacgctggcgacctggagcgtagccggcgacttgcgccgcacactggagcatggcggctggcagttgcaacgccgccgcggctttgccgcaaagcgcgaaatgctggtcggccgccttgaaaacggcgttacctgcccgcgaagcggcgtcccaggtacgcagagcgcaccagcgccgacttctttcatggcgcagccaccgcgtgagcgccgcgccatcgtcatcggcgccgggcttgccggcaccgccatcagcgaacgactggccaatcgcggctggcacgtcgatctcttcgaacgccatgccgcgccggcccaggaagcctcgggcaacccgaccggcatactgctgccgcatctggccaaggacgatgcactggcggcgcgactgtcccgcgcctgctacctgtatgcactgcgccgctttgccgatctgaccgacgtgcgctggtcgccatgcggcgtgctgcaagtcgcacgcgatgcggcccacgaagccttgcagcgagccacggtgcagcaacttcaactgccggccgactttgccggctttctcgaacaggacgccgcccaggcccaagtcggtcggccactggcacacggcggctggtggtttcccggcggcggctgggtcagtccgggcagcgtctgcgccgccctgctggctgccggcggtgagcgcgttcacacgcatttcggcaccgaggtcagctcgctgcggcagacggcgggcggctggcaggcgttcgatggcgcaggcgcgctattggccggcgcgccgcacgtgatcctggccaacgcctatgccgccaaccggttgctgccccacgcactgccgctgacgccgatacgcggccagatcagctatctgccggatcgatttgcggaaagcgtggagccgcccctgcgtcacgtgatttgtcgctcgggttacatcacgccaccgcaagccggcactgtctgcgtcggcgccagcttcgacagcggcgacgccgatctgcagattcgcgcagcagaccatgccggcaatctgcagcgactggatgaactcttgccgggcgccgcacggggcatcgatgccaccttgctcgacggccgtgtcggcctgcgtaccgccgcccctgaccggctgccgctgatcggtaccctgcccgacaccgatgcagtcgccgtgagtgcggcaacgctggatagtgtgccgcgccgggccggcctgcatgccatgctcggtctttcggcccgcggcctggtctgggcgccgctggccgcggaactgctcgccagccaactggacgacgaaccgctgccgatcgagcgcgaactggcgcgggcggtcgatcccgcccgcttccacctgcgcgccctgcgccgcggcacctgactcctagaacggcttgctgatgatgggtggcggcagatccgccggccccttcggcgcggactgactcaagacccccgcagcccccggcgtttccggaaacaccggcccctgcatgaggccggcgatgtgccgcgccgattcacgcaattcctctgtccagcccggttcttcaggcagcgcggggcgcaaggcttccaactgatcgctcacctcgcggccgtcccagccggcggccaccaacaatttcatggccatcgcctcggcctcgcgcacctgctgcggacgatcgctggcgcgcagcgcgcgcgaaccggcaaaggatgccgctgaagcgaccgcggtcgccgtcgcggttgaactggcggcagtcgtcgccgcggcactggtcgccgcgccgcttgaaaagagggctccaacattcagcaccggaaacaggatctgcgcaaccaccgccaccagaatgctggtggtcacgttctcatcgtgatggccgccaatcacatggctcatttcgcgcgccagaacaaaggccagcgccgcatcatcgagatccagtcggcgcacaccgcgataaatcaccaccgttcctgccgcgctggaggccgatcccgcgtccgccttgtcggcaacaatgaattcgaagcgcgggaagcgcaagtgcaatgcagggtactggcgataggcgacgtcggccaggcgccgcccgagcgcaagaattcgcaggtcaaacgcccggtccgcagcgcattccaattcgtggcatgaagacgcatccgccgctgtcaccaactgcagatacatgtcgaattccgagtagacagcgctgaggccctgcaaaggcgccggcgccaccaactgagtgcgaccctcgggcgacgtggcgcaggcggtcagaaagaaaaccgggaccagggaaagcagaatgggtcgcatgaacgccactcttccccgaggcgggatgactgtcaatccgcttcaggcaggcagcaccgcagccaggcgcgccagcacgcgctcgcgccccatgacctccagcaccgcgtctatcgagggcgactgcggcagcccgagcagggccacgcgcaagggaatcgccagttgcggcattttcaggcccgattcggccgccgtctgcttgaccgccggccccagttccgccgcctgccaggcgcaggctgacaatcgctcgcgcagggcactcaagcccttgagcgcggcctcggtgaaatgctgggcgcgcagctctgcggtcggtttcggtgcgacaaagaatggatgcacggcatcggccagctcattcaggttgccaacgcgatcccggtacagggcggcgacgctcgccacgtcggggccgccggcgacagccacgccctgccgcgccaggcggcgcgtcgcctcggcggcgagtcgctgcggatcggccagtttgaggtaatgggcgttgagccagttcagcttctcggtgttgaactgcgcggcagaagccgtgatgtgatcgagatcgaaccactgcacgaattgctccatgctgaagacttcttcgtcgccatgggaccagccgagccgtgccaggtagttcaacaccgcctccggcagatagccctcctcctcgtactgcatgaccgacaccgcaccgtggcgcttagacaacttctgcccgtcatcgcccagaatcatcgacaaatgcgcgtacaggggcaccggtgccttgagcgcctgcagcaggttgatctgacgcggcgtgttgttcacgtggtcgtcgccgcgcagcacatggctaatcgccatgtcccagtcatcgaccacgacgcagaagttgtaggtcggcgtaccgtcggcccgggcaatgatgaaatcatcgagttcgctgttggcaatctcgatgtgccccttgacctgatcctgccacgccacgacgccctgctgcggattgcggaaacgcaccacgggcggcaccccggccggcggcagcggcagcgtcttgcccggctcgggccgccagcgcccgtcgtagcggggtttttccctcctggcttcctgctcggcccgcaaggcatcgagttcctcgatcgaggtatagcagtgataggccgtacccgcagccagcatctcggcgatcacctgcttgtagcgatccatgcgctgcatctgatagaacgggccctcgtcatgcgcaagccccagccacttcatgccgtcgatgatcgcctgcaccgcctccggcgtcgagcgcgccacatcggtatcctcgatgcgcaggatgaatgtgccgccgtggcgacgcgcataggcccaggcaaacaaggccgtgcgggcgccgccgatgtgcagaaaaccggtaggactgggggcaaagcgggtgcgaaccgtcataagatttcaatgctcggggaaagcctgaattctacgccacgccgccggtgcgattgaccgccggcagcgctttgtggttaaatgcgcgcctctttccgggcggttaactcagcggtagagtgccaccttcacacggtggaagccactggttcgatcccagtaccgcccaccatcagacagtccaaagcaggccaaagaaggccagcaagcccagtaccaacaaggcttctggcctttttcacgtccatagccgcttcctcaatcatgtgttgaattccttgccgatgctttccgcatagaggcgtagaatccgccaaccctcaccgccgggcaaccgagaagggaatgcggatggacaagatcaaagtaaccgcgcacctgctggccccagttgtcacagggggcggctacatgaccctcgacggtctgctggcggcactcctgttcgatgacctgcaagacgtggacgccgcacacgcggccatcccgattcggcagaccgacggcctgcaccacgccagcgccgccatcatggaggcaagtcgggagcgtatctcgttcattgccgcactgcggcccggccacagcatcgatcctgacctgatccagaagaacaagcacgggcagttgcaccgcaagttcgacacgtccctgaccaacgtattgaacagctacgccctgctgactgcgcccacggtgacgtggtatgccgagggtgatgcggatcacatcgagcggctgatctccccggttcagttcatcggcaagcgccgagcctctgggtttggccgcgtggcgcgctggcaagtcgagcctgatgatctggatggtatcgaaggcccgttcggcgaaccgttgcgacccgtgccggtagggatgttcaagggtgacacgtcgcatcccatcgtcgacgctgcatggcgaccggcctactggaacccgattcaccgcacggcgtgttacgcgcccgtttaaggaggaacgatgcttcagttcttcaatgacaacttcggccgctatctggtcgagcagtccggcgatccggttgcagatgcccgtcgcgcgctgtcatccggtcacaggatgaagaagccgggaataccgcagcgcatcgcatcgggctgggcggtcgtccgacccggcacgtcgaccatgcagtttcaacttgcagcggaaggcatcgcctacagcacgcagacgcgctacgaagcgttcctcgccgaacttgataactgggatcgcacgccgcgcatgttcatcgagttcgccaaacgacccgtgccggtcgacaacctgtttcgtactttcgacctgcgtcaggttcgcatctgttcgcctacgggcgtcgagacattcgacttcaccaagccaccggaaaaagatggctgcaagacacacaaggttctgtggaaactaaagacaggagggaagtgatggactacgcaatgcaaaagccgccaagtgtgcgcggctacgccctgcaccggatcgccgctggcttggctgatggcgagaaggtgctgttcgcggactgtggcgatcacctgctgctgcgtaccagcaagccgctggacgttgatcggcgcaaggttcgcaccatcacggcgggagacatcgtcggctttgaacttcgcgcctgcgtcggcaagaaggtcaagggcaagcaccgctacttccactcgtccgactggcgcagccggcatgactggctggaacgacagggcgaagcgcacggctttgggatcatcacgctgcactgcacgacgcagttgcagaccgtcaaggcaggcgaccgggaattcacggtcgatcagaccgacttcaccggcgttctaaaggtcacggatgccgaacgcttcaacagcgctgtcgccaatggcgtcggcaacaaggccaaggctttcgggtttggcatgttggtcatctaacggaaggatacgcaccgtgaaaactatcgtcatcaacgccaccctgactaccgtcggccccttgtccatcaccatgcccatcgctgaaggccagatgggcaacaagttcaacaatttccccgtcgtcacgcgcggcatggatgatgacggcaacaagcaggagaccggctacctgccggccaccacgctgcgcggctttctccggcgtgccatcgtcacggatcagatgacgcaggccgccgccgacggcaagccctacaccttgcagaaagcctatgccgacctgatcgggcaggatgcggcgtccgagtcgaaggacgacatcgacctgctcaagatgcgccagacccgcgaggaaaatcccgtcctcgatctgttcggctccggcttgggcatcaagtcgcggcttctggtatcccacttcatgccgacccacaacgtgctgccggaagtcgctaccggcgtccgcaaagacttggaggacaccgatggtgtgctggagtcgctgtcgtcgcccgaccgcgatagctatcttggacgctccggtgcgaacagcaagcgcgctgccgccctgacggtggcaaaggggttggagggcaagattcgcaagacgaagaaggccggcgaggacatcgccgaacttgaggcggcgctgaaggaggcgcagggtatcgtcgcgcgctatgaatccgacatgggcaacatggtcaactcatcgcgcacgctgaccaactattttgcgcttccggcaggcatcgaactcaagggccgcttggtcatcgagaaggcgcgcgaccgcgatctgccgatggtggaacttgcgctgaacgaattgtccaagcgtccgatcttgggggcacaaagcgcccgtggctgcggcgaaatcgaagggacattcgatgttctggtggatggcgttcttgccaagaaaatcagcatcggtggttggcaagcggcgaccgtgaccgatttttgtggcgacgaattagcgaaatcggctgcgtaattcaagtgatgcagcgagtcaggtcaagccaccctgcatctgggtggttactacaaccttggccatgatcagactccgaggtagatgggtcaagccaccctgcatctgggtggttactacaacaagttcggccgcgagggtgaagaagcgcgagtcaagccaccctgcatctgggtggctgctacaaccagaatcactggttcagcggcgaaatggccggtcaagccaccctgcatctgggtggttactacaacctctctcgagtcgcagggctttttgttttcggtcaagccaccctgcatctgggtggctactacaacagatagaccggatggtcctcggggcgcagcggtcaagccaccctgcatcttggtggttactgcaacgccatctgcgcgccgcgcttgaaggcatcgggtcaagccaccctgcgtttgggtggttactacaacttcatagcgcgaacggtggcgcccggcagaggtcaagccaccttgcatcggggtggttactaaaacgtgcagccgcagccgatacaggcggcgaggcgtcaagccaccctccgtttgggaggttactagaactatttcgcgatctgcggagccatcagcagtagttaagccaccccgttgtggttattgaaataggatagtcagatgtttcgttctaccgaacaatcaacctttgcggcaatagtcgccaagcatatggcgagtagtgatgcccctctgctgttggaagggggagtcggcatcggcaagacccgcgcctatatgtcagcgctggttcaatccgggcaacgggtcgctgtcgtcctgccgacgcatcagttgatcgaccagttgctcgcatcgtccgatctgggggcgacgcgcggcaccgctacgctggcggcgtttcggcctgcccgaatgtttgaacgccgggccgactacgaggccaacaagcgcgcggcgactgacgcacaactgatgttctgtaccgccgccagcgtcatcattgaccatcgcttgggcggcgagtacaacggttccaccacccgcgcctacatcgtgttcgatgaggctgaccaactgccggacatggcggcactgcaaagcgacttcaccatcacgcagacagaactggctgacatgggtatccgcctgacgaccgtcgaggatgcgttgcaggcgattctggcgaaaccgccacgcatcgtagaaccggaaaccaaggccgcagcgcagatcatcctcgatgccatcgaggaaccggcgtggtatcagtccgcaggcatcagcgacgacggcgacatcatgctgacgcacaagctgcccggccgcctgctgaagaagatcagcaaccgcagcaacgtggcgttcgtctcggccaccctgacggtcggcggtcgcttcaaggattttcagaactcgatgggcatcgagaagatcagccacctgtcgtccgcgattgaaccgcggcagcatggttcgctggatctccacatgatcccgatggcggtcgatacgccggaatggatcagcgcagtcgtacaagtggcgaacgatgcgccgaagcccgtgctggtggcaactccatcgcatgacctatccagcctgctcggcggacgtctgccgggggctgtcgtcaggtctgtcgaggaaacggcggctcaggctggcgacagggtgagcgccgctggcatcctgatttctgccggggcatgggcagggctggatacaccgctgcgctggcgctcgattgtcgtgccgcgcgtgccgttcggtcagccggtcgtgattgacgggcaagccacgaccacctatttcgatgcgcgcaacaccgccgtgcgccgcttgcgtcaagtcatcgggcgcggactgaggacaccggatgcagtgtgcagcgtgtacatcttggatgccagagcggagaaactaagcggcttcgtaccggagcgcttttctaacgagtgggctactcggacatatatcgaaggggcgaaaaaggaggtcgtactgtccaaggctgaacgcgaccccgcagttcgtcgggcggcgctgaatcactacggacggaagtgcatggcctgcggcttcatgccgaaggtcgattcacagcttgacgtgcatcaccttgaccccatcgccgaggggcagcggcgtaccaagatcgaagacgtggtggtgctgtgcgcgaactgccaccgactggcgcacgcgaccaatccgccgacacggctggatgttacggagacagggcagccgcttccttgctgatcaagctcagtcggatgatgtcggcgcgcgggcgtgtcctgccggcgcatgcattcagttgcattgcacgcggcgcgcctttttgtcgccgggtctgactggcatgcactatagatgcgcttcttgtggaaatcggcgctggcgatacggcgaccaccttgcggattggtggtctaatggagcgcgagcctttacaggcctgatcccattttcattcgggtacccgatatgaagacccttcttgtcgtgtaccactcgatgaccggcggcaccgaacagatggtgcgggcgctggcagcaggtgccgctgcggaagagggcgtcacgacgcgcctgctgcatgcctccgcggcccaggccgcagacgtcatcggcgccgatggctacgtatttgccacgcccgagaatctcgcggcgatttcggggctgatgaaggatttcttcgaccgctgttactaccccgccctcgacaggatcaacggcaggccctatgcggttctaatctgcgccggcagcgatggacagaatgcggtacggcagatcgaccgcatcgcgaccggctggcgcctgcggcgcgttgcggagccgataatcgtctgtacgcacgcgcaaacggcagagcagattctcgccccgaaaaccatcggcgcgacggacctcgatcgttgccgggagttgggagccacgctggccgccggactcgccatgggcgtgttctgaggccacattccaccaggggataccgtcaccgcccaaagggacggagacataaacacaaaccccggcgctgggccggggttggtcttgccgcgacgggaaactgctttgcgcgccggcgtcaggccggctgctgatccagctcgaatgccttgtgcaggacgcgcacagccaactcgaggtacttctcgtcgaccacgaccgaaatcttgatttcggaggtcgagatcatctggatattgatgccttcttcggccagggtgcggaacatcttgctggcgacgccgggatgggaacgcatgccgacgccaacggcggaaaccttgcagatcttgttgtcgcccgtgatggcgcgcgcgccgacatgcggcttgatctgctcttccagcatcttcttggcacggtcgaactcgctgcgattgaccgtaaaggaaaagtccgtcgtgccatcgtggccgacgttctggatgatcatgtcgacgtcgatgttggcgtcggcgatcgggccgagtatctggtaggcgatgccgggacgatcaggcacgcccagcaccgtgagcttggcctcgtcgcggttgaaagcgatgccggaaatgatcggttgttccatgttggtgtcttcctcgagagtgatgagcgtgccgttggtctcctggccttcttcttcgaagctggagagcacgcgcagcttgaccttgtacttgccggcgaattcgaccgaacggatctgcagtactttggagcccaggctggccatttccagcatttcctcaaaggtgatgcgttccagctttctggcctcgggcacgatgcgcgggtcggtggtatagacgccgtcgacgtcggtgtaaatctggcattcgtcggccttcagcgctgccgccagcgccaccgccgaggtgtccgagccgccgcgccccagcgtggtgatgttgccgtcggcgtcgacgccctgaaaaccggcgacgatgattaccgtgtcgtcgtcaagatcgcggcgcatgttggcatcgtcgatctcgagaatgcgcgccttggtgaaggtgctgtcggtcagcactttcacctggccaccggtatagctcttggccttgagaccgaggtcgccgatcgccattgccaacagggcgatcgtgacctgctcgccggtggaaagcatgacgtcgagttcgcgcgcgtcgggctggggcgaaacatccttggccagagcgatcaggcggttggtctcgccgctcatggcggaaaccaccactaccagttgatgcccctgcgccttccagcgcgcgacgcgcctggcgacattgcgaatgcgttcgggagaacccatcgatgtgccgccgtatttctgtacgatcaaagccattgccgtggtctgtcagttggaaaaaagcgaattttacccgatagtcgccaccaccaaaacgagccgcccgacaataaccatttcggcattcgagttattcccacgtattaatgtcggcgcaattattcttgaatgacaaaaagatttgtcctatagtggaattggcgttttggtgatggttattgaacgtttgtcttatccgatcgcattcgcttgatgacagtcagttcaaggagtgaataaatgaaggccaacgacaagatcgatgcacgggaaatccgccgcaagctgggtatgaaccagcagcaattctgggccaagctgggggtaacccaaagcggtggctcacgttacgaaagcggccgcaatatgccgcgcccggtgcaacagctcctgcgtctggtgcatgtcgagcagatcgacatccagaagatccggcgtgaggactatgaagtcatcgagtatctgcgctcggccaagtcgaatctgttcaaggaacttaaaaaggtagccaaggcagcaatcaagaccaagaaggccgcctgacgccggagcgcgccgcgtcaagggctgacgcgcacccgcagcccgagttggcgcacacgttccgccatttcctccagccgtgccgcttccatccgccccagccggggtgcttccttttgcagggacggtcgcgccagactgtacagatgcaccccggccagcactggcgccaatggggccagcagcgccagataggcctgcgtctcaacttccgcgggcaattcaccgtcgagcctgaacaggcaggtctgcacccaggtcggcgccagcgctgcgcaacacgccaggcgtcgcgccacgacttcagggcggacgcgggtgccgttgatgcgggccagccccgctgccgtgcctgcatcgagcttgaaccagacctcaccggcggcgctgccgattcgcgcaatgcctgtttgcactgccttgcgatcgagcaggctgccgttcgtgatcaggcgcatgacaagcttgccggccagaccatgcgccgccagcactcgctcggcgatcaccacggcatcggcaaactcggcggcgctggtcggttcgccatttcccgaaaatgccacatcgaccagttggcgcgccccggccggaacgcgcgtcgccatgaagtcacccgactgagcccagtgcagaaaatcgttcagctcgcgctcgagcaactccagatcgatcggtggcggcccgccgcgcttcagatccgggacctggcaatagatgcagcgccagttgcaggcattgttgggattcagattgatgccgaccgaaacgccgccggcccggcgcgaaatcaccggatatacatagcgcatgccggcgctgtcgcgggaatggtcttcagtcttgagcaggatgcgggacatggcaactcggcagaatggaaaaactgcagttgccgccaagagtcggcgttggcgggacggcgctgcagcacagttataatgcgcgcctactcacccgcgcacatctgcggccactttgccacaaacaagtccatcctgaccatgcgtataacccgccgcctcgaattcgatgcgggccaccgaatcccgaatcatcagagccagtgccgccacctgcacggccaccgctatgcgcttgaaatcacgctcggcggcggcgtcatcaatgcagcaggaaggcccgacgatggcatggtgatggatttttccgaagtcaaggccatcgccaagcagcatgtggtcgatgtctgggaccatgcctttctggtctggcgcggcgaccaggccatagcggactttctgcgcagcctgccggaccacaagacgatcgtgctcgagctggtgccgaccgccgaaaacctggcccgcatcgccttttcgattctggatccgctgtaccgggacagctacggcaatcatctgcacctggagcgtatccgcctgtacgagacccccaactgctgggccgacgccatgcgcgaagacctcgcctgatgaaacaactgcgctacaaggcggtcgagcaagaaacgctctcctcgccgtagcggatagcgggcaagataaccaagtttcagtgacacagaggagtacgacaaatgcaaggcttgatgatgaaccggccgctgatgatctcagggctcctgcaacacgccgcgcagaaccacagcgatactgaaatcgtctcccgcctgccggttggcggcacgcatcgctatacctacagcgatgcgcaccatcgctcgcgccagctggtgcgggcgctgctggccctcggcgtcaaggccgaggaccgcatcggcaccctggcgtggaatacccaccgccatttcgagatctactatgccgtctcgggcatggccgcgatctgccacaccatcaatccgcgcctgttccccgaacagatcgcctatatcgccaatcatgccgacgaccgtttcatcttcttcgacgtaaacttcgcgcccctgatcgaggccctggtgccacactgcccgggcgtcaagggctgggtcgccttgtgcagccgcaatgaaatgccggccaatgcaagtccgaacctgcactgctacgaagaactgctggccgcgcaaagcgacgactatgaatggccggaattcgacgagaacacggcgtcttcgctgtgctacacctcgggcaccaccggcaaccccaagggcgtgctctactcgcaccgctccacggtgctgcatgcctatggttccagccagccggacgggctgggcgcctcggcgcgcgactgcatcctgcccgtcgtgccgatgttccacgtcaatgcctggggcctgccctacgcctgcgccctgaccggcgccaagctggtcttgccggggccgcatctcgatggcgccagcctgtattcgatgttcgaggaagaacacgtcaccatgtcggccggcgtgccgaccatctggctcggcctgctgcattacctgcaagcgaacaagctcaagctgtccaccgtcaagcgcctggtcatcggcggttccgcggcgccaccggccatgatccgcgccttcgacgagcagttcgacatcaccgtactgcatgcgtggggcatgacggaaatgagtccgctgggcaccgtcaacacctacaagcaaaaacatctcgcgctgtcggcggaagaacgcgaccgcatccgtctcaagcagggccgcagcatcttcggcgtcgaaatgaaaattgtcgacggcgacggcaaggccctgccgcacgatggcaaggcctttggcgacctgctggtgcgcggcccatggatcaccagcggctactacaagagcgaaggcggcgacgccctgatcgacggctggtttcccaccggggatgtggccaccatcgacccggatggctacatgcagatcaccgaccgctcgaaggacgtcatcaagtcgggcggcgaatggatttcgtcgatcgacctcgaaaacattgccgtggcccatccggcggtggccgaagccgctgtcatcggcgcggcccatccgaagtgggacgagcgcccgctgctggtggtcatcaagaaggccggtcaggaagtcagccgcgaagaactgatcgccttttacgaaggcaaggtggccaagtggtggatacccgatgacgtgatctttgtcgaggacctgccgcataccgccaccggcaagctttccaagttgcagttgcgcgagcgcctgcgtgattatcgtttccccggagcatgaattgactacacccatcactctctgcggctttgccgtcagcaactactacaacaaggtcaagctctcgctgctggagaagggcgttccctttgccgaagcgctggtgttcacctcgcaaaaggacgagatgctggccgagtcgccgatgggcaaggtgccctttctgcggaccccgaagggcgtgctcagcgaatcgcaggtgcttaccgagttcatcgaagacagctggcccgagcctccgctctatccgcgcgacgccttcgagcgcgcgaagtgccgcgagctgatcgaacacctcgaactgcatgtcgaactgccggcgcgacgcctctacacggaagcgtttttcggcggcacggtgtcggaggaaaccaagaccgaagtcgcggcgctgctcgagaaaggcctcaaaagcctggcgcggctggcccggtttgcgcccttcatcggcggcgacagtttcacccacgccgattgcgccgcctgggtgcatctgccgctggtcagccaggccacgcgcaagatctatggacgcgattttctcgatgagttcctgcccgaggccaaggcctacatcaagctgatcggcgagcggtcccacgcccagaaggtcactgcggatcgcaaggcagccaccgaagcctacatgtcacggcccaagaaatgagcgagacggtccgtatcgggctcgccgatggcgtgttccacatcgaaatggcgcgcccggagaaaaagaacgcgctaaccgccgcgatgtaccggaccatggcggatgcgctggcaagcgccgaggccgatcccgcggtacgcgtcatcctgatttccggcgccggcggcaacttcaccgccggcaacgacctgaccgatttcgtggacaagccgccgatggatgaaagcgcgcccgtgtatcacttcatcgagggcttcgccaagctgcaaaagcctttcgtcgccgccgtggaaggcgtggcgataggcgtcggcaccaccatgctgctgcactgcgacctggtctatgccggcagcggagcacgcttcgccgtgcccttcgccaatctcggactgactcccgaggcggcgtcaagcctgttgttgcccctgtgtgcggggcacgttcgggcggccgaaatgctgatgctgggcgaagccttctccgcgcaggtcgcgcttgaaaccggcatcgtcaacgcggtgctgcccgacgcgcaggtgctggctcatgcgcttgaacgttgccgcaaattaactgcacaacccgccgcatcgctgcgcctcaccaagcaattgatgaaacgcgcgcaacaagcctcgattcgcgaaacaatgggcttcgaggcggaagtattcaggcaacgcctggtgtcccccgaggcgagggaagcttttgccgccttcttcgaaaaacgcaagcccgatttctcgagattcaactaggcggggcgcaaggagcatcgcacaggctgctaaaatccgcagcccaaaggatgggtggcagagcggttgaatgcaccggtcttgaaaaccggcgaaggtgcaagccttccgtgagttcgaatctcaccccatccgccaccgtcagttccagacgattccgcagaagtctaaaaaaccacttaaattcaatagaagtagcccaataagtattacgggctattccaatcgattctattgccagccgtggtaataccgtggtagaaatcgtggtagagaaataccacggttgaggagttaccacgatggccggaaaactgaacctgctgacagaccccgagtgcaagaacgccaccagcggcgaacgcagtatccgcaagctgcacgacggcggcggcctctacctctgggtctatgccgatggctcgaaatattggcgcctgcgctactggctcgctggcaaggaaaaggccttgtcccttggcgtctatccgagaatcggcttgaaggatgcgagaaaggccagggacgaagaacacaagcgactcgacgcgaagaaagatccatccgcggagcgcaaggccgtgcggatccgggaacgcatgactgctgaaaactccttcgaagcggtggcgcgggagtggtacaagaagcaaagccacacttgggccaagggccacgctgctgacgtactccggcgcctcgaggtcaacacgtttccgttcattgggcgcagaccgatcgccgagatcgaagccccagaactgttgctgatggctcgcaagatggaggaccggggagcatttgacttggcccaccgcgtcctacaggtgtgcggccaggtcttccgctacggcgtcgcgaccggccgctgcgcgcgagatattgccgctgaccttcgcggcgccctgacgccgcacaaggcgaagcatcaacccgctgtaaggccggaggagttgccggacttgctgcgcgcgatcgcgaaatatgacgagatcggcgacaaacaaacccgcctcgcgctgcagttgctgtcattgaccttcgtccgaacaagcgaactgctgggcgctgaatggtcggaattcgacttcgatgcagggatctggatcatccctgccccgcgtatgaagatgaaggccgagcatctggttccgctatcaccgcaggccgtcaagcttctggaggaaatgcggcccatcgcaggcgacagccgcttcgtgtttcctggccggaaccgctctaccccgatgtcgaacaacacgatgctgttcgcgctctaccgcctgggctacaagggacggatgacaggccatgggttcagatcggtggccagcaccatcctgcacgaatcaggctggaacagcgacgccatagaacggcagttggcgcactgcgagcggaacgaagtgaagggagcctacaaccgggccgagtaccttgccgaacgccggaagctagtcgactggtggggtgagtacattgccgccgtcgccagcggtgccaaggtcgtgcctttcaagcgggtggcatgacatcaatggttgcgatcgatgagactgccttggaattgatcatccgaggataccggttttggagcgatccggagaggatggagagtgagctccgcttggtgcaagagtactttgaaagcattaccgccgaggatgtgaatgacgcgattgccgagttcgagcactcaataactccggctgaacgatgggcggtagccaaaaccatgatcgcctattttcgatggtgctggagaaatggtaagacccatgtcggtgatgccagtctggatactcttgtgctgtcgttcgcgaaagcgtcgttcgtgaggatttccggcgcccagctcgtatcaggcaatgaagatgatggcgagcttcttcctgagtggtgtagccctgacattgcgtttggctccacgaaaccaaattttcggctctctgaggacaacatcatccgcgacattgcaatagcgatgcacgtcgaatcgctgcgccgcgatggggttacttccggggacgccaagaaacgtgctgcggggaagtttagcgtctcggtaccggtggtagccaaggcaataaccttgggcaacagcattggctatggacgacgattcactctactttctgacgatgatttgaagagagaagtcgtcgaccacttcgaatcgcaacaagaaaaaactacgcgctagttctttcgtgttccgataatcacactgccccacatgccgctaaatgcggtggaacggagggcaaaatgatcgagccgcaatttcgatatctaaatttccgacaggtcgccggctatcgcggctgctcggtttccacgctgtacaacgacatcgccgaatcccgatttccagccggcgaacgtttgggcgcaaacaccgtccgctggcggtctgatgttgtagccgcttggctggaagaacagtcgcgcaactcggcgacgatttccgaagaaatcacgaaaaaggccaaggcgcgcacgcacctggctgtcgaaggaaaacgacgcaaggctcaagagcgtgcggcgcttgcggcggcgcaatgaccgccaccagacgtgacaacgcccgcgtgcaggcgggcgaagtcggcaatcaaaaccatatcaggcagtcagatcatagcgcaggatcatcgaatgagccagcttgccagtgccacatcaatccctcgggctgcatggtttgcaggcgctggtcgaagcgtatcgacggcattgaggcgcgccgcgccaacagcctacgacgccagtcgctcggtcagcgtgccagggctgggggttgatcatggcgcgtccttggtatccctggtactcatcggactattcacgagcaacggcacaccttactttcatcgaggatgcagcatatcggcgccaacttgatcactattacagcactggaagccttccggcaaatgccgaaactttgctgcgtgtttgccgagccatcaccgacgatgaaaaggccgcggtactcaaagttgcggccgagttctttcgcgaggtcgatggcttccttgttcaggaacgagtagtcgaagagatcaccaagagccagtacctgagcggcattcggagcgaagccggcaggaagggagccagcacaacgaaccgcaagaccacggcaagcgctacggcaacagcctcggcaaatggtccggcaaataaaccggcaattgctggcacaaccacaaccacaagtagtaaaccttcttctaacgaagaaggtagtgctcaggcttcgcctgcccacctgcctgcatgcccacatcaggaaatcatcaagctctacggcaagcatctgccgacacttccccaaccaagggcatgggaaggccagagagcgaacaacctcaaagcccgttggcgctgggtgctgactgcgaagaagccgaagggcgatcgatacgctaccgacgccgccagcgctgttgacttcttcgatcgtttcttcggctacgtcgccgcctccgagttcctgaccggccgcgatggcaaatggccgggttgcgacttggcctggctggtcaaggccgagaacttcgcgaaggtaatcgagggcaagtacgagaatcggggccaagcatgaacgccgtcgagagctgtggcatcaagccgccgcctcactcgatcgaggccgagcattccgttcttggcggcctgctgttcggcggcgaggctgcatgggaccgcgttgccgacgtggtgagcgagtccgacttctaccgcgacgaccatcggagaatcttccgccacatctccctgctcgccggtaccggcaaagtcgcggatgttgttaccgtgttcgagtccatcgagcgcagcaacgaagtcgaccagactggagggctgggctacctgggcgagatcgccaacaacaccccgagcgcggccaacatccggcgccatgccgagatcgtccgcgaccgcgccatcctgcggcagttggtctcagtaggcgaccagatcgccaacctggcgcacggccaaggcgacgcgcgcattgcgatcgatgaggctcagcggctgctggtggaaatcgccgatgtcggcccagggcggcatgaacccgttgccatcggtacggtgctgggttcggtgatcgaggacatcgaagcccggtacaactccgagtcaagcattgccggcctttcaaccggacttgtcgatctggaccacaagctgtcgggccttcaccggggcgacctgatcatcatcgccggaagggcaagcatgggtaagaccgccctggcgttcaatatcgccgagaacgtggcgactgctggaaaaccagcgctcgtgttcagcctggagatgggcaacaagcaattgggcacccgggctatcgccagccttggcggcgtgtcgatggagcgcatgcgcagcggccggcttctggactcggattgggacggcatcacgacggcgctgggaaggctgcacgacgcgccgttgatcgtcgatgagtcaggcggcctgaccgtttcgcaaatggcggccagggcgcggcgccagatgcgccggcagggactcgccctggtcgtgatcgactacctccagttgatgcgcggtgaaggcaacacccgcaatgaagagcttggcgaccttacccggcgcctgaagctgatggccaaggatctggacgtgccggtaatcctgctgtcccagatctcgcggaaggttgaggaccgtaccaacaagcgcccgctgatgtccgatttgcgcgagtccggcgccatcgagcaggacgccgacgtgatcctgatggtctatcgcgacgagtattaccaccccgaatcggcggatgccggcactgcggaagtgctgatagtcaagcaccgcatgggcgcaactggcgaagtgcgtctggccttccagggggaatgctcacggttcggcgatctggccagggatgatctggcgcgcattgaccatgcccgggccaccgcgaagatgcagaggaaccggagtcgcgggttagatgactagaccgcagctcgccttgatcgaccatgacgaatttgaacgcctacgccaccttgtcgccgagcgaccggactggcacctgtggaatcacagcgtctgggcaaggaggtatcgcgacgttcgaggctacgacgccagatcggcgggcttggccaccggtggggtgtcgtcggatttcgaggatctgtgcgaagaagttgatgaacggtcggccgagatttccgacgtgattctcgattccttgcctatcgagcagcgcatcgcaatcagctacgtctatgagagcgcagtttggcgattcaaccggccgggcatgctggaacaaacactggtcgccgcgaccgtaactttctggaccctggcgcagcgtaaagggttgatgtgagcacggcgcccaaccccgtagtccttgagtacattcgcgccctcaccaagatgacgccgcgcgagcgggcactctccaacgcgctccttgacctgaagagcgccgcgctcgctgttgatggtttgctcgagctgctgcaggacgagaatgggccatggttcaacccgaacaccgcaccgatcgtgcgcgagattatccggatcctcaaggaagcgggggccgacgcgcacgcggtgcaggaagcggtgatggccgatgcgcttgaggtaacggtgcattgatggccccggcttgaaatgacagtccagaaaccgccaacgctagtgcaacaggggaaaggtggcggcgtaaagaaggcgccccgaaacgagctgaagccttccgggcgatgccgactcactacggccgacgttgcagcggctatcgcctggcggctcgatggcatatctgcagtcgagatcgcgaccctgacagaagcgttgcggccgctcgcggctgacttccgagaatcgcggccagaggttgcgcaagtgctcgccgatcttcgccgacccggtgaccggcgcggcgcgtggtcattggcaaatgccatcctcgcgcgtgacgcgcaacggcgtggcgatgttaccgagttcattctcgccgggatcgctgtgatcgagtccatgaggaggtctttaagcaacagcggaaagcggcgcagcccactgaagcccaagatgcggcagctcaaggcggtgcaccccgacctgtcgccagtcgcggcatttaatgcctttgtccatgggtacgatgtcgatgtccgctatgtcgttgcagacgacgcgctacgcatcgacggttggcagcttctgtcgcgtgaatccttttgcagggtgtatcgggagctctagctgcctgtgggttggtgcgcattttggcactagcgccaacaccatctgtttggcacgtaagcgcctcgcaaagcctaatggatcgaggctgtgttaaaacgcctgagaaaaagtgccgaaaccttctcaagctcacaccgtggttactagacgccgcaactacaggataagagtactgcgcagaaccgtcaggcattccgcgtccatgaaggtatcaacctgcattccccctccccctcttggtatcaccatcgagtcaccatcgagtcctgccgtcaattcaatggcccgtacgcgctcagccatggtcaacccaagacacgtgcccacaactagccgtcgggtaggtgtgccgttttctagaacggatcgggccctgcacgtttcctctgaatcgatcctttgcaagtttgtcagatcaaatccaaacccaaggaacgcgatgcgcttggctttcttcaattgttcgcgcgcaagtcgaagaatgacatcgtcggaccgtccctctgggatcactcgcaatgtttctgcggcggatgagacacactcccggttggctcctttgccatacgttacgtagcccttcgaattcggtagggtggctcccaaggttccataaatgtgcaggatgctgagagaagtgagcttcgccagcacttcttcagttgaccggccataggcattgcggagcgccgttagcaggtagtgttccaacgagcggtcgtagttgaaactaatgatctgcaacttagagaagtcaagggcctcccaagactctacggcgatctcgttaaacagatattgataccagtgatcagggtgttccggggtgaacaactttgaaaaatgttcacatcgcaacaaaacagcagcaatggcgcgcttgccaatgttgatgtattcgggacgccgcgccaggaaggcatcgattgacatcatttgtgagtacatgaaggccgtcaagaagtcggctaattcgcccttctgttcgcagagtcctgtctcgatcgaatagccttccttatcggcgctcccaagttccatcaactttcgacgcagcgatgcgcccactgggtagccgaccgcgacacttgctccagctccaaggacaagaacggtttctcgattgatcatggtcttagccgaaaatgttgattacagcccgcgtcatcggtgccgggatgacgcgaattctacgacgagggttgaatgcgcaatagcttcgcgtagattggcgccgcaattttgaaaaacgctaagcaataccccggacgcaacacgttgcatcctcgctattacttgcacggatacctatgctggctccatagaccaatcctggagccaccgtcatgacaacccccatttgtacaaccatcacgcgcgatccacgcgctacgccggccgcgctcgctgtggtgatcgctgccactgtggctgacgttgagtgccgcgcagcggcgattgccgacatggaggaacggctgtgccttgatctcgccaagcagcgactcgggatggcaacctcctcgatcggaatgcggacgtcgcaggagcaactggccgcggaaaccatgaatcttgccaatacgcgacggatcctctccggccttcgcgcgatagaggcggcgagcaaagcacagcccgccggctcgatggagcgcagacgcgggggcaaggtcgttttcgacaaggcacttggccagatggtcgcggcgaaggcttgatcatgagactgcactggacaagaaacgacacggctgtttgcgcaaggcgctgccaagcgggcgcgaccgattgatttacgggattttgaaggaggattgcaaatggatatgagtcgattccgtgaggcgctgcgtatgggagtagcgccggggtctctgctttgggcgacacgcctgaacgacatgggcaagggcgacgctccagccgcaccggactacacgccggtggcgaacgcctccaaagagtctgctcagatcatggcggatcagggtgatcgcgtgctcgcagagaccaagcgccagtacgatcagaatgtggccgtggcgaagccggtcgccgatgcgcagctggggatgatgcgacagtcgatcgatcagggcaacgactattaccagtacatgaaggacaatcagcggccggttgagactgcgctaaatgcggagtcgatgcgcgatacgacctccgctgatgccgccgaacgagacgccattcttacgcggcaactgacaaacgctgggcaagacgacacggagcgggcgctgattaccggtggtgatcaaggggtgtatgacgcccgcaaggccgacatcgagggcggtgtcggaacggctgtcgctgacgtgcgcaatgggcagactaccgcggccaacatgttgttacgccagggcatgcgctacggctactcgccggcaaagatggcgacgatggcgggcaccacggccggcgccaacgcttctgccgtggcggctgcagccaacggcgcccgcaccacagggattgaccgtagccgcgcgctcctgagcgacagctacaacatgcgcaatgcgaccaatgccggtgtggtcaatgccatgacgacccaacgcggcatgcgcatacaggacaatgcaacgggctgggccaaaaagatggacgtcgccggcctgtatcgtggcatgcctggcgcctcgaccggagcctattcagtcgccaccggcgccggaaattcggcggtgaacaacacgatggcgccgggtacagccatggtcaatggaacgacgacggccgcaaaccttaccgggaccggacgctcgttgttgcaaagcggacttggtaccgtcgccggcatgcaggcaaacaactacaacaccgcgcagaacagcccaagcccgcttggcggcattggctcgatgctgggcggagcggcatcgttgtattcggcgttcagtgcagctgcacccctcgcggcggcttcaagcaagaagctcaagaccgacaagaagccagtcagcgcagaactcattaccaggggattgcagcgcatccccgtcgaggcatggaaatacaaggacggtgaaggcgatggcggcgagcacatcggcccctatgccgaggacgtgcagcgcgaattcggcgaccgcgcagcgccgggcgggaagaagattgatctcgtgaccatgaacggcctcgcgttggccggaatcaagagcctggcggaccgcctggacaagatggaacacaagatcggcatgcggcggagagaaccatgagcagacgcaatccatggggcgagttcttccagaacttcaattccgcttacgacaccgggaacaaggtaggaaagcagatcggcatgacgcgcgccgccggtattcagcccgaaacgattgaaacgcagacgcttggcgacgagaccacgaccggcaacgacgggatggtttatgactccgacaccggccagtacctaccgaaatacatggaccgcggccagccgacagaacaggcccaggcgcagcagaacactccaccggatgagccgagccgcgcaccggagggggtgacaccgaccttcgctaccgagacgaggcggcaataccgactcggcagcaagacgcaggatcagcgattcaccgatgaccagctcgacactcatcgcctgaggggcatgagcgcagtcgcgctgcgcttcggagatccggcagaagccgcgcagtacgacgcactggcggccaggcgccggcagacatccgatcaggaggcaatccgcaccgtgcttgctggcggcgacacgcgcggtgtagtgcctgagcgatcatcgggtcttcatggcaagcccgaggccagcgacaagccgatggaagcggtagtccctgctgtcggcacgcagaagccgcgaagctatctggagacggtaggcccccgggtcatggatgcctacctcaagcagggcaaagttgacgaggccaaggcatggcgcgacttcaccgagagcgagggtggacacgcctatgcaaacgactttgcacaggcgcagcgactggttacagcgggggacttcgaaacagctgcgccggtacttgagcgcctgtacaaccgcggctatcccgatggccggcaagcgaagttgacaagcctgggcgatgggaacttcaagctcgatgtcttcgatcagaagagcgggcagcagcttggctcgaagaccatgccggccgcagatatgggcaagatggcgattagcgccttggcgccgacaaaactcgtggagttcatggcgaaccaagagggcaagcgagccaccgaggcggccagcttgaacaagtcgcttgaactcgaacgcttgcgacaggaaggccgagacacccaagacgatcggcgcgatgaacgcctagcgactcgaataggggcagatgctgaacgtcgtgcgggtaaaagtccgcttacgccggcccagcagcgcagcaatgccgagatcgacgcggcacgtgaggcggttgccggaatgtcgccgcaggacatcatgcgtaagacggcgaaggctacaaacaccgggcgcgagaatcccgactacgaccctagcttggcccgccaagcaggactggcgaaccggcgcaagataggcgatgacgagttgttcgacactcggcagaaccggcagcagtcgggtgacacctttgccggcaagccggtcaccgaaatgaccgaagcccagcttcagcaattcgggcgctctgccggcgctgaaggcaaggccaagattgacacggaactgacgcgccgagccttcatgggcgatcagacgatgcagggccatcgattgggcgagatgacgccgaagggctacaaggtgttcgacccgcaaggtcgccacgttggctactaccggaggtagcccgtgcccttcattcctattgaccgtcgtccctctggcttcccgcatgtcagcgagttcgatcaggtcatgccggacgaaaaccgcgcggcgcttgagtccgagtatcggcagcgattcggcaaggaaccgccagccgcgcagcgtggtttcattccgttggcgaatgccgaaggcgacaaggcgcagagcgggttcgtgcctctcgaatctgccgacgcggaaggcccctcaaccatgcaacgcgccgcgatggccgctgagccctacgtcacgccggcactcaagacggtgcaggcagtggcaactggctacccggttgccgagacggcggcgaacttggccaccatgggcgtgtcgcttccagttgccggcattgcaggcatgggcgcggcagcgagtcgggcgctgggcctgaccgatgcggatcccgcagacgtggttcatgaagtcggcaacgcactgacctatcaacccaagaccgagcttggccagcacctgacaagatcggcgacctacccgtttgaactgctggcgaagggtggagcagcggccggcgacaaggtactcgacgtcaccggcagcccggtagcggcaaccgcaatcgataccgcgatcaacgccctaccgatggccatagcgcccgcctggaaggccggcaagacgaccgccgcgcacggcctcctcaatcaccatccgcggccctcgccggaaattttgcaaaagctgttgcggatttctccggatgaggcgagcgcttatttcgagacatggcaagccgccagggccgccaagactggaggacagaatgcagcctctgtatcgccggttccgggcggaatacaacatttggacgctcctgcggcagcgctgcacgaacccgtccaaccaagactggaagcactacggcgggagggggatcaaggtctgcccgcgttggatggagagcttcagcaacttcctgatggacgttgggttgaggccgcacccgaggctttggctggcgcggcaggacgtgaatggggactacgagccgacgaactgccagtggcaggaaccgaagtacccggtcggcaatcggcgcttttgccacaaggagatttggcgcggggagagtttgaacatcgtggaaatcgcgcgccgggaagcgatctacccgaacacgttccggcatcgcctgctgaaacagggaatggacgcggattcagcgctgtcatgcccgatgacgcgccgcggcggaccgacgctattgaccttcaaaggacagacgcagagcctggcggcatgggctcgggcggttgggatcaatccggtaaccctgcaggcgcgcctgttccgctacgggatcgaacccgagcgagccctgaccaaggcggatctgcgaacgaatccctgacccgtgccgagcgcatcctgaacgagcacggcagcatcgccggctgggtggactattacaacaagcacgtccgcgacggctacatgatcgagagcttcagtcgcaaccaggacggatcccattctctccgcgtgagcaacggcagggaagcgcgcacggtgacgataccggccgacaggttgcgcgagcacctgaa

SEQ ID NO: 2 - DNA, 31506 bp, Artificial Sequence
  Synthetic Oligonucleotide
tgcacaacgccacaatgctgctgcggtgagcggacgttacacgcgtctttaaacgtgatccaagggtgtccggtttcgaacaacatggtcaacatcttgcgccacaggtccttcgcaggcaggcgacggtagtgcgtaatttctccgctatccgctttggcttcataggccacgtacgcggtctcaaaggctgacccaaataggtcgtgcaggtcttccacgtcggcgggtgagaacagcgtccagtcgccgccctccattacgcggcgcataaataagtcgggaatccagttggcggtgttcatgtcgtgcgtacggcgacggtcatcacccgtgtttttacgcaactctaggaattcttccacgtctaagtgccaagactcgaggtacgtacaaaccgcacctttgcgcttgccgccttggttaacagcgacggcggtatcgttcacgaccttgaggaacggaacaacaccctgagactcgccgttggtgcccttgatgtgtgagcccagcgcacgcacgcgcgtccagtcattacccaagccaccagcgaactttgacagcagcgcattttctttgatcgactcgtaaatgccgtccaaatgatcaggcacggtggtcaagtagcacgatgacaactggctacgcaaggtaccgctattaaatagtgtcggtgtgctggacatgaagtcaaagctggacagaatttcgtagaactcaattgcgcgggcttcgcggtcaatctcctcgagtgccagacccatggcgacccgcatgaagaaagcttgcggcaactcaatgcgctgcttccgcacgtgcaagaagtagcggtcatatagcgtttgcaagcccaagtagtcaaactgcagatcacgctcaggcttcaaggcggcgcctaagcgctccaagtcgtactgcgcgaggcgctcgtctaacaagtctgcggcaacgcccttgtgaataaaggtagggaagtactcggggtagcttgctgtgagctcttcagggctaacgaagcgtccgagaacctctttaccaatggtttgcagtaacaaacgcgcggtcgcgtaggtgtagtcaggctctttttcaatcagggtgcgcgccgccaagatggacgccttttgaacttcgtcaaatggcacgccgtcatataggttacgaatggtttcgttcaggatgggctcagcgcggacatcggcattgaggccagagcaggctgactcgatggcgtggcgcagcgtggccatatcgagtggaatacgttcgccgttgtcaatcaccgtcaatgttggctcggagctgacgggggcttcggtgtggctcgccttgcgttcctgcgagcgacgctcacggtacagcacgtaggcacgcgccacttcgtggtgactgccgcgcatcaggccgagctcaacttggtcttggatgtcttcaatatggaaggtgccgccacccgggcgtgagcgcaccagcgcgcgaacgacgccttgtgtcaactcgtcaaccgtttcgcgcacactcgcagacgccgccccttgcgtgccgtgaacggccaagaaggctttcatcattgcgacggcaactttgttgggtgtgaacggcacgaccgcaccgttacgacgaatgatttgatactgactgtaggcctgagcgtccgagaatggcgcgggggcttggggcgtcgcggaggcttggcgtggggcatccgacacggcagcggctgtttgcataaagggctttcagttattgttttgcagggtatccgaacgcgcggaacggcggttcagggctgaaattagtggcgctactgcgcatattgcgaatctcagcagacactatacctagtgtttggccctgcatcaacacactaggggtagtgttttcactatattttaaggtgatcaaaaatactttgtatttttttgaaaaccaatggcttagtgtgggcgatggaatgtgatcaaatcaatttttatcgacaaaaaacgcccaatcaaaaccgacgccggggtcgaattttctgccgggtgccacgtcttcgtgacccaccatgtcggtgagcgtcgggtaggccagcctgagcgcgcccaacaggctttgtaagcagtcgtactgcggttgctcaaagcgcccaccttccaagccctctagctcgatcccaatggtgtagtcgttgcagttgctacgaccttgccagctagacgcccctgcgtgccacgcgcgttggtcggcactaacgaattgaatgaggctaccgtcacgctgaataaaaaaatgcgccgatacctccgcccctctaatagtttgaaagtaggggtgggcatcccagtcgagccggttggtaaataagtcgaccacgaacggggtgccgaactcgcccggtggcaagctaattgagtggatcaccaccaagtcaatggccatgcccgcagggcgcgggccacagttgggtgacggtatggccgtggcctgcgaccaccaaccgtcttgccacgtggcatcgtgacgcgacagcgcagcggaggcgtggggtaacttcacgctagtctaggggcttatccccgtgcacgttgcaatgggctttgctgcagtagcgaccgagtcggccttgtacggtttctgccagatcgaggtgggtaccgcagtgcaagcacggaatgatggggcgcggcaggttggtgacggttgccgacgttgccttgggtttctttgcggccttgacggcctcatctcggccctcttggcggccacgcttccaaagccaaatgccgaacaaaatggccagaagaacaacaaaaatcttaatcatgagagtggggtagttaaacgcgggccacgggcactaggcgggggcgacgagcacgacctcaaggacaaaacgggcgccaacgtaagccatgagaagcagacccgctgatatatatagtaggcggcctgcacgcttgccgcgccagccatagcgccaacgggcaatgagcaacgacgccaaagacaaccaggccaatacagagaaaacgcttttgtgatcccaacgccaccccgagtcatacagcacctcggtaaagccgacacctgcgatcagcgtagcactcaaaaacacaaagccagcgccaataaactgaaacatcaggcgctcttgcgtcagtaccgggcggtgcccctcatcgggcaaggcgtggcgaatggcggtatcggcgcggcgcaacaaaatggcgtgaaaaaccgcggcgccaatcaggccgtaagacgcgatacccagtgcccagtgcacgggcagccaaacggacggcaactgcgggtgaacaataccggggaaaagcacgttgagtgccacagcggcaatgccaagccccgcaagcggccagcgcgcccgcaacggcaacttgagtcgggtttcgataccgtatatggtggataccatccagacagtgactgacagcgcggccgcgaacccaaagcgccccgggctctctatccagtaagctagcagcgaggcaccatgaaacgccaaggtcagcgcaaatagcgcttgcaggcttttgacgcctaaggcacggtgggccaaggcgatcgcaaggtagccaaccgccgttgcaaaggcgcagccgagaaacagagggctggtcgttagaatcatggctacagtttaacgctgagtgaggccttgaggggtcaccacctagaaagcagccacaacaaattttcaccttagaggtgacccgtttttttagattgagagtgccatggcttccgccttatcagaacgcctatccagaatcgttaagaccatgcgtggtcaggcgcgtatcaccgaaagcaacgtggcggacatgttgcgtgaggtgcgtatggccttgctggaagccgacgtggccttgcccgtggtgcgcgcattcatcgccgaggtaaaagaaaaggccttgggcgaaagtgttgtcggctcccttacgccagggcaggcgttggtgggcgtggtcaaccgtgagttggtcgagctgatgtctggtggcgacgggggcggctcctccgagctaaacctagccgcccagccaccagccgtagtactcatggcgggtttgcaaggggcgggtaagaccaccacaaccgctaagttggccaagtggttggtggcgcgcaaaaagaaagtactaacagtcagcggtgacgtttaccgtcctgccgctattgagcagctcaaaaccgttactgcgcaagcgggcgccgattggtttccgagtacggcggaccaaaagcccgtagatatcgccaaagccgcgttggactacgcacgtaaacattactttgatgtcttgttggttgataccgccggtcgcttggctattgacgaagccttgatggctgaaatcaaggcactgcatgaggccgtacgaccggttgagacgctcttcgtggtggatgccatgcagggtcaagacgccatcaacaccgcacgggcatttaaagaggcgctgcccctaaccggtattgtgttgaccaaaaccgatggcgactcgcgcggtggtgcggcgttatcggttcgtcacgtgactggtgtgcccattaagtttgcgggcgtcagtgaaaaaattgacggcctcgaagcgtttgacgccgagcgccatgcctcccgcgtgctgggcatgggcgatatcttggccttggttgagcaagttagcgcgggcgttgacatggccgcggcacaaaaactagccgccaaagtcaaaagcggtagtggctttgacctcaatgacttcttagatcagctacggcaaatgcgcagcatgggtggcctgtcgcagttggtcgacaaactgcccgcacaaatggcggccaaagcaggtgagatggacatggacaaaaccgagcgcgacatgcggcgcaaagaaggcattgtgtgcagcatgaccttgcatgagcgtaccaagcccgagttgattaaggccacacgcaagcgccgtattgcggcgggcgctggcgttcaggtgcaagaagtgaatcgtctgctcaaagagtttgaacaaatgcagggcatgatgaaaaagatgaagggcggcggcctcatgaaaatgatgaagcgcatgggcggcatgaaaggcatgggtggctttcccggtatgggataagccaccgcagcatgtgcaacgcctggccagagcgggctttacgccaccaccacctcgccgcgcaaagagtgcggcaacgcctgcgtaatacgaatatcgagcatctgacccttcaggcgctcggggttggggccgccagcgaagttcacgatgcggttgcattcggttcggcccatgtactcggtggcatcctttttggacggcccctcaaccaacacccgttgcaccgtgtgctcgcgacgggcgctgatggtgcgcacgttgtcttcgatcacgctttgcaaatgctgtagacgcttgagcttgaccgcgtgcggtgtctcgtcatgtagcgttgcggcaggcgtgccggggcgggggctaaaaatgaagctaaagctggtgtcaaagccaacatcggtaatgagcttcatcatttttgcaaagtcatcttccgtctcgcccgggaagcccacaatgaagtcagagctcatagaaatatctggcctgatcgcgcgcaacttgcgcaccgtgctcttgaactccaaggcggtgtaaccgcgcttcatggccatcaagatacggtcactaccgtgttgcacaggcaagtgcaagtgattgaccagttggggcacgcgcgcatagacatcaatgaggcgctgtgtaaattctttcgggtggctggtggtgaagcgtatgcgctccacgccgggcaatgcggctacatactcaatgagcagggcgaagtcagcaatctcagccgttccgcccatcacaccgcggtaggcgttcacgttttgacccaacaacgtgatctccttgaccccttgctcggtcaaccccgcgacctctgccaacacgtcgtcaaacgggcggcttacttcttcgccgcgtgtgtagggcacgacgcagtagctacagtactttgagcagccttccataatggagacgaaggcgctggcgccatcgacgcgcgctggcggcaggtgatcaaacttctcaatctcagggaagctgatatcaacctgcggcttctgagcgcgttcgcgctcattcaacagatcgggcaagcggtgcagggtttgagggccaaacaccacatcgacaaacggggcacgcgcaataattgccgcgccctcttggcttgccacacaaccgcccacaccaatgagcacgccttttttcttgaggtgcttcacacggcctaagtcactaaacaccttctcttgcgccttttcgcgcacagagcaggtgttgaacaaaatcagatcggcctcatccacatcttgggtgggctcatagccttgtgccgcttgcaagacgtcagacatcttgtctgagtcgtacacattcatttggcagccgaaggtcttgataaaaacttttttgctcatgtcgcgttgcttgggttaggccaacccatgcacgccacgcaccagcgcgagccgcgggtgcgaaagagagcgagggccggcgttgcatggtgtagatccagtggccggcgtgcagacgcgctgcacacaaaacatgattgtaatacttgggcaggcaataaaaaaacccggaaaatttgcaccatccagacagaaggcaaacacttcttccggagtacggccgtgcatgcgtaccgttttttctagcacggccatcacatcacctcatccaatttgtttattgctgccgcaccgaacggtgccgcgtagcgcgcccagtgagttggggctagggctctatcgaaactgcgcagataagagactacatcaaaagtattaattcctatagactgataaatcaagtccctgcttagctgtttttcacaacgaggtgccagtccatggatcacacaatcacaaaaccagcgcgcgtcgaaggctacgccgtccaccgtatggtcgccgctttggtagacgacgcacccgcgctgcatctcgatgccggcgacaccctaaccattcgcaccgatgcgcccctgcccagtgggcatattgtgggcttctcgttgcgtgcctgtgtctctgtcaagaacaaggggcggcaccgctatttccccagtgctgactggcgctctcgccacagttggctcgagcgaaaaggcgtacagcatggcttcgaagtcatcaccgtgcattgctctgccaaacacttggtcatcgaaaaacaatctggccaattcagtgttgatgacaccttgtttacgggtgtcctcaaagttgtcgattacgacaagtacaacgccgcgctgctatcgggcatcggcaacacggcacgcgccttcgggttcggcatgttagttatttaatcttcaccaagggaaaccatgccaaagcaaaccatcgttatcgacaccgttatcaccacacaaggcccgctgtctatcgccatgcccgtcgcacagggcacacgggcaaacgactacaacaactttccattgatggcccgtgggcaggatgaactgggcgccgtattgcaaacagcctacctgcccgctagtacggtgcgtgggttccttcgccgtgcggctggcattgccgcgatggaaaagcgcggcgtaggcaacaccacattgcagcaagcgtattccgatattttggggcagtctaaagacgccaaagaaacggtggacttggtccagctgtctgccatacgcgaggcagaccccatactcgacctctttggttcgtggtctatcaagtcgcgcttactggtgagtaacttcttgcccacaaccaacgtgttgccacaggccatcacgggtgtcagaaaagacttagaagacaccgaaggcgtgttgaccctcttgagtgagaccgaccaacaggcctattacaaccgcagtgacatcaacagccagcgcgcagccgctgacgcagtcgtcaagggcctcactcgtgacatcagaaaagccaaaaaagacggcaacgcactcactgacctagaggcggcgcttgtgatcgccgacgcgaaggccgtggccttaaaaacggatatgggcgagatggcgaactcatcacgcaccatcaccgagttttttgccttgcccgctaacatggccttgcacggacgcatcgtggttgagcaagccaaggagcgtgaccttgcattgatcgtggaggcgctagacaccctgtctattcgccccatgttgggcgcccaagtagcgcgcggctgtggcgaggtggcggggcagttcaccatcaaggtggatggcatcgtggtcaagacagtcaccacgggcggctgggtgcctgcgcaggtcgaagacttctcgtctgatgcgcctgcaccagccgctgtctaattgcacgtggaccagttacgaatcaccgcccacctcagcggcccccttgtgacggggggcggctacctcacctttgatgcgttgctcgcctctgccacttacagcttgacgcaagacattgagcaggcccacaaccagctgccacttaaacaagttgccggcctgtaccacgccagcgccgccatttatgaacccgttgccatcggggcattggctattgtgcaagccatgcgtcccgacgacctgtggcttgaccaccagtggttaaagaagaacaagcgcggcgctgtgcacaccaagttcgacaacctatccgacaacatactgaccacctacaagaccatagcggcaccgaccatgacctggtactgcgaaggtgatgcagaccgcattcgtgtcttactagcgcatctacccctcattggtaaaaagcgggtttgctccgtgacccagtggaccgttgaggcgggcgagcttgacggtctgcatggctatgccgatgagccactgcggcctgtacccgttgagctgtgggatggtgacaagagcagccccatcgtggacgcggcatggcgtcccgcttattgggatgcgactgggcgcaccgcttgttttgtgaactgagggcacaccatgacgacgcttgaatttttcaatcagtacttcggtcgccacctcgttgcgcaaaccggtgatgcgcaggccgatgcaacgcgcacgctgtcgtctggccacaaaatggccaagggtggcacagcacaacgcattgcatcgggttgggcggtgatctcagaagatgtcagcacgcttcaattcaagctggcggccaccggcttaagttacggcggacagacgcgttacgaggcttggctagatgcgcttgaggcatttagcggcaagcccatcatgcttattgagtttgataagaagcctgtaccagttaccaacctgtttcgtacgcatgatttacgagcggtacaggtgtgttcgcccggcggggcggcgctatttgactttacgcaagaacccaccgctgagagtggtaaagcgcacaaagtgctgtggaaattaaaactagaaaggctaaaaagcgctgttgaatcaagcgcttgagccacatgagatcaagccaccctctaaatgggtggttactagaactcaccggtcagccactcgtttgttttgcggatcaagccaccgtctaaatgggtggttactagaacatgtcgctagttgcgctttacgaaggcaaagatcaagccaccctctaaatgggtggttactagaacgacgtgcttggtgacatacaacgcgtgcgcagatcaagccaccctctaaatgggtggttactagaactatgccgtccagcccgttcgtttcaagccttgatcaagccaccctctaaatgggtggttactagaactatgccgtccagcccgttcgtttcaagccttgatcaagccaccctctaaatgggtggttattagaaccaatcaaatatctacgcctaccgtaaaaatgatcaagccaccctctaaatgggtggttacttatttacagacataccatgggccgccgtgcccttattaggagttcaccgatgtttcgttcctcagagcagcagcatttctgcaatgtgcttattaagcatttgaaacgcgtcgatgcgcccatattgctggaaggcggggtgggtcttgggaagacgcgtgcctacctggccgcactggcaactacgacgcaaacggttgccattgtgttacccacacaccaactgattgaccagttgctggctagcgctgacttgtcagccgttgccttgccattggccgtgttcaggccagccagtcggtttgacacacgggaggcgtaccaagcgcagcgagaggcggcccgtgctgcgcgtgtcatgctctgcaccgctgcaagcgtgattattgaccaacgccttgcgggggcttacaacggcgcaacacagcgtgatgtggtgttatttgatgaagccgaccagttacccgatatggcggcattgcagagcgactttgtgattgaggcggcgctactgcagggccagccgctgcacgcggccttagagcgcataagcaccacccgttcacagtcggttgaggccgagcaaaaggctgctgcgcgggtcatgcttgagatattggccgaaccggtgggctacgcatccgtcgggcttgatgatgatggcaatgcgcggctacaccacgccctgccaggtcgcttattaaagaaaattagcaatcgcggtagcacggtgtttctttctgcaacgctgacccacaacgataagtttgatgacttcaagatcgccatgggcctagacgcggtgagtagcctgtcaacaagcattgagccagaacagcatggcacgctcgacttcaccgtacacgcgcacgaggtggacacgcctgactggtttgcggccaccgttcagtgcatacaaagcgcgcagcgccccacgttggtggtcacacctagccatgacctcacagagcggctacaaaccgccgtgggtgagcaagcagacttgcttatacgtgcgggtgcatgggcgggtcttgacacgccaacgcgctggcgtaccgtggttattccgcgcgtgccatttggcgcaccagtcattgttgacggggtggcggtcacgtcttacttggccgccaaggtgacggccagtcggcggatgcgccaagcaattggccgtgggcttagaacacctgaggcggtgtgcacggttgtggttttggatgcgcgggcacacaacttaggtcgctttgtgccagagcgttttgcggcagattggtcgtctcggcaagtgtttgaggagggtgcccgccatgcggtggtgctgtccaaagcggagcgcgaccccgctttggccaaagccgcgctcagacactacggcgctcaatgccaacaagcgggttgttccgtgacagaggcgtgtcagctggacgtgcaccaccttgaccccgtaagcgaaggcgtgcgccgcacaaccttgaaggatgtgaccgtgctgtgtgcaaaccaccaccgacaggcccaccacgacatgaaaatggggctgaacgtgtcgtagcgcaacaaaaaacccgccatacctttgggtacgcgggttttgggagttctggcaaggcctgaaacctaaatgtggtggtgataggtggacttgaaccaccgaccccagcattatgaatgctgtgctctaaccaactgagctatatcaccgagcctgaaattatagccaaaattctcagggctttggcttgccgccaaaagtttttgttagccattttgtcgcgcccgtacgacgcgccaagcccttggttattggtgtttgaaggcgggtttgcgcttgtttatgaacgcatccatgccctctttttggtcttcggttgcaaacagcgcgtggaacagacggcgctcaaaacgcacgccttcgctgaggctgccttcaaacgcttggttcaccgcttcctttgccgccatgacactggggagggagtagttgcaaatcatcagggctgcgcccaaggcctcggtcatgagttggtcatcggcgaccacgcggctcaccagtccgccgcgctcggcttctgcagcgtccatcatgcggcctgtgagggccatgtccatggccttggctttgccaacggcgcgtggcaggcgctgcgtgccacctgcgccagggataacgcccaacttgatttcgggttggccaaatttggcgctctcgctggcaatgatgacgtcgcacatcatggccaattcacagccgccgccgagggcaaagccgctgacggcggcaataacgggcttgcgaacgctgcgaatggtttcccagttgcgcgtgatgtagtctgacttgtagacgtcagcaaaggtgtaggtcgccatagcgccaatgtcggcacccgcggcaaaggctttttcactgcctgtgagcacaatgcagccaatgtccgggtcggcgtcgaatgcggttagcgccgcgccaagctcgtccattagcgcactgttgagggcattgagttgtttggggcggtttagggtgagtatgcccacgcggccttcgatgcggattaaaaccagttgctcactcatgtctgtgttctccaatgtggtgcgaaaagttgcttagaaaaagttgtttcgaaagttgcttcgacgtaagcggttgatcatagccaagcggtgagcttgctagggtctttcaccaccagttcggcgatctggttggcgtgggtcgatggccagatgagggggcacgacaacatgcggccatcgcgcgcgacaccggcaaccaatgggtgctgggctacgtcggcgtggcgtctcgcaatgttctccacatcgctcagtgactttacccgccattgatcggtgccatcaaatagtgtcacccattcgtcacccgccgccatgcccgcttgttcgcctgcaccgcctcttgccacgtgggtgatgcggatgccgtctcgctcaacgacacgcatgcccaagcgctgggcgagggtgccgctcttggccgccacggcgacaccgtaatgactaagcagtgcgtgtaccggcaggtcttcggtgctgtgtacccagtgcgcgagctgtgtggcgacgttggcgtgcccttgctggttgagcagggcgtagatgtcggcctcactgatggtgccgcctttgcttttgacccataggccgcgcatgagggtgtcgagatcgccgccttgttggcgcagcatgaggtcggtgcacagcgctattagcgcccctttggtgtagtagctaacggtggcgttgggcgtgttttcgccaatgcggtagtacttgacccacgcgtcatagctagactgggcaacgctttgcagatgccgccctggggtggccgcaacgtggttaatggatttggccagcagcgtgagataggtgggcgtatcaatgagtttggcgcgttgcagaaacaggtcatcgtagtagctggtaaagccttcaaagaaccacagcagctcggtgtagttctcttggttgaagtcgatgcttgcaaactcggatgggcgcaggcgcttgacgttccatgtgtgaaagtactcatggctaatgaggccaagtaattggttgtagccagcgccttgtgcatgggggggcgctgcctcgccagcgacggccgttaggggcaagtcggcacgctggcaaatgagtgcggtgctggcgatgtgctctagcccgccgtagccgttttcagtggcgtgaagcatgaagacgtagcggtcaaagggtagttggcgttgcggttgtttgccgtgccaaaacgtgatctctgtttcgcaaattcggcgggtgtcggcaactaattttttgacatcaaacccgggcgcggtgtggttgccaatgcccgtgacaacgagttcatgcggtacgccagagaccttaaaccggctgacgtaaaaatcacccaaggtaaagggactgtcggcgagctcgccgcagttgcgggcggtgtagcgcccgaagccacgcgcgtcgatttgccgcgcgggcaatgcggtagacagccgccacgcattgaacgcgggcgcggtggggcgctcgacggagatggtttgtatctcgtcttcgcccccgaccacttgcaaacacaggctggtggggttaaagaagccgcgggtgttgtccaaaaaggcggttcgcaccgaggcgtcaaaggcgtagatttggtaattgagctccagcgggcgtttgccgtcggattccactagccactcatttttactgcactgcgtgatttggcaaggcgtgcggccttgcttggctgtgagcgcttgcaggtgttgcgaaaattcacgcaccaaataactacccgcaatccaaacgggtagacgcaggcgctgttgcttttttgggcttgagatgcgcagatgcacaccgaacaggtgcgcttccgcgctgtcaacgcgaatgttgtgatcgatgcgcatggtgttacttgatggcggccagacgcttctcaacttcggcggcagaaatggcgccggggacacgtgtgccgtctgagaagaaaagggcaggcgtgcccgagatacggtgcttttgaccaaacgcgatgttgcggtcaagcgcgctggtgtcgcagctgatggcggcggcgctggtggttagagggacttcattcaccatccagtcttcaaaggctacgccggggtttttgtcgcaccaaatggccttggacttgagcgttgaatccgcgccgagtatggggtacaaaaagatatgcagggtgatgttgtcgacattcatcatgtcacgttcaaagcgcttgcagaagccacagttggggtcttcaaaaaccgcgagttgacgcttgccgttaccgcgtttgatggtgaaggcatctttaaagggcagggcctcaaagggtattgcgctcaatttatcgaggcgctcctgcgtcaggttgcgtttgcccttgaggtcaacgagtacgccttgcagcaaaaattcaccgttggcatcggtgtacaaaatttcggtttcaccaaagcgaacttcgtagaggccggccatgggggtcttggtgacgctgttgatagcgggtaagttgggtagttgcttgggtagcatctcgcgaatcttggcttcctgtgcccagcccatgcttgccatgagagtgaatgcgatgcccacggccaagccgcgcaataaagagcgtgtgggggtgggtgcgagaggtgacgtgtggtgaagcatggtgtggttcgctaggtaggcgttgtttgggggtaagagggtgggtgggttggttcgtgggagggggctgttgggtagcggatgctcgctgttggagcaccatcgtggcaatcagttccccatgccaacacgctgtacccacgacttgagtgggcccatggcattaaagcccgacatgcctgcattgcgtagccaactggcggcggggttgcggcccaaggggttgttgaacaagtgaaagagtccgtgcgtgacccattgcatgggttcggtggcggcgcgtcgacgccgttggtagcgctgaagcacgcgtgaggcacccggagactcacctcgggcgcgtgccgcaacgcagtcactgagcgtttgtacgtcggccaagccaaggttgagaccttgccctgcgagggggtggatggtgtgcgccgcatcgccggctaacgcggtctgctgggcaacccattgcgtggttaagccgacgctcaaggggaaggcaacaggcccgctggtaagggagaggtgccctagcgcgccctgactggcttgggtgagttggtcttctagggcggcggtttgggcggtggtctccatgtccagccacgtctggtgcgcagcgtctggtagcgaccagacaacggccaggtcgtgcccgtcagcgccgcccatgggcagcagggccaaaatatgtgtgccgttaaaccactggtgggcgacgccgccgtggctgtgctcggcgcgcatgcgcaacgccaaggcacggtgggggtagtgcttacttaccatgtcaatacccaaggcggtgcgcgcgataccgctcttgccttcgcaaatgatggtcaatgcgctaggcggtgtctgggctgatggtgacgcgtggtcgtcaaattgcacgcgtgcatggcgtgtgacggcttcggcaagatggtcctctaggacaggcacatcgaccatccacgccaagggctgcgcttgctgtgggggtgcgtcgaattgcagcgcgcctgacgcatcgccaaacacccgcatatgggtcatgggggtcagccacgcggcctgatcgtcttgaggccagacaccgcatgctttgagggtgtctctcgaggtgtggttgatggcgtaggcgcgaatgtcgcgggtgtgcggtggcgcttggggcgcgggcaggctgacggaaaagccttgctctgccaataacaatgccgccgcgtgcgcggtgatgccagcgcctaaaacggtgatgtgccctgattgagtcatggcgttattctattgggacacccacttggggggccagcgatgaccctgccccggaagtgccttaaactctgggtcttgctttttgaggattgtcatgagtttgaaatgcggcatcgttggtctgcccaacgtcggtaaatctaccctgtttaacgcgcttaccaaggctggtatcgccgctgagaactaccctttttgcaccatcgagcccaacgttggcgtggtggaggtgcccgacacccgcctagcgcagctcagcgatatcgtgacgcctgagcgcattgttcctgcgattgttgaatttgtggatatagccggcttggtggcgggtgccagtacgggcgagggcttgggtaacaagtttttggcccatatccgcgaaaccgatgccacggttaacgttgtgcgttgttttgaagatgacaacgtggtgcacgtcgcgggcaaggtggatccgatttctgacattgaggtgattcaaacggagttgtgccttgccgacttaggcgcagtagagaaagccctgcaccgggtctccaagaccgcgcgttctggcgacaaagagtcggtgcgcttggtgtcgattttggagcgctgtcaggcggccttaaacgagggcaagcctgttcgcacgctagatttcagcaaagaagaagcgccgctgcttaagcagtttttcttgattacggccaagccagcgatgttcgttgcgaacgtgtctgaggatggctttgagaacaaccccctgcttgaccgcttgaccgcctttgccaacgagcagaacgcgcctgtggtggcgatctgcgccaagctagaggccgagatgagcgagatgagcgacgaggaccgcgatatgttcctggaagagctggggcagtccgagccgggcttaaaccgtctgatccgtgccgcctacagtttgttgggtttgcagacctacttcactgcgggtgtaaaagaggtgcgcgcttggactatccacgttggggatacggggccgcaggcggccggtgtgatccacactgatttcgaaaagggctacattcgcgcccaaaccattgcctttgatgacttcattgcattcaagggcgagcagggcgctaaggacgcgggcaagatgcgcgcagaaggcaaggagtatgtcgtgaaagacggcgatgtactcaacttcttgttcagctcataagccactgcgcactcgcggcaatggcaaggtagcgggcgaacttgccaatggccatgtacaccgcgcaggccagccagggcattcttagccagcctgcgagggtgcacaccacatcgccgaccacgggtagccaagccagcaaacacgccttgggtccgagtttttccagttgagccaaagcccacgcggcgagcctgccagccgttggggtggcctgagcatccgcgcgtcggtgcgggtgcgcacggttttggtaggcgcggtgcgctgattgcaggccaacgcccatcagccaactcaccatgccacccaaggtgttgcctaccgtcgctagtaacaaggcgggccaaaatagatggggtgagatggcgatgagacccattaatgccgcctccgaccccatgggaagccacgtcgcggagacgaatgccgtgacaaaaacggtagtcaacccccattcgggcagactgaaccagtgaagtaagctcgcaaaaaaggcatccattggcttgagtataggtacaatcatgcttaaattttcagcaagcaccgacgcgtcaatcggtgcttttttgtctctaactgccgtccaacgtgcatatcggtccctaccacctccgcaataacctgttcgtcgcgcctatggctggcgtgacagaccgcccgtttcgccagttgtgtaagcaactgggcgcgggctatgccgtgagcgaaatggtgacatcgcggcgcgatttgtgggactcgcttaaaacctcacgccgtgcaaatcacgccggtgagagcgggcccattgcggttcaaattgcggggaccgacgcccagatgatggccgatgccgcggtgtacaacattgaccgtggcgcacaaattattgatatcaacatggggtgccccgcaaaaaaggtgtgcaacaagtgggccggttctgcgttgatgcaagacgagaccttggcgatcgccattgtcgaagcggtggtgaacgcctgcgcctctaaggatgtcccggtgacattaaagatgcggacgggttgggcggcgcatgcgaagaatgccacgcggttggcgctggcggcggagcaagtgggggtgcagatgttgacgattcacggtcgcacgcgcgagcaaggctataagggttttgcagagcatgagacggtggcggacattaagtcgcgggtgcgtattcccgtggtggccaatggggatattgcatcgcccgaggcggcgcaacgtgtgttgcaagccacgggggccgatgcggtgatggtgggacgcgccgcgcaagggcgcccatggatatttagtgagatcgctcattttttagccaccggacgccacgcgccagcgcccagcgctgtggatatgcgggcgtggatggtggagcacctgcacgcgcactacgcgctttacggcgaatttacaggcgttcggtctgcgcgcaagcaccttggttggtatgcccaacacttgcccatgggtgagcttttgcgtcagcgcatcaatgccttaaccgattgcgcggagcagttggctgcagtcgaggcgtatttcgcagcgtgggacagtgatgatctggccgcgcttggtcgggcatggcaaccgacacagataccgggcagcgcgcagagccagtctgtgcgagagatgcctgtcgacatgacattggccccccttcattgagcgttatatgagccgtaaagacattgaaaagggcgtgcgtgaaagcatgcaaacctacttccaagacctcgccggtagcgagccacatggcctgtacgacatgatggttgatgttgtggagaagcccttgctggaggtggtgatggcgcaagcaggcaataaccagtctcgcgcggcgcagtggcttggtctcaatcgcaacaccttgcgcaaaaaattacttcaccacaagttactcagttaacgctgcaaacgcggcggcctaactcgtcatttccccctttatttttcacgactaccaagcaccatgaacgcactcttatctgtatccgacaaaaccggcattgtggcccttgcgcgcgcgctccacgcccaaggcattggcctgctgtctactggcggcacggccaagctgttggcggaagagggcctgcccgttaccgaggtggccgatatgaccggctttccagaaatgctcgatggtcgcgtcaaaaccttgcaccccaaggtgcacggcggcttgttggctagacgtgacgtgccagcgcacatggcggcgttggccgctcacgggatcgataccattgacgtgttggttgtgaacctgtacccctttgaggcgacggtggccaaagcgggttgcaccttggaagaggccattgagaacatcgatattggcggccccgcgatggtgcgtagtgctgccaaaaactggaaggacgtcgcggttttaacggatgccagccaatacgagaccgtcattgccgagctcgccgctaacggcgcggtgtctaccccgacgaagtttgcgctgtccgtggcggcgtttaaccgcatcagcaattacgatgcggcgatcagcgactacctgtcggcgtatcagttggagagcgataccttacaagcgttccctgcacaggcgaacggacgttttgtgaagttgcaagacctgcgttacggcgagaatccgcaccaatcagcagcgttttaccgtgacctacaccccgcgcccggctcgctggtaacggcgaaacagttgcaaggtaaggagctgtcctataacaacatcgccgatgcggatgcggcatgggagtgcgtgaaaagctttgacgtgcccgcctgtgtgatcgtgaagcacgccaacccctgcggtgtggcgttggccgaggatgcgttgggcgcctataccaaggcgtttcaaaccgaccccacatcggcctttggcggcatcatcgcgctcaacgttgtggtggatgaagcggctgccaaggccattagccagcagtttgtcgaggtgctgatggcgcccgcttataccgagggtgccttggcggtatttcaagccaaagccaatgtgcgcgttttgcaaattacgctgcctgcggcgggtggacagacggcgtgggagcgtgggcgcaacgtgcaagacataaagcgcgtggggtctggtttgttgattcaaacggcagacaaccatgacctgagtttggccgacctcaaagtggtgtccaaagtgcagccgaccgaggcgcagttgcaagacctcttgtttgcgtggaaggtggccacgtatgtgaagtcgaacgcgattgttttctgtaaagaccgcatgaccgtcggcgttggtgcggggcaaatgagccgtttagattcagcgcgaatcgcgcgtatcaaggccgaccatgccggtttgtcattggcgcagtcggtggtcgctagtgatgcgttcttccctttccgagacggtctcgatgtggtggtggaggcgggcgcgactgcggttattcatcccggtggttccatgcgtgatcaagaggtgattgatgcggcggatgagcatggcgtcgcgatggtgtttacgggcgtgcgccacttccgtcactaagccgttgcgggtgttgcttgcgtggccatgttgacctggttggatatctcgcagacggcgagcgatgacgactgggtgaccttagaggtctgcgcgtctgtgacccgtgctgaccagcatcgcgtcgatgctgccgtctgtgagttgcttggttatttgtacgcgcgctgtggccgtcccagcgaagaccccgacgtgccgcccggcccacagtcgtggctgatcgatgtgcaggcgtatgccgagtcggcagccaaagcgccgctggccgtcgccttggattggcgcgacgacgccacggtgtctctgcaatgggtcacagcgggagccgctgacgcgaccacggaagacacccggcgaacccttctcattagtttgggcttgtcacccgcgttagcgttcgcttgcgatgaggcattcgaactggggctctagctgacgccccctaacgcggtgtatgccccgctcgtgggactacagggttgcaaatgtccgctttgccgcggcgatggtgtcgtcaatgtcttgcgcggtgtgcgcggcgctcacaaagccagcctcaaatagcgcgggcgcaaagtaaacaccttggtccaacatgccgtggaagaagcggttaaacaccgcgccgtctgtggtcatgaccttggcgtagttttgtggcaactcagggaagaagaagaagccaaacatgcccccttcgctgtcgccacaaaacgggatacccgcttccttggctgcggcggtcatgccgctgacgagttgttgggtgtgttgattcagttgggtgaaaaagccgtccttttgaatctcttttaaggttgccaaaccgcaggcggtggcgacggggttccctgacaaggtgcccgcttggtagaccgcgccaagtggtgcgaggtgggacatgacttcgcgcttaccgccgaacgcggctaacggcatgccgccgccaatgactttgcccatcacggtcatgtcaggctcaaagcccggaatttctttggcgtacaagctctgagcgcttcccagtgccacgcggaaaccacacatcacttcatcaaatgcgagtagcgctccgtgggcagtgcagagttcgcgacagcgttttacaaatggcacgctggcccgcacgaagttcatgttgccagcaatgggctccatcatcaaacaggcgacttcatcgccgtgttccttaaaggcggcctctagcgcttccacgtcattgaagggcagtactaaagtgtgttgcacaacctctggcgggacgcctgcgctggtggggttaccaaacgtggcgaggccagagccggccttaaccaacagggcatcggcgtggccgtggtagcagccttcaaacttaatgattttgctgcgtcccgtggcgccccgagccagtcgaatggcgctcatgccggcctcggtgcctgagctgaccagtctcaccatttcaatggatggaaccagcttgatgatttcttcggccagttctatttcgcgttcagtcggtgcaccaaatgacagcccttgctctgcagcgctcagcaccgcggcgtgtacggcggggtggcggtgccccaagatcatcgggccccaagagccaatgtagtcaatgtagcgctgatcttctgcgtcccaaaaataggcgccatcgccccgcgtgatgaagcggggtgttccgccgacggctttgaaggcgcgtacgggtgagttaaccccacccggaatggctagcttggcgcgtgtaaataattggtcgtttttgttcatgatgtgtttccggttacgttgcacggttcagtgtttggtgtcgtctagcgggaagtcgcctaacgtgtggtgaccgacatccagcgtcggtgtgtcgggggcgtcggtatcctcggtatcgtctatgccgtcatcttcgccgcgtccccaaaacaagcggtcgggtaaggcgtgtcccatgccgggtgcaaagcctgcatccagactctggtcgagataggtcagcgcttctgcgcaggcggactgcaagtcttcgcctgcacccagcagggccgtgagggcggctgacagggtttccccagccccggtgaaggtggtgtcaaaccgctcgaagcgtgcggtggccaacacggtctcaggggacgctaggtggttttctaagaattgttcaggtgcatttaacccggtgaccaaggtgtaactcactccgtgtagctgcgcggcgcgagctacgtcgcgcggtgtggggggcttttcgctcgcccagtcgggtaataaccagcgacacaaggtgctgtagttgcccacgagaacggcggtttgcgggagcattaactcggtaaatgcgtctaagtaggcatctagagcgatatcgtccatccacgtcaaactgggcatataggcaacgacgggggtgtccgcgtagtcgttggcaatttgcgccactgcgctgatgttttccggactgcccaaaaagccgactttgatactggtcacggggatgtcttcgagcaccatgcgggcttggtcgttgatggcatcagcgtccagcgagacgtggtcttggacggcggtggtgtctcggatgagcaccgcggtgaccacgggcaacatgtgtacagaggcggaacccatggcgccgatgtcagcggccaaaccgccagcacccgttgggtcactggcattgaacgacagcacgcacggcagcgttagctggtgcgcggtcgtgctcgtgtcccgtttgctgggctgcttgggcggcgaatctaaagcatcggtcatgggtttgctcgttgaggggctgtctcagttccttcgggggtatgcttctgcaccgatacaatgtgatcattctatgacacggttttaaaaaaatgagcgactcaacgacttggatgtgcctgatctgcggctggatgtacaacgaagccgagggcgcgccagcggacggcattgccgcaggcaccaaatgggcagatgtccccatgaactggacctgtcccgagtgcggcgcgcgcaaggaagattttgaaatggttcaaatctaattctcgcgcatggcgcccttcagggcttgggcttcttcacgacggcgtagcgagccaacgttcgctcgcgggcggcggcatggtcgacgatgggtttagggtagttctcccctaaggtaacgccggcggtgatcaggtcgaaggggtcagctagccaaggggcgtgtatgcgtttgtccgacagctcagcgagaaccggtaagtagcggcgaataaacttgccctgcgcgtcaaacttctcgctctgtgtcgtgggattaaaaatccgaaagtacggttgcgcatcacacccgctagaactggcccattgccatcccccgttgttggcagacaggtcaaagtcgatgagcttttccgcgaagtagtcagccccccagcgccagtctatgcctaagtctttggtgaggaagctggcaacgaccatgcgtaagcggttgtgcatgtaaccggtttggttgagttggtgcatcgcagcatccaccagtgggtagcccgttgcgccttggcaccacgcgtgaaagagggccttggcgctggcgccgtgttcccacttgatggcgtcgtattcaggcttgaatgcgcgatcgacgatgcgtgggtggtggtgcatcacctgcatataaaaatcacgccaaattaactcccctagccaggtgctggcacccacatggccttggctatgaccggcgaaggcatgttgggcgagggtgcgaatagacacggttccaaagcgcaggtgaacgcttaggtagctggggcccttgacggcagggaagtcacgcgtgtccttgtagcgggccatgcggggcaagaagtcggccaacaaggccgcagcgccagacgcgcccggcgtgatattttgtgccacgaggtcgacaggcgtaaaccccatactggttagtgagggcatgtcgcccagtgccttgaggtctgagggcagggcatcggtttgggccagggcggttgcgtaacgctcggtggggtaggcctttaggtagtagggctctagcttcttgagccaggcgtttttgtagggcgtgaagacgccaaaggggcgcgattgttgcgtgaggacctcgctacgctcgaaaatgcattggtctttgtaggtgttgagcaggatgccgttgtgcgcaaggtgcccaaaaatagcggcgtctctcgccagtgcctgtggctcatcgtcgtggttggcaaataccgcatccacgcccaaggctttcgccgtgcgcggtatcgctcgctcgctctggtcgtggaggcatagcacgggctgggcattggcgccggctaccgcgcgtagctgggtgttgaggtccaccaagctgctgtggataaaggcgacgcgccgatcggttgtgggcaaggtgtccaaaatggccttgtcgaatacaaagatacaaaaaacggtgtcgcactgcttgagcgcgtgataaagcgcggcattgtccgtcaagcgcaggtcccgcctgaaccacatcaggccttttgtgtacttctttttcatcgtgtagattgctcgattgggtcgtgagagggtgcggattgtcggcagcgcccgcaccccttaaaataacatcatgcctactgattctgccgcgattgacctcacccatcatttcctcattgctatgcccgggttggaggacgaccttttcgctcgcagcgtggtttatgtgtgcgagcacagtgcgcggggcgcgctgggcctgattatcaacaagccgagtgatctgccgctggccggtctctttgagaagatcgcgttgcgactgcatcgtgacgacttaaccgatgcgcctgtgttccggggtggccccattcaaaccgaacggggttttgtgttgcatgcgcccatggggcagggcggtgagtcggtttactcttccactttggtgattcctggcgacggctctggcctgaagggtgtggactggccaaactctgaaattcatgttgcgcttagcgtggaggccgatgacgatgcagcgccgtccgcgccgcctgaagccccaaaatatgggcctgcgcgcctagaaatgaccacctctaaagacgtgctggaggcaatggctgaaggcgcaggccctgctcgggtgttggtcacgttgggctatgccacttggggcaagggccaactcgaatcggagttggctgagaatgcctggctgaccgtgcccgcggacgagtcgattatttttgacacaccgcctgagcttcgctacagccaagccatgggtttattgggtttggatgcaggcatgctgcacggtgaggcaggacacgcctgatgtccatgcggccactaccgccagtgatcgcctccgatgtgcagttgttcctagcttttgattatggggagaagcgcaccggtgtcgccagcggtaaccgcctgacccgcagcgccacccccttgggcacgatcgccgcgcaaggggacgcgaagtggcctcagattgcccaatacctgaaagactggtcgccacaggccgtcgtgattggggtgccacggcacccagacggcgccgaccacgagaacacgcttgcggcgcaaaagtttggcagacaaatcgcgggtcgttttgccgtgactgtattcgaaaccgatgagcgctacaccaccaccgaagcgcatagcctcgctgcaaaggatgcagacgccgtggccgcttgtattattcttgagcaatttcttcggagcctaccgtgaccagccagtttgataacaccgtgcaggcagatgccttggacgcagagggtctctatcagcaactattgacggcgattcgccccttgacggcgacggctgacaagcccgtgcgtttagttggtatcgcctccggcggcgtgtggcttgcccaacgcctgcagaaggacttgggcttggcgggggagtcgggcgtgatttccagcagcctgcaccgcgatgacttttccaagcgtggcctcagctctatgggggtacaaacgaaattgccttttgacgtgaacggcgccaccgtgtggcttatcgacgatgtgctgtacaccgggcgcacgatacgcgccgtgctgaacgagttatttgactacggtcgcccagccgatgtgaggttggccgttttggtcgatcgcggtcagcgggagttgcccgttcaggccgatctggtggtggctcgttgctcggtgccgagcacgcagtcactggagctgtcgcaaacggacggcggtcgtctaacctttaggattgaaactgcgggttgaacgccacagaatcactttgcaccgccacactttattgccctagcgcccctatgcgaacacaacgtaacccccaactgaacgccaacggcgagctcatacacctgctctcaaccgaaggcctgtccaaagagatgttgacccacatcttggacacagccaccaatttcgtgagtgtcagcgaccgcgaggtcaagaaggtgcctttgctgcgcgggaaaagtgttttcaatctgttttttgaaaactccacccgtacacggaccacattcgatatcgctgccacccggttgagcgccgacgtggttaacctagatatcgcgcgctcctctgccagcaagggcgagagcctgttggacaccattgacaacctttcggcgatggccgcggacatttttgttgtccgccacaacgagtctggcgccccctacctcattgcgcaacacgtggggcctcatgtgcacgtggtgaacgcgggcgatgggcgacacgcccatccgacccaagccctgctggacatgtacacgattcgccacttcaagggggacttttccaatttgagtgtggcgattgttggtgacgtggcgcactcgcgtgttgcgcgctcaaacattcacgccttgacgaccttgggctgccctgacctgcgtgtggtgggccccaagaccttggtgccgaatgacatggcacaaatgggcgttcgggtctgtaacgatttgcgctctggcatcgacggtgtcgatgtggtgattaccttgcgtctgcaaaacgaacgcatgagtggcgccttgttgccgtccgcgcaggagtttttcaagagttacggcctgacgcccgagcgcctgcagtgggctaagcccgatgccattgtgatgcacccggggcctatcaatcgaggggttgagattgcatcgtcggtcgttgacgggccacaagcggtgattttgtcgcaggtaaccttcggtatcgcggttcgtatggccgtgatgtctattgttgccagccacgagggctaatgactggccatggcgagtgcaccccaacaaccgacccctttaacccagtacgtgttttaaatcgcctgagcaccatatcgatatgaagattctgattcaatccggacgtgtcatcgaccccactagcgggctagaggccgttcaagaccttgccattgccgctggtcgcattgtggcgatgggcgcgcaggtcaaagacttttcgcccgagcgtgtgatcgatgccaccgactgtgtggtggcgcccggcttggttgatctgtgcacgcgcttacgcgagccggggttcgagcatgagtcaatgttggagtctgagatgtccgccgccgttgcgggcggcattacctccttggtctgtccgccagatactgacccggtcttagatgagccgggcttggttgacatgctcaagtttcgaaccaaaaagctgcgtcaagcacgcgtcttcccgttgggggctttgacccgtggcttggagggggaggtgctgaccgaaatggccgagctcaccgagtcaggttgcgtgggttttgggcaagcggatgcgccgatacagaacacgcaggtactgcaacgcacgtttcaatacgcggcctcgtttggttacagcgtctggttgcgtccgcaagattactggctgggtcagggtgtcgctgccagtggtccgttagccacgcgcatgggcttgtctggcgtgcctgtgtctgctgaggtgattgcgctagaaactatttttgagctgatgcgaggcaccccagcgcgggtgcacctctgtcgtattagcagtgcccgcggggtggacttggtgcgcgccgcgaaggccgaaggcttgtccgtgacctgcgatgtcagcgtgcacaatttgcatctcattgacgtggatatgggctattacgatgcgcgcttgcgtttgcaaccacccgttcggcaacagcgtgaccgcgacgccctgcgtgcggggttggcggatggcactattgacgccttggttagcgaccacaaccccgtcgaagcggatgccaaaaacctgccttttgcgcaagcagaaccgggcgccactgcggtggagttgttgctgagtttggctcttaaatggggacgtgaagaccaggtgccgttgcagcgcgtgatcgcggttttgacgcaagggcctgtcaaagttctgggtcaaagtctgggaagtttgcaagccagcttaggccaaatcacccttggtggtgtggcggatatttgtgtttacaagccggatgccgcgtgggtggtgggcgcagacacattgcgaagccaaggaaagcacaccccctttgcgggttatgaattgcccgcaaaagtagccaccaccattgccggtggctatattgcctttgacgcagtctgagcgcgatgcgagcaatccctgcggcttggcgcatgatattgggcgtgaatcacgttctgcgcggtctacgaaccattaacaaatactttgccacggcaacgcaaaccgagcgtgacgcgatggtgcaggcgtggtctctcgccttgcttgagctgctaaatgttgaattggtcactgatggtgctgagcctgtacccggcttggtggttgcaaaccacgtctcgtggttggatatcttggtgatgaatgccgcacaccccgttcggtttttatcgaaatcagatgtcaagaagtggcccttactcggccgcctgattgcggggtctggcacgttatttatagaacgtgcaaagcgccgcgatgcgctacgtgtggtgcagcaaattacgacgtatttacgtgatggtcaccgcgtggcgatctttcccgagggcacgaccaacgatggtattcatgtgctgccgtttcatggcaacttgattcaatccgctatcgacgccgaggcggcagtgtgcccggtcgggatacgctacatggacaaggccagtggccaacgcagcttggcgcccgcctatattgatgacgacacgctggtgggctccatttggcggacgctgcgcagcggtcgcatggtggcgcgggtgcgcttgggtgagccacaactaaccgtgggacgtgaccggcgcgcatgggcgagcgaccttcaacgcgcggtcgtcaccctgaccgctgagtaaatgcgaggccgtgcgacgtgcggctaaacctcggggcgtcagccttggctggcttggcggcgggccaccatcttttctgcgctgactttgcggtcggcattgacctgagtaaccgttgcacgcgttgacaggtgtcgcaggtactctttgacgggaagttccgatagaaaatcttggccgtaaataattttggtggccgtggagatgagcggcaggtgggcaactgccgtgcagtcagcgaggctgaaggtatcgcccccaataaacggtgtgaagcgtgccagcgatgcgaaggctgcaatgtttttcttcagttgcgtcgccgtcttttcctttaagttgtcacttaccttgccgccaaaaaacgcctctttgtataggtttcgcgcgaccaactcaaggtgtaggtcaatgtaggtggcgagctcacgcaccttggcggcttgaaaggggtctgccggcaccagcgggtgcgcggggtactgttgctctatgtagtcgagcatcacagtggactcgcataaagcgcccgacggcgtcagtaggtaaggcaccttgcctagcggtgaggcatgggtgtcaacctccgaggtccacacctccgactcttgaaacggaacacctttctcgagcaatgccaatttgactttgttgtaatagttgcttgctgaaaagccgcataaagtgatcatgtgatgcccgttggttgagatggctggttaggaagagtgcgtgtaaacgatgcgataattttgccacggaagcgggctctgtcagccccctctgtgttgcccccgctttgcgtcacgtaatggcgtatcaatttttttgaggttttcatgcgccaacgatggtctactttctcgctagccgcagcggtcttttctgcactgctcacggcggctcccataacggtaaatg

SEQ ID NO: 3 - DNA, 13171 bp, Artificial Sequence
  Synthetic Oligonucleotide
  misc_feature (1)..(6491): n is a, c, g, or t
nnnnnnnnnnnnnnnnnnnnnnnnnnnnnnnnnnnnnnnnnnnnnnnnnnnnnnnnnnnnnnnnnnnnnnnnnnnnnnnnnnnnnnnnnnnnnnnnnnnnnnnnnnnnnnnnnnnnnnnnnnnnnnnnnnnnnnnnnnnnnnnnnnnnnnnnnnnnnnnnnnnnnnnnnnnnnnnnnnnnnnnnnnnnnnnnnnnnnnnnnnnnnnnnnnnnnnnnnnnnnnnnnnnnnnnnnnnnnnnnnnnnnnnnnnnnnnnnnnnnnnnnnnnnnnnnnnnnnnnnnnnnnnnnnnnnnnnnnnnnnnnnnnnnnnnnnnnnnnnnnnnnnnnnnnnnnnnnnnnnnnnnnnnnnnnnnnnnnnnnnnnnnnnnnnnnnnnnnnnnnnnnnnnnnnnnnnnnnnnnnnnnnnnnnnnnnnnnnnnnnnnnnnnnnnnnnnnnnnnnnnnnnnnnnnnnnnnnnnnnnnnnnnnnnnnnnnnnnnnnnnnnnnnnnnnnnnnnnnnnnnnnnnnnnnnnnnnnnnnnnnnnnnnnnnnnnnnnnnnnnnnnnnnnnnnnnnnnnnnnnnnnnnnnnnnnnnnnnnnnnnnnnnnnnnnnnnnnnnnnnnnnnnnnnnnnnnnnnnnnnnnnnnnnnnnnnnnnnnnnnnnnnnnnnnnnnnnnnnnnnnnnnnnnnnnnnnnnnnnnnnnnnnnnnnnnnnnnnnnnnnnnnnnnnnnnnnnnnnnnnnnnnnnnnnnnnnnnnnnnnnnnnnnnnnnnnnnnnnnnnnnnnnnnnnnnnnnnnnnnnnnnnnnnnnnnnnnnnnnnnnnnnnnnnnnnnnnnnnnnnnnnnnnnnnnnnnnnnnnnnnnnnnnnnnnnnnnnnnnnnnnnnnnnnnnnnnnnnnnnnnnnnnnnnnnnnnnnnnnnnnnnnnnnnnnnnnnnnnnnnnnnnnnnnnnnnnnnnnnnnnnnnnnnnnnnnnnnnnnnnnnnnnnnnnnnnnnnnnnnnnnnnnnnnnnnnnnnnnnnnnnnnnnnnnnnnnnnnnnnnnnnnnnnnnnnnnnnnnnnnnnnnnnnnnnnnnnnnnnnnnnnnnnnnnnnnnnnnnnnnnnnnnnnnnnnnnnnnnnnnnnnnnnnnnnnnnnnnnnnnnnnnnnnnnnnnnnnnnnnnnnnnnnnnnnnnnnnnnnnnnnnnnnnnnnnnnnnnnnnnnnnnnnnnnnnnnnnnnnnnnnnnnnnnnnnnnnnnnnnnnnnnnnnnnnnnnnnnnnnnnnnnnnnnnnnnnnnnnnnnnnnnnnnnnnnnnnnnnnnnnnnnnnnnnnnnnnnnnnnnnnnnnnnnnnnnnnnnnnnnnnnnnnnnnnnnnnnnnnnnnnnnnnnnnnnnnnnnnnnnnnnnnnnnnnnnnnnnnnnnnnnnnnnnnnnnnnnnnnnnnnnnnnnnnnnnnnnnnnnnnnnnnnnnnnnnnnnnnnnnnnnnnnnnnnnnnnnnnnnnnnnnnnnnnnnnnnnnnnnnnnnnnnnnnnnnnnnnnnnnnnnnnnnnnnnnnnnnnnnnnnnnnnnnnnnnnnnnnnnnnnnnnnnnnnnnnnnnnnnnnnnnnnnnnnnnnnnnnnnnnnnnnnnnnnnnnnnnnnnnnnnnnnnnnnnnnnnnnnnnnnnnnnnnnnnnnnnnnnnnnnnnnnnnnnnnnnnnnnnnnnnnnnnnnnnnnnnnnnnnnnnnnnnnnnnnnnnnnnnnnnnnnnnnnnnnnnnnnnnnnnnnnnnnnnnnnnnnnnnnnnnnnnnnnnnnnnnnnnnnnnnnnnnnnnnnnnnnnnnnnnnnnnnnnnnnnnnnnnnnnnnnnnnnnnnnnnnnnnnnnnnnnnnnnnnnnnnnnnnnnnnnnnnnnnnnnnnnnnnnnnnnnnnnnnnnnnnnnnnnnnnnnnnnnnnnnnnnnnnnnnnnnnnnnnnnnnnnnnnnnnnnnnnnnnnnnnnnnnnnnnnnnnnnnnnnnnnnnnnnnnnnnnnnnnnnnnnnnnnnnnnnnnnnnnnnnnnnnnnnnnnnnnnnnnnnnnnnnnnnnnnnnnnnnnnnnnnnnnnnnnnnnnnnnnnnnnnnnnnnnnnnnnnnnnnnnnnnnnnnnnnnnnnnnnnnnnnnnnnnnnnnnnnnnnnnnnnnnnnnnnnnnnnnnnnnnnnnnnnnnnnnnnnnnnnnnnnnnnnnnnnnnnnnnnnnnnnnnnnnnnnnnnnnnnnnnnnnnnnnnnnnnnnnnnnnnnnnnnnnnnnnnnnnnnnnnnnnnnnnnnnnnnnnnnnnnnnnnnnnnnnnnnnnnnnnnnnnnnnnnnnnnnnnnnnnnnnnnnnnnnnnnnnnnnnnnnnnnnnnnnnnnnnnnnnnnnnnnnnnnnnnnnnnnnnnnnnnnnnnnnnnnnnnnnnnnnnnnnnnnnnnnnnnnnnnnnnnnnnnnnnnnnnnnnnnnnnnnnnnnnnnnnnnnnnnnnnnnnnnnnnnnnnnnnnnnnnnnnnnnnnnnnnnnnnnnnnnnnnnnnnnnnnnnnnnnnnnnnnnnnnnnnnnnnnnnnnnnnnnnnnnnnnnnnnnnnnnnnnnnnnnnnnnnnnnnnnnnnnnnnnnnnnnnnnnnnnnnnnnnnnnnnnnnnnnnnnnnnnnnnnnnnnnnnnnnnnnnnnnnnnnnnnnnnnnnnnnnnnnnnnnnnnnnnnnnnnnnnnnnnnnnnnnnnnnnnnnnnnnnnnnnnnnnnnnnnnnnnnnnnnnnnnnnnnnnnnnnnnnnnnnnnnnnnnnnnnnnnnnnnnnnnnnnnnnnnnnnnnnnnnnnnnnnnnnnnnnnnnnnnnnnnnnnnnnnnnnnnnnnnnnnnnnnnnnnnnnnnnnnnnnnnnnnnnnnnnnnnnnnnnnnnnnnnnnnnnnnnnnnnnnnnnnnnnnnnnnnnnnnnnnnnnnnnnnnnnnnnnnnnnnnnnnnnnnnnnnnnnnnnnnnnnnnnnnnnnnnnnnnnnnnnnnnnnnnnnnnnnnnnnnnnnnnnnnnnnnnnnnnnnnnnnnnnnnnnnnnnnnnnnnnnnnnnnnnnnnnnnnnnnnnnnnnnnnnnnnnnnnnnnnnnnnnnnnnnnnnnnnnnnnnnnnnnnnnnnnnnnnnnnnnnnnnnnnnnnnnnnnnnnnnnnnnnnnnnnnnnnnnnnnnnnnnnnnnnnnnnnnnnnnnnnnnnnnnnnnnnnnnnnnnnnnnnnnnnnnnnnnnnnnnnnnnnnnnnnnnnnnnnnnnnnnnnnnnnnnnnnnnnnnnnnnnnnnnnnnnnnnnnnnnnnnnnnnnnnnnnnnnnnnnnnnnnnnnnnnnnnnnnnnnnnnnnnnnnnnnnnnnnnnnnnnnnnnnnnnnnnnnnnnnnnnnnnnnnnnnnnnnnnnnnnnnnnnnnnnnnnnnnnnnnnnnnnnnnnnnnnnnnnnnnnnnnnnnnnnnnnnnnnnnnnnnnnnnnnnnnnnnnnnnnnnnnnnnnnnnnnnnnnnnnnnnnnnnnnnnnnnnnnnnnnnnnnnnnnnnnnnnnnnnnnnnnnnnnnnnnnnnnnnnnnnnnnnnnnnnnnnnnnnnnnnnnnnnnnnnnnnnnnnnnnnnnnnnnnnnnnnnnnnnnnnnnnnnnnnnnnnnnnnnnnnnnnnnnnnnnnnnnnnnnnnnnnnnnnnnnnnnnnnnnnnnnnnnnnnnnnnnnnnnnnnnnnnnnnnnnnnnnnnnnnnnnnnnnnnnnnnnnnnnnnnnnnnnnnnnnnnnnnnnnnnnnnnnnnnnnnnnnnnnnnnnnnnnnnnnnnnnnnnnnnnnnnnnnnnnnnnnnnnnnnnnnnnnnnnnnnnnnnnnnnnnnnnnnnnnnnnnnnnnnnnnnnnnnnnnnnnnnnnnnnnnnnnnnnnnnnnnnnnnnnnnnnnnnnnnnnnnnnnnnnnnnnnnnnnnnnnnnnnnnnnnnnnnnnnnnnnnnnnnnnnnnnnnnnnnnnnnnnnnnnnnnnnnnnnnnnnnnnnnnnnnnnnnnnnnnnnnnnnnnnnnnnnnnnnnnnnnnnnnnnnnnnnnnnnnnnnnnnnnnnnnnnnnnnnnnnnnnnnnnnnnnnnnnnnnnnnnnnnnnnnnnnnnnnnnnnnnnnnnnnnnnnnnnnnnnnnnnnnnnnnnnnnnnnnnnnnnnnnnnnnnnnnnnnnnnnnnnnnnnnnnnnnnnnnnnnnnnnnnnnnnnnnnnnnnnnnnnnnnnnnnnnnnnnnnnnnnnnnnnnnnnnnnnnnnnnnnnnnnnnnnnnnnnnnnnnnnnnnnnnnnnnnnnnnnnnnnnnnnnnnnnnnnnnnnnnnnnnnnnnnnnnnnnnnnnnnnnnnnnnnnnnnnnnnnnnnnnnnnnnnnnnnnnnnnnnnnnnnnnnnnnnnnnnnnnnnnnnnnnnnnnnnnnnnnnnnnnnnnnnnnnnnnnnnnnnnnnnnnnnnnnnnnnnnnnnnnnnnnnnnnnnnnnnnnnnnnnnnnnnnnnnnnnnnnnnnnnnnnnnnnnnnnnnnnnnnnnnnnnnnnnnnnnnnnnnnnnnnnnnnnnnnnnnnnnnnnnnnnnnnnnnnnnnnnnnnnnnnnnnnnnnnnnnnnnnnnnnnnnnnnnnnnnnnnnnnnnnnnnnnnnnnnnnnnnnnnnnnnnnnnnnnnnnnnnnnnnnnnnnnnnnnnnnnnnnnnnnnnnnnnnnnnnnnnnnnnnnnnnnnnnnnnnnnnnnnnnnnnnnnnnnnnnnnnnnnnnnnnnnnnnnnnnnnnnnnnnnnnnnnnnnnnnnnnnnnnnnnnnnnnnnnnnnnnnnnnnnnnnnnnnnnnnnnnnnnnnnnnnnnnnnnnnnnnnnnnnnnnnnnnnnnnnnnnnnnnnnnnnnnnnnnnnnnnnnnnnnnnnnnnnnnnnnnnnnnnnnnnnnnnnnnnnnnnnnnnnnnnnnnnnnnnnnnnnnnnnnnnnnnnnnnnnnnnnnnnnnnnnnnnnnnnnnnnnnnnnnnnnnnnnnnnnnnnnnnnnnnnnnnnnnnnnnnnnnnnnnnnnnnnnnnnnnnnnnnnnnnnnnnnnnnnnnnnnnnnnnnnnnnnnnnnnnnnnnnnnnnnnnnnnnnnnnnnnnnnnnnnnnnnnnnnnnnnnnnnnnnnnnnnnnnnnnnnnnnnnnnnnnnnnnnnnnnnnnnnnnnnnnnnnnnnnnnnnnnnnnnnnnnnnnnnnnnnnnnnnnnnnnnnnnnnnnnnnnnnnnnnnnnnnnnnnnnnnnnnnnnnnnnnnnnnnnnnnnnnnnnnnnnnnnnnnnnnnnnnnnnnnnnnnnnnnnnnnnnnnnnnnnnnnnnnnnnnnnnnnnnnnnnnnnnnnnnnnnnnnnnnnnnnnnnnnnnnnnnnnnnnnnnnnnnnnnnnnnnnnnnnnnnnnnnnnnnnnnnnnnnnnnnnnnnnnnnnnnnnnnnnnnnnnnnnnnnnnnnnnnnnnnnnnnnnnnnnnnnnnnnnnnnnnnnnnnnnnnnnnnnnnnnnnnnnnnnnnnnnnnnnnnnnnnnnnnnnnnnnnnnnnnnnnnnnnnnnnnnnnnnnnnnnnnnnnnnnnnnnnnnnnnnnnnnnnnnnnnnnnnnnnnnnnnnnnnnnnnnnnnnnnnnnnnnnnnnnnnnnnnnnnnnnnnnnnnnnnnnnnnnnnnnnnnnnnnnnnnnnnnnnnnnnnnnnnnnnnnnnnnnnnnnnnnnnnnnnnnnnnnnnnnnnnnnnnnnnnnnnnnnnnnnnnnnnnnnnnnnnnnnnnnnnnnnnnnnnnnnnnnnnnnnnnnnnnnnnnnnnnnnnnnnnnnnnnnnnnnnnnnnnnnnnnnnnnnnnnnnnnnnnnnnnnnnnnnnnnnnnnnnnnnnnnnnnnnnnnnnnnnnnnnnnnnnnnnnnnnnnnnnnnnnnnnnnnnnnnnnnnnnnnnnnnnnnnnnnnnnnnnnnnnnnnnnnnnnnnnnnnnnnnnnnnnnnnnnnnnnnnnnnnnnnnnnnnnnnnnnnnnnnnnnnnnnnnnnnnnnnnnnnnnnnnnnnnnnnnnnnnnnnnnnnnnnnnnnnnnnnnnnnnnnnnnnnnnnnnnnnnnnnnnnnnnnnnnnnnnnnnnnnnnnnnnnnnnnnnnnnnnnnnnnnnnnnnnnnnnnnnnnnnnnnnnnnnnnnnnnnnnnnnnnnnnnnnnnnnnnnnnnnnnnnnnnnnnnnnnnnnnnnnnnnnnnnnnnnnnnnnnnnnnnnnnnnnnnnnnnnnnnnnnnnnnnnnnnnnnnnnnnnnnnnnnnnnnnnnnnnnnnnnnnnnnnnnnnnnnnnnnnnnnnnnnnnnnnnnnnnnnnnnnnnnnnnnnnnnnnnnnnnnnnnnnnnnnnnnnnnnnnnnnnnnnnnnnnnnnnnnnnnnnnnnnnnnnnnnnnnnnnnnnnnnnnnnnnnnnnnnnnnnnnnnnnnnnnnnnnnnnnnnnnnnnnnnnnnnnnnnnnnnnnnnnnnnnnnnnnnnnnnnnnnnnnnnnnnnnnnnnnnnnnnnnnnnnnnnnnnnnnnnnnnnnnnnnnnnnnnnnnnnnnnnnnnnnnnnnnnnnnnnnnnncggtagggcggtgtggtcagatgactaagcatttatggttgctcaaaatagatggacgtcactaagcgtgacgcggtttaaaacttacttcgccaactggtgctcgcgacagcattgagaatccgggtcgttatacgtccgcattatgcttaaaaggataaatctaatttattacctaaactctatttatacccttgtggatctatctctgtttgatagattgaaactctttatgtgaggctcatttgaaatggaaaaactaaccgtaacggcgcatatgaagacaccgttcataacaggtgggggctacatgacctttgacgctttgctcgccggtatcttatttgaccagctgcaagatgttgaagccgcgcacgcctccgtccctatcaaatgcactgacggcttgttccatgcaagcgcggccatgtacgaacccttggatcagtcaagagttgcgttcgttgcaaacatgagagccgaccactctcttgatgcagatctgtttccacggaagaaggacggaacaatgcgcaagatgggccgactaaggcggcgtgactttggcgctgtcatgaatagctacgattcaaaacaagttgattcacttgaatggcatgttgaaggtgattccgaggagatattaaaactaattgagccgatttcttttattggcaaacgcagagcaagtggctttggcgaagttcatcgttggagcattgaatcttctgaactggatggactcatgggctacctgaacgagcctttgcgcccaatacctgttgagcgtttcaagggtaatacaggctcactcaaagtagatgctgcttggcggccggcctattggcatccagccaacagagcgatttgctacgctccggagacacctcaatgaatacctttgattttttcaacgataattttggcaggctattagttgaacaaggcaacgacccatttgagaatgcagcgaaagcactcagatccagtcaccccttagcatctggaaaaaattcaaggctaggtagtggctgggcgatcgttaaagagaagaacgcagttgtgcagcttaagctggccgctactggaattacttatgacgatcgcacacggtttgaagcgatcattgatgctcttgaaaactgggacaatgagccgactatttttatggtgtttgataaagcaccacttcccatctcaaacctgtttctaaccgtggatttaagagccgttagggtttgcacacctggcggtgtttacagctttgactacacgctagaaccaactgaaaactcaccacaattttacaaaaccctttacaaacagaggatgaaaaatgcttcgtgaatatgaaataaacaaaccggccaatttacgtggataccccttgcatagaatggtggctgaattaacaaagaatgagccaagcctcttcagcgatgaaggtgcgaccatgcttgtgcgaactgaagcaacaattgacttagaaccaaaggctttgaaacagataagccttgggcagctaacggcatttgagctccgcgcatgcgtttctaaaaaacgtaagggcaaacatatttacccgcctagcgacgactggagagtgagacacgaatggctaaagaataaagctaatagcaacgggtttgagatattgaccctgcattcttcatcaaaaatggtgcggatacaggaccaagcacgttccttcaaagttgatcaaactgactttacgggaattttaaaagtcacagatgaagcccaattcagaatggccctagctaaaggaattggctccactgccaagacttttggttttggcatgctagttatttaaaggagaacaaaatgatcgttattaaagcaagtattaaaactgaagcacccctctcaattgccatgcctgtggcccaaggatcccgagaaaatgcgtacggcaactttccattaatggtacgcggcatagatgaagagggagaaaagcaatacaccggatacctgcctgctacaactattcgaggctttctgagacgaggcatcgtgttggaggaaatgaaagaagcggcggaaaacaatcaacattacaaactgaaccaagcctatgctgaactgattggtcaggatgccgcaagcgaacaagggggcggggatatagacctcgtcgctttaaaggatacgcgtgaaggatcacccatattagatttgtttggctcgggactggggatcaaatcaaggctgcgagtcagtcattttataccctcgcacaatctactgcctgacccgattacaggtacaagaaaagatttagatgataatgaagaagcctttgacctcatagatgcagatgaaaaaagtgagttcttcgagcgatccgaagccaacagcaagcgcgcaagagccgcaagccagctggacggattacagcgacaacgcagggccgctgaacgcaagggcgaagatacaaaggatttagccgaacaagtggctgctgcagaagcgctggtgaagaaatacgaggcggttatgggcgatatgaagaactcgtcacgaacaatcctaacgcattacgccttagccgctggtttagagctagagggtaaattggtcatagagaacccgaaggaacgcgacatcggactgcttgaaacagggttaaatgccttgtcgttattccccattcttggcgcgcactcagcaagagggtgtggcgaaatatcaggtacatttgattttattaaggatggcgcattgtttaaacgaatcacaataggaggctttgaagctgcaagagttgatgacttttagaaatcaggtttgcttatttttgttaacaaccaaaggtttacagacgatcagatgcagccaccctctcaaggggtggttactacaacacaggcgaacgggatcagacggaactttaggatgcagccaccctctcaaggggtggttactacaaccaagcatggcagtagatcaatatcctagtgatgcagccaccctctcaaggggtggttactacaacaccaaggttgatttaccggattggtgaaggatgcagccaccctctcaaggggtggttactacaacattatcttcaaacaaatcatagtaattgttgatgcagccaccctctcaaggggtggttactacaaccaggcacgtcatcatggctggtcaggactagatgcagccaccctctcaaggggtggttactacaacgtatataccagtcgcagtcgttcatgccggatgcagccaccctctcaaggggtggttactacaactacgtttgcggacactgacgggtcgccgcgatgcagccaccctctcaaggggtggttactacaacatcacgggcgctacaaacggataaccacgggatgcagccaccctctaagggggtggttactacaacatgtaaggcatcggacggcagataacgtcagattcagccaccccacttgattggagggtggttatttttgtttttaaaattgatacttggtatatgactgttaacttccgatcaaccgaacaagctaatttttcaaagcttctacaggctcacctatctaacccagatgcccctcttcttttggaaggtgcgaccggattgggcaagacgagggcctatctttatccgttgttggaagctgctaacaacggtaagaaaatcgcaatcattcttcccacacgtcaactgattgagcagttgctgaactcagaagacattgacgtatgcaataaagccggcattgagattcaagcgttcatcccgaagcgttactttgaagatgcagatcaatacggcgagcagcgtcaaaaagctttaaatgccccggtgatgctctgcaccagcgcctcagtaatcattgatcaaagactgggcggtgattacaacggcgtcaccaagcgggattacttgttatttgacgaggctgatcagttacctgatgttgcagcgcttcagtctgacgtgacaattaactatcaaacactgggggatctcaacataaagccggtatccgctcagcaagcagcagaagaacttctgaaaaagaaacacgttgagccagaagacagggccaaagctaagattattctagaagcgttagctgagccattttggtttatgtccgccggccttgatgatgaaggcgggattgttctgtatcacaagctacccgggagactccttaaacggatcgctaatcagcgaaatactgcattcgtttctgcaaccctgactattggtaacaagtttgacgacttcacgcgagctatgggaatcagtgaaatcagccgtcattcatcagccgttgagccaaagctgcatggctatttaaccttttcgttgcaccagtcggaggaagttaatagtcccgaatggattcaggcagtgattgatgcaatcgacgaagctcaaaaaccttgccttgttgttacctctagctacgagacagcgactaatcttgttgagctatatccaagctcaattgcgaggaaccaagaagaatcagagacagctagccaagcagctatacgtttagccaatgatgattcaaaagataccctaattgcgacagcggcttgggctggcttggacacgcccgtggtatggaaatctattgttgttccaaagatcccgttctcaaaacctacgattattgatggtcaggttgaaagtcactatatcaatgcaaggaacgcagccatacgacggatgcgccaagttatcgggagaggtttacgaagcccggatgccgaatgcgacatcattatttgtgatcctaggtggcaaaaaatagagtctttcgtccctgatagattcaaacaaaactggtccaacaaaaccttcagcgaaggcgatcggtatgaactgactctttcggcagttgaaagaaatccatctgttaggaggaatgcaattaagcattatggcttgaagtgttatgcctgtgacctcacgcccaaaacatcaaatcaaatagacgttcaccatcttgacccgattgctgaagggcaacgacagacaataatggaagatgtgataccgctttgtgcgaattgtcatcgcttggcacactccgagcgaccgcctctaacaatagaggaaatcaagagcgtactataatttttttgcaaacatctctacagacagaaattagctgctgtgattgaggaactgctgatcgtgctcgagggatggttacgcttgccatgatttaacaaaaggctctaggttatcatttagattttttatttaaccgggtccagagcgttcagggattaatccgaaatgattagcggaaggttcaccctgaattatggctccagggcaggattgccttacgcccccagttatcagttttgttgaggaggaatactgctaccgagttagtttaaaacttgatttataagctagtattttagggttagagcttgatgcttcgctgctccggctgccatttcgatacgttcaattgcattcggccaatgcctaaggcgcgcacccatttagccgcagtgtctatagaactccaagtcttcaatctaccctttacggtgtgcgcgggttttgcttcgccgccggcattgaccaagacgtaaaccgttgacccttcggccatgatttctattttcttaatggcaccggcttcaataagtgccctcaagattttttcattcatcactaacggcccaaattgcgataggttaatgaatatggtacaaacgcgttacatttgcaatacagttgtttgagaatggtagccataaaaacagcaactcttaacctgaggatcgaccctctgctcaaagaaatgctgcgatcggctgcagttaaggagcatcgtagcctcgcgaacatggtcgaacagatgattcgagaacactgtaccgcccacggcattcctatccctgagcagcaagaaatgttcgacaaacagtgatggttatgagggggcttcttatgcgcttgtcagtaggggccacttttggggtccgcctcaaggttgagtgggatcgtaagagagcaaattggaacgtgtagtagatggaaggctagttaagtgcctgtatatggaaggctagttaagtgcctgtatatggttgctcggctcatgccgctaagcctgataacttctggcagtctaacgagcctgttagcctcaattggatcctgcatccagttctatctagtaagtcttgtttcagtcaaagtatctattcacttataagatgcttttcgcaccattgctgtttacatggtttgttcatgtcccagcaatttgctgtcattactcctgcttcggtaatttctgttgttgtggtagttgagtccccgtttgtgattaaagaatacctaaatctatctccatacaatccagcattgatagaaagatcggacgaaaaataaaaaacgtttagcgaaggataggacttggtaatttctaaagtttcgtgggggaaccccccgctaaagtaggcaactttggatccattgtctgggattgttatgaaaaaactagttccctctacttgattcattttgccgtcttttaaaattcctgtgtaatcagtccaacatgtaaataccttacgatcctcatcgtgaaaaaatacagctgcattaatttccatagaaatcagagcgtaaagaaaaataccgaatctaccca

SEQ ID NO: 4 - DNA, 12392 bp, Artificial Sequence
  Synthetic Oligonucleotide
  misc_feature (1)..(4007): n is a, c, g, or t
nnnnnnnnnnnnnnnnnnnnnnnnnnnnnnnnnnnnnnnnnnnnnnnnnnnnnnnnnnnnnnnnnnnnnnnnnnnnnnnnnnnnnnnnnnnnnnnnnnnnnnnnnnnnnnnnnnnnnnnnnnnnnnnnnnnnnnnnnnnnnnnnnnnnnnnnnnnnnnnnnnnnnnnnnnnnnnnnnnnnnnnnnnnnnnnnnnnnnnnnnnnnnnnnnnnnnnnnnnnnnnnnnnnnnnnnnnnnnnnnnnnnnnnnnnnnnnnnnnnnnnnnnnnnnnnnnnnnnnnnnnnnnnnnnnnnnnnnnnnnnnnnnnnnnnnnnnnnnnnnnnnnnnnnnnnnnnnnnnnnnnnnnnnnnnnnnnnnnnnnnnnnnnnnnnnnnnnnnnnnnnnnnnnnnnnnnnnnnnnnnnnnnnnnnnnnnnnnnnnnnnnnnnnnnnnnnnnnnnnnnnnnnnnnnnnnnnnnnnnnnnnnnnnnnnnnnnnnnnnnnnnnnnnnnnnnnnnnnnnnnnnnnnnnnnnnnnnnnnnnnnnnnnnnnnnnnnnnnnnnnnnnnnnnnnnnnnnnnnnnnnnnnnnnnnnnnnnnnnnnnnnnnnnnnnnnnnnnnnnnnnnnnnnnnnnnnnnnnnnnnnnnnnnnnnnnnnnnnnnnnnnnnnnnnnnnnnnnnnnnnnnnnnnnnnnnnnnnnnnnnnnnnnnnnnnnnnnnnnnnnnnnnnnnnnnnnnnnnnnnnnnnnnnnnnnnnnnnnnnnnnnnnnnnnnnnnnnnnnnnnnnnnnnnnnnnnnnnnnnnnnnnnnnnnnnnnnnnnnnnnnnnnnnnnnnnnnnnnnnnnnnnnnnnnnnnnnnnnnnnnnnnnnnnnnnnnnnnnnnnnnnnnnnnnnnnnnnnnnnnnnnnnnnnnnnnnnnnnnnnnnnnnnnnnnnnnnnnnnnnnnnnnnnnnnnnnnnnnnnnnnnnnnnnnnnnnnnnnnnnnnnnnnnnnnnnnnnnnnnnnnnnnnnnnnnnnnnnnnnnnnnnnnnnnnnnnnnnnnnnnnnnnnnnnnnnnnnnnnnnnnnnnnnnnnnnnnnnnnnnnnnnnnnnnnnnnnnnnnnnnnnnnnnnnnnnnnnnnnnnnnnnnnnnnnnnnnnnnnnnnnnnnnnnnnnnnnnnnnnnnnnnnnnnnnnnnnnnnnnnnnnnnnnnnnnnnnnnnnnnnnnnnnnnnnnnnnnnnnnnnnnnnnnnnnnnnnnnnnnnnnnnnnnnnnnnnnnnnnnnnnnnnnnnnnnnnnnnnnnnnnnnnnnnnnnnnnnnnnnnnnnnnnnnnnnnnnnnnnnnnnnnnnnnnnnnnnnnnnnnnnnnnnnnnnnnnnnnnnnnnnnnnnnnnnnnnnnnnnnnnnnnnnnnnnnnnnnnnnnnnnnnnnnnnnnnnnnnnnnnnnnnnnnnnnnnnnnnnnnnnnnnnnnnnnnnnnnnnnnnnnnnnnnnnnnnnnnnnnnnnnnnnnnnnnnnnnnnnnnnnnnnnnnnnnnnnnnnnnnnnnnnnnnnnnnnnnnnnnnnnnnnnnnnnnnnnnnnnnnnnnnnnnnnnnnnnnnnnnnnnnnnnnnnnnnnnnnnnnnnnnnnnnnnnnnnnnnnnnnnnnnnnnnnnnnnnnnnnnnnnnnnnnnnnnnnnnnnnnnnnnnnnnnnnnnnnnnnnnnnnnnnnnnnnnnnnnnnnnnnnnnnnnnnnnnnnnnnnnnnnnnnnnnnnnnnnnnnnnnnnnnnnnnnnnnnnnnnnnnnnnnnnnnnnnnnnnnnnnnnnnnnnnnnnnnnnnnnnnnnnnnnnnnnnnnnnnnnnnnnnnnnnnnnnnnnnnnnnnnnnnnnnnnnnnnnnnnnnnnnnnnnnnnnnnnnnnnnnnnnnnnnnnnnnnnnnnnnnnnnnnnnnnnnnnnnnnnnnnnnnnnnnnnnnnnnnnnnnnnnnnnnnnnnnnnnnnnnnnnnnnnnnnnnnnnnnnnnnnnnnnnnnnnnnnnnnnnnnnnnnnnnnnnnnnnnnnnnnnnnnnnnnnnnnnnnnnnnnnnnnnnnnnnnnnnnnnnnnnnnnnnnnnnnnnnnnnnnnnnnnnnnnnnnnnnnnnnnnnnnnnnnnnnnnnnnnnnnnnnnnnnnnnnnnnnnnnnnnnnnnnnnnnnnnnnnnnnnnnnnnnnnnnnnnnnnnnnnnnnnnnnnnnnnnnnnnnnnnnnnnnnnnnnnnnnnnnnnnnnnnnnnnnnnnnnnnnnnnnnnnnnnnnnnnnnnnnnnnnnnnnnnnnnnnnnnnnnnnnnnnnnnnnnnnnnnnnnnnnnnnnnnnnnnnnnnnnnnnnnnnnnnnnnnnnnnnnnnnnnnnnnnnnnnnnnnnnnnnnnnnnnnnnnnnnnnnnnnnnnnnnnnnnnnnnnnnnnnnnnnnnnnnnnnnnnnnnnnnnnnnnnnnnnnnnnnnnnnnnnnnnnnnnnnnnnnnnnnnnnnnnnnnnnnnnnnnnnnnnnnnnnnnnnnnnnnnnnnnnnnnnnnnnnnnnnnnnnnnnnnnnnnnnnnnnnnnnnnnnnnnnnnnnnnnnnnnnnnnnnnnnnnnnnnnnnnnnnnnnnnnnnnnnnnnnnnnnnnnnnnnnnnnnnnnnnnnnnnnnnnnnnnnnnnnnnnnnnnnnnnnnnnnnnnnnnnnnnnnnnnnnnnnnnnnnnnnnnnnnnnnnnnnnnnnnnnnnnnnnnnnnnnnnnnnnnnnnnnnnnnnnnnnnnnnnnnnnnnnnnnnnnnnnnnnnnnnnnnnnnnnnnnnnnnnnnnnnnnnnnnnnnnnnnnnnnnnnnnnnnnnnnnnnnnnnnnnnnnnnnnnnnnnnnnnnnnnnnnnnnnnnnnnnnnnnnnnnnnnnnnnnnnnnnnnnnnnnnnnnnnnnnnnnnnnnnnnnnnnnnnnnnnnnnnnnnnnnnnnnnnnnnnnnnnnnnnnnnnnnnnnnnnnnnnnnnnnnnnnnnnnnnnnnnnnnnnnnnnnnnnnnnnnnnnnnnnnnnnnnnnnnnnnnnnnnnnnnnnnnnnnnnnnnnnnnnnnnnnnnnnnnnnnnnnnnnnnnnnnnnnnnnnnnnnnnnnnnnnnnnnnnnnnnnnnnnnnnnnnnnnnnnnnnnnnnnnnnnnnnnnnnnnnnnnnnnnnnnnnnnnnnnnnnnnnnnnnnnnnnnnnnnnnnnnnnnnnnnnnnnnnnnnnnnnnnnnnnnnnnnnnnnnnnnnnnnnnnnnnnnnnnnnnnnnnnnnnnnnnnnnnnnnnnnnnnnnnnnnnnnnnnnnnnnnnnnnnnnnnnnnnnnnnnnnnnnnnnnnnnnnnnnnnnnnnnnnnnnnnnnnnnnnnnnnnnnnnnnnnnnnnnnnnnnnnnnnnnnnnnnnnnnnnnnnnnnnnnnnnnnnnnnnnnnnnnnnnnnnnnnnnnnnnnnnnnnnnnnnnnnnnnnnnnnnnnnnnnnnnnnnnnnnnnnnnnnnnnnnnnnnnnnnnnnnnnnnnnnnnnnnnnnnnnnnnnnnnnnnnnnnnnnnnnnnnnnnnnnnnnnnnnnnnnnnnnnnnnnnnnnnnnnnnnnnnnnnnnnnnnnnnnnnnnnnnnnnnnnnnnnnnnnnnnnnnnnnnnnnnnnnnnnnnnnnnnnnnnnnnnnnnnnnnnnnnnnnnnnnnnnnnnnnnnnnnnnnnnnnnnnnnnnnnnnnnnnnnnnnnnnnnnnnnnnnnnnnnnnnnnnnnnnnnnnnnnnnnnnnnnnnnnnnnnnnnnnnnnnnnnnnnnnnnnnnnnnnnnnnnnnnnnnnnnnnnnnnnnnnnnnnnnnnnnnnnnnnnnnnnnnnnnnnnnnnnnnnnnnnnnnnnnnnnnnnnnnnnnnnnnnnnnnnnnnnnnnnnnnnnnnnnnnnnnnnnnnnnnnnnnnnnnnnnnnnnnnnnnnnnnnnnnnnnnnnnnnnnnnnnnnnnnnnnnnnnnnnnnnnnnnnnnnnnnnnnnnnnnnnnnnnnnnnnnnnnnnnnnnnnnnnnnnnnnnnnnnnnnnnnnnnnnnnnnnnnnnnnnnnnnnnnnnnnnnacatagttgtttacggatctatcggatttctaactactatcgcccgccaacaaagtccgtcttttattatactggtgtttgtcacaatatcaccattgtcttcccaccttgtaagtaaaacatgtttatcctcgtacaacacatctacagatttgaaccagtcccaattccagtttgggtctgttgttagtttaacgaagttgtctacgtgttcatctctggttaacaaatcagtttcacggataaacatataatcttcatgatgaatattcctaaatgtttctaagtcccaattagaatagacatctagatatttttttatcaaactcatgatttgctccagtgatttgtcttagaataacgcaacccatcattttgaaaagaaattattctataataatgtttgtatgttgagagagatgatggaaaacccccattaggtgaaacaagataatgatcaacatgtctaaatatcgaatagtcattaggtaacttttgttcgagagaacataagttgaatcatgatttccagatcattgactacctgactacctagttgccaaagaaatcctgtggtccagtagtcatcaaatcaagtctgaattcatacctcttttacgatttctccagaaataagtttcagctaataaaatatcgatacagtagacataattcaccttaatcagtcttctattagtcaaatattcgtgtcacttcgtaacactcatattttccattgtatccaactttcacttcgtgaaacttgtctacaaaccattctgttgactacttaattttgatttaaaatataattctttaagggtaggcatatctatatatcttaaagtttgagtttgggtgtctaacttttttcaaaatatttctcccagtctggttcatggttctgcaacagatttttcttacccagtttatactttgcaaccttcaaggcattacctgtgattggtgatttcctgtcgatattgcattccagagtattcaagacagccgcaatatcgtccagtgtttccaactctttcctgtaatcttcttggtgggttgcagactttatcaggacatcaacagtctgatgcatcaggttcatttcatttttcattccttaattcctttgaaattcaatatcaaaaatgtcctaaatatatgatattgtatgtaaaaatgtatcgacaaatgtatttattaaaaatcgaaactatggatattttaccatacaaaacccgattcagtcgagactttttcagaaaatatttggcccaaaattaaggaaaacaaatggaaattacacaaaaagacgtaatcaataaggtatcagcatcaaaaaagagtcagattacctacctgtcaccaccacacaccaatgaagaaaagacaaaattgaaacgacacattgatgatgcatttcgaaagggacacagcctcattcttgtccgtattccctagacaacaaaaaaccctgactgaaatgagtcagggttcaatggtaggtaaaactttccatatttttagaaactattgattttgggagatctcaaccgtttcataatgtatcactggcattccataggttcttgcgacagccgaccgaatgatttctgatttggacgcattatacattttggatgcactttccaacaatctcagaaagtgatcgtctgtgcggattccgatagttctgttcttcttgatattcatgtgtaactcctaatgtgcatactactatttataatcaaaaaatcgtttaccggattgactaaatgattcatacctagattcatacccaccttatattacattgatttaaaacgatattaactatagatcgtcgcattcgtaatgcggaggtcacgtgttcgagtcacgtaagcggcaccattttattaattaagcatatgatattaaacaaaaatatacgaaatgtgcattgtggtcccttgcatagtcccctcgtcgatctgcgttggattgaccagcttttcgcatttgaagcatttttaataatggatgatttgtattcagatttatttgtctgagtggcttatgagacacgtattagaaacttgaaagctttttgaacaaggtaaattactcacggcaattattcatatggtaatagatttccaccgcgccggtcagtttgtggggtttttattgattctgcgccggtttgtatttcagcattttcaaaaaaacctcgtcgtgacctcatcacagtcaggctctttatattcaccagagctgccaaggactggaaggcgttgtgataaggctctgccggcggttttcttcagcgagacacgtgcgcatagaactgcgttattttagcctcgcgcgcccgcgcaacatcggtttcatctgtgcgcatctggcgtgctgtagtgcacccgccatatccttatctaacaggcaaatacgccttcaactttgtcagggtgcctactgggtctgcatccagttggtcagcgagcagctctgacatcggtgtgccgcgctgctccagctctttcacggcaagataaaactcttcgacgagtacagcgcgaatgagctgggcgggcccagaaccacgcgggcggcctacttttcgtttcatagggtaaattaacctttgtcattgttttattaaggaaagtttttagttaagtgaatgagtttcaatttacacattctaatgatctgacctcattaatgaactgccgtttcagatcaacaatttcattattagtactgaattgcgattaatatttaaaaaaatatttgacagaatctttaagaacagcgaacttcaatcacttctgttcgaaacaatttgaattttgtgtgtgtgctgatgcagtgtgtagaaataaaagcaattctcaaaacgccaattattctaggcggaggttatctgacgctagatgcccttttagcatctcttatctttgagaaatgtggcgatgttgaggtagcccataccacggttccaattaagcaaaccaacggactttttcacgctagcgctgcactgctagaaccaatttcaagaagttctgtctcatttgttgccagtctcagagcagagcatgacctcaaccctgatttgctaaaaaaaagagcgggagctctaaaaaaaataaagcggttacgacggagtgattttggcaacgttttaaatacttatgggtctcttcaagccgctcatatatcatggttcgctgagggcgataaagatgaaattagccagcttcttcaggacgtgaagtttattggaaagcgtcgcgccagtggatttggcgaaattgaaacttgggttatcgaggacagcgacatagacggtgttgtcgggccgtttgatgaacctctgcggccagttccagttgaaatgttcattggtgatcagtcttctctgaaagtagatgccgcttggaaaccagcttattggaaccctgaaaacagagcgatctgttatgcgccggagctgatttcatgagtacttttgagttcttccacaacagctttggcaaacatctgaccaacaaaaccaataagctgcatatggatacttggcgcgctttgtcatcaaaccaccttcaacaaaagaaaaacgcaaagggtgaacattcttcctgcagattagtttcaggctgggctattgttcgtccagacaacactttgctgcagcaaaaattggcagctaccggattgatctatgatgacagaaatcgttttgatgctttttttcaagaattacaatcttgggacggaagccctcgtatttttttaacctttgataaagcaccgatacccatagcaaatctcttcatgacccttgatcttcgggctgttcgaatttgctcaccctcaggtgtggagacatttgattacaccacagcagcgccttcaaatgctggaactataggcgcaagcttgcatcgcatgaaggaaaaacaagatgctgcttgatcacgtaatctctaaaccaaaaaatattggaggctacgggctccaccaactcgttcaagggctaacagatggggaaagccccttatttgtggatatgggcgacaaatttatagttcgcactgtcaaaacaattactgaaactggcacccccccaaggtccgtagcagataaagacgttatcggttttgagttacgagcttgcgtcagtaaaaaactgaaaggcaagcacatatactatcccacttcagattgggctagcagacataattggctaaaacgtcagggcaaaaagcacggttttgaaccactcacgatgaattgtcgctcaaatcttgcaaaaataactgatggaaaaggtcgcaagttcacggttgatcaaactgattttgttggggttctaaaagttttggatgccttggcttttcagaaagctgttggacaaggcgttggttctactgccaaagcctttggttttggaatgttaattatttaatcaagtttggagggaatatgggtgacataattataaacggagcaattactctggtgggaccgttatcaatttgtgcgcacaacttagatgactacaacgggtttcccataatgtctcggggcactcctgaggatggcaaactttcaaaaactggatacctgcccgcgaccacaatacgggggaaattgcgtcgcgcttatgtttttgaaaatatgaaagaagctgctgctaaaaatgagcattacccacttagacgtgtttatgcagaactgattgggcaggacccagatagtgaaaaacaggctggtgaaatagacttacttcaaatcaaaaaaacgcgggatgactcaccggtgcttgatttgtttggcagtggtctcagtgtggcaagccgtttgagagtggggcatttttttccaagtatgaatattcttcctgaggaaattggttcgataaggaaagatttggatgaaactgaagaagttgttgaagccctagctccagaagacgtgcaacgtttctttgagcggaaagacctcaccagccgacgttctcaagcagttgcgctagtaacgtcattagaacgaaaaattagagctgttaaaaaaacaagtggcccgacaaatgaacttgaggtggagctcaaagaagctgagggtctagttgaaaaatacaatcaaggcatgggcgacatgcaggttggcgcaaaacagcttcctacctatttcgctctgccacccggattgatattgtcagggcgcattgtgatcgtaaatgcgaaagaccacgatctggccattattgaaaagggtttggattgtatgagcctatcccctgtgcttggagcacaatccgcgcgcggctgtggcgaaatagagggcagttttgatgttcaaatagatggaaaaactgttaaaaaaatcacgataggaggctacaaatcaagcagaattgatgttttttaaatggctgaaacatggaataattaagcatttttatgttgttatgggaaatctcctgaagctaccctcgttttgggtggttactgaaaccaggtgaacagaagtacgtggacagcctgccctgaagctaccctcgttttgggtggttactgaaacactgaggttgatgagcaaatggcgcacacacctgaagctaccctcgttttgggtggttactgaaactgaatttccgcgtggtgcctaagctgccttcctgaagctaccctcgttttgggtggttactgaaactaattcattttcgtacacaacattggcgtacctgaagctaccctcgttttgggtggttactgaaacacaggctcatccgcgctctcggctatgtcgcctgaagctaccctcgttttgggtggttactgaaaccagtgttacgcttgggtaatggcacaggctcctgaagctaccctcgttttgggtggttaataaacccaaagtgaccatactataaatatgcacaaccgaaagccactcctttaccggggtggttatcccaaaatatcaaatggtaccctgagatatgtttcgctccaatgaacaagaatatttcaatacactgcttgagcgacatatgtctgttctggatggacctctgttgcttgagggaggcactggtctaggtaaaacccgcgcttatcttgctgcaataaaaggttttcaaggcaaagtcgcaatcgttttgcccacgcaccagcttatagaacaacttatcatttcaagtgatttaaaagcagttggcattgaaattaaagccttccgtccaagaccgatgtttgacacacaggctgactatgatttgcaaaaagatgaggcgtcagcggctgcggttatgatttgcacatctgcaagtgtaataatcgatcaaaggctttctggtggttacaacggagcgacacagcgagactatattctttttgatgaagctgacgctctaccagacgctgctgcattgcagaaagatttggaaatctcagcatttgaaatcaaagatgctggcgtaaaaacctctgtggtcgcaaatgctttggacgacttcattgacaaaaccgccgatgtagagctgaaagcaaaagctcgtataattaaagaagcatcggaaaacccggcttggtaccataccgtggggtctacagaggagggcggcattagcctctttcaccgaatgcctggcttgctactcacccgaattgccaatcagaaaaacgttgccttcatcagtgcgaccttgaaagtcgcaagttcatttgatgacttcaagcgcagcctagggattaaaaaggaaagccgcctttcggatagtatcgaccccaaaatacacggtgatatgcttgtcgagtatccactttctgagaatattgtgactgtaatatctggcgcaccaaaaccttgtctagttgccacgacaagctttcagtcttccgaagagctcgctgcattaatcccaacggctgttttgcgcaccagagatgaaacgcccagtatggctgctttgcgggtctctgaagacggcgttttgatcgcaactagtgcatgggccggtctggatactcccagacgttgggcatcggttgtcgttcccaaagtgcctttcggcaaaccggttgagcaagacggtcacatcgaaagccggtatttggatagtcgtaatgtggcaattcggcgaatgcgtcaggtattaggccgagggcttcgaacacctgacgcgaaatgcacattctacatctgcgactccagatacaaatctcttggaaatttcttacctgataggttttctaaaagctggtgggaggggggtaaaaaaaccattgagctttcaaaatcagaacgctgtccggcaattagaaaggccgcattaaaacattatggatgtttttgccaccgctgcgatcttaggccaaaaaatccgacaattatcgaggttcatcatttatttccaatcgctgatggaacccgtaagacaaaaatagaggatgttatccccctgtgcagaaattgccatgagcttgctcatacagaaaatccaccgatacccatagatcgattgaaaacgactgatttgtagggactttgatgaagttcttcactcgagagcagaatgcgcgcttgatctacatcttatatttaaccttgtgtgctcacaaactgccattgcctcagcgtgtaatgctcacaaacctcatcttcggggatgccgcgtgcttgtttgaggcaatgttctgcccaatcaaatgccgaccacccgcgagattctgctgctaaatgctcgcacttcaccatagtctgcatctcgactgccacctcacaaggcgtaggccaaggggtgtagtttgtgtacttaatgtactttctagaaatattattagagtaattaagctttgtattatagttattataaacttcctcagaaggtacacaaagtacatttgctacatcaggtttggtcatcgcaaacttaccccctcaaaggagaagccttcgctacgccgcggtgattttgtcacaccaacagcctctacgcggttggtaaattgtttgcggcccagcttggctcgcaggcccgtggttaaaaaccaatctccataagcattgtagagcgcctgaactgacacgctttgcgccgggtcgcggtatactttctcgcttagaaactgttcaacatggttattgtctgctcgccactcatcttttgcagcaacgcaactggggggctcacatgcgtgcggaactctgctgtgaggctctcaaaatggcattgggccgcagagggccctttcctgggttgatacatcacagcgacagggggaagtcagtacgctggggggaaatatcgcaaactgatcaacaaagggggccttactcaatccatgagccgaaagggcgaatgcctggacaacgcgccgatggagagcttct

SEQ ID NO: 5 - DNA, 19673 bp, Artificial Sequence
  Synthetic Oligonucleotide
  misc_feature (1)..(4565): n is a, c, g, or t
nnnnnnnnnnnnnnnnnnnnnnnnnnnnnnnnnnnnnnnnnnnnnnnnnnnnnnnnnnnnnnnnnnnnnnnnnnnnnnnnnnnnnnnnnnnnnnnnnnnnnnnnnnnnnnnnnnnnnnnnnnnnnnnnnnnnnnnnnnnnnnnnnnnnnnnnnnnnnnnnnnnnnnnnnnnnnnnnnnnnnnnnnnnnnnnnnnnnnnnnnnnnnnnnnnnnnnnnnnnnnnnnnnnnnnnnnnnnnnnnnnnnnnnnnnnnnnnnnnnnnnnnnnnnnnnnnnnnnnnnnnnnnnnnnnnnnnnnnnnnnnnnnnnnnnnnnnnnnnnnnnnnnnnnnnnnnnnnnnnnnnnnnnnnnnnnnnnnnnnnnnnnnnnnnnnnnnnnnnnnnnnnnnnnnnnnnnnnnnnnnnnnnnnnnnnnnnnnnnnnnnnnnnnnnnnnnnnnnnnnnnnnnnnnnnnnnnnnnnnnnnnnnnnnnnnnnnnnnnnnnnnnnnnnnnnnnnnnnnnnnnnnnnnnnnnnnnnnnnnnnnnnnnnnnnnnnnnnnnnnnnnnnnnnnnnnnnnnnnnnnnnnnnnnnnnnnnnnnnnnnnnnnnnnnnnnnnnnnnnnnnnnnnnnnnnnnnnnnnnnnnnnnnnnnnnnnnnnnnnnnnnnnnnnnnnnnnnnnnnnnnnnnnnnnnnnnnnnnnnnnnnnnnnnnnnnnnnnnnnnnnnnnnnnnnnnnnnnnnnnnnnnnnnnnnnnnnnnnnnnnnnnnnnnnnnnnnnnnnnnnnnnnnnnnnnnnnnnnnnnnnnnnnnnnnnnnnnnnnnnnnnnnnnnnnnnnnnnnnnnnnnnnnnnnnnnnnnnnnnnnnnnnnnnnnnnnnnnnnnnnnnnnnnnnnnnnnnnnnnnnnnnnnnnnnnnnnnnnnnnnnnnnnnnnnnnnnnnnnnnnnnnnnnnnnnnnnnnnnnnnnnnnnnnnnnnnnnnnnnnnnnnnnnnnnnnnnnnnnnnnnnnnnnnnnnnnnnnnnnnnnnnnnnnnnnnnnnnnnnnnnnnnnnnnnnnnnnnnnnnnnnnnnnnnnnnnnnnnnnnnnnnnnnnnnnnnnnnnnnnnnnnnnnnnnnnnnnnnnnnnnnnnnnnnnnnnnnnnnnnnnnnnnnnnnnnnnnnnnnnnnnnnnnnnnnnnnnnnnnnnnnnnnnnnnnnnnnnnnnnnnnnnnnnnnnnnnnnnnnnnnnnnnnnnnnnnnnnnnnnnnnnnnnnnnnnnnnnnnnnnnnnnnnnnnnnnnnnnnnnnnnnnnnnnnnnnnnnnnnnnnnnnnnnnnnnnnnnnnnnnnnnnnnnnnnnnnnnnnnnnnnnnnnnnnnnnnnnnnnnnnnnnnnnnnnnnnnnnnnnnnnnnnnnnnnnnnnnnnnnnnnnnnnnnnnnnnnnnnnnnnnnnnnnnnnnnnnnnnnnnnnnnnnnnnnnnnnnnnnnnnnnnnnnnnnnnnnnnnnnnnnnnnnnnnnnnnnnnnnnnnnnnnnnnnnnnnnnnnnnnnnnnnnnnnnnnnnnnnnnnnnnnnnnnnnnnnnnnnnnnnnnnnnnnnnnnnnnnnnnnnnnnnnnnnnnnnnnnnnnnnnnnnnnnnnnnnnnnnnnnnnnnnnnnnnnnnnnnnnnnnnnnnnnnnnnnnnnnnnnnnnnnnnnnnnnnnnnnnnnnnnnnnnnnnnnnnnnnnnnnnnnnnnnnnnnnnnnnnnnnnnnnnnnnnnnnnnnnnnnnnnnnnnnnnnnnnnnnnnnnnnnnnnnnnnnnnnnnnnnnnnnnnnnnnnnnnnnnnnnnnnnnnnnnnnnnnnnnnnnnnnnnnnnnnnnnnnnnnnnnnnnnnnnnnnnnnnnnnnnnnnnnnnnnnnnnnnnnnnnnnnnnnnnnnnnnnnnnnnnnnnnnnnnnnnnnnnnnnnnnnnnnnnnnnnnnnnnnnnnnnnnnnnnnnnnnnnnnnnnnnnnnnnnnnnnnnnnnnnnnnnnnnnnnnnnnnnnnnnnnnnnnnnnnnnnnnnnnnnnnnnnnnnnnnnnnnnnnnnnnnnnnnnnnnnnnnnnnnnnnnnnnnnnnnnnnnnnnnnnnnnnnnnnnnnnnnnnnnnnnnnnnnnnnnnnnnnnnnnnnnnnnnnnnnnnnnnnnnnnnnnnnnnnnnnnnnnnnnnnnnnnnnnnnnnnnnnnnnnnnnnnnnnnnnnnnnnnnnnnnnnnnnnnnnnnnnnnnnnnnnnnnnnnnnnnnnnnnnnnnnnnnnnnnnnnnnnnnnnnnnnnnnnnnnnnnnnnnnnnnnnnnnnnnnnnnnnnnnnnnnnnnnnnnnnnnnnnnnnnnnnnnnnnnnnnnnnnnnnnnnnnnnnnnnnnnnnnnnnnnnnnnnnnnnnnnnnnnnnnnnnnnnnnnnnnnnnnnnnnnnnnnnnnnnnnnnnnnnnnnnnnnnnnnnnnnnnnnnnnnnnnnnnnnnnnnnnnnnnnnnnnnnnnnnnnnnnnnnnnnnnnnnnnnnnnnnnnnnnnnnnnnnnnnnnnnnnnnnnnnnnnnnnnnnnnnnnnnnnnnnnnnnnnnnnnnnnnnnnnnnnnnnnnnnnnnnnnnnnnnnnnnnnnnnnnnnnnnnnnnnnnnnnnnnnnnnnnnnnnnnnnnnnnnnnnnnnnnnnnnnnnnnnnnnnnnnnnnnnnnnnnnnnnnnnnnnnnnnnnnnnnnnnnnnnnnnnnnnnnnnnnnnnnnnnnnnnnnnnnnnnnnnnnnnnnnnnnnnnnnnnnnnnnnnnnnnnnnnnnnnnnnnnnnnnnnnnnnnnnnnnnnnnnnnnnnnnnnnnnnnnnnnnnnnnnnnnnnnnnnnnnnnnnnnnnnnnnnnnnnnnnnnnnnnnnnnnnnnnnnnnnnnnnnnnnnnnnnnnnnnnnnnnnnnnnnnnnnnnnnnnnnnnnnnnnnnnnnnnnnnnnnnnnnnnnnnnnnnnnnnnnnnnnnnnnnnnnnnnnnnnnnnnnnnnnnnnnnnnnnnnnnnnnnnnnnnnnnnnnnnnnnnnnnnnnnnnnnnnnnnnnnnnnnnnnnnnnnnnnnnnnnnnnnnnnnnnnnnnnnnnnnnnnnnnnnnnnnnnnnnnnnnnnnnnnnnnnnnnnnnnnnnnnnnnnnnnnnnnnnnnnnnnnnnnnnnnnnnnnnnnnnnnnnnnnnnnnnnnnnnnnnnnnnnnnnnnnnnnnnnnnnnnnnnnnnnnnnnnnnnnnnnnnnnnnnnnnnnnnnnnnnnnnnnnnnnnnnnnnnnnnnnnnnnnnnnnnnnnnnnnnnnnnnnnnnnnnnnnnnnnnnnnnnnnnnnnnnnnnnnnnnnnnnnnnnnnnnnnnnnnnnnnnnnnnnnnnnnnnnnnnnnnnnnnnnnnnnnnnnnnnnnnnnnnnnnnnnnnnnnnnnnnnnnnnnnnnnnnnnnnnnnnnnnnnnnnnnnnnnnnnnnnnnnnnnnnnnnnnnnnnnnnnnnnnnnnnnnnnnnnnnnnnnnnnnnnnnnnnnnnnnnnnnnnnnnnnnnnnnnnnnnnnnnnnnnnnnnnnnnnnnnnnnnnnnnnnnnnnnnnnnnnnnnnnnnnnnnnnnnnnnnnnnnnnnnnnnnnnnnnnnnnnnnnnnnnnnnnnnnnnnnnnnnnnnnnnnnnnnnnnnnnnnnnnnnnnnnnnnnnnnnnnnnnnnnnnnnnnnnnnnnnnnnnnnnnnnnnnnnnnnnnnnnnnnnnnnnnnnnnnnnnnnnnnnnnnnnnnnnnnnnnnnnnnnnnnnnnnnnnnnnnnnnnnnnnnnnnnnnnnnnnnnnnnnnnnnnnnnnnnnnnnnnnnnnnnnnnnnnnnnnnnnnnnnnnnnnnnnnnnnnnnnnnnnnnnnnnnnnnnnnnnnnnnnnnnnnnnnnnnnnnnnnnnnnnnnnnnnnnnnnnnnnnnnnnnnnnnnnnnnnnnnnnnnnnnnnnnnnnnnnnnnnnnnnnnnnnnnnnnnnnnnnnnnnnnnnnnnnnnnnnnnnnnnnnnnnnnnnnnnnnnnnnnnnnnnnnnnnnnnnnnnnnnnnnnnnnnnnnnnnnnnnnnnnnnnnnnnnnnnnnnnnnnnnnnnnnnnnnnnnnnnnnnnnnnnnnnnnnnnnnnnnnnnnnnnnnnnnnnnnnnnnnnnnnnnnnnnnnnnnnnnnnnnnnnnnnnnnnnnnnnnnnnnnnnnnnnnnnnnnnnnnnnnnnnnnnnnnnnnnnnnnnnnnnnnnnnnnnnnnnnnnnnnnnnnnnnnnnnnnnnnnnnnnnnnnnnnnnnnnnnnnnnnnnnnnnnnnnnnnnnnnnnnnnnnnnnnnnnnnnnnnnnnnnnnnnnnnnnnnnnnnnnnnnnnnnnnnnnnnnnnnnnnnnnnnnnnnnnnnnnnnnnnnnnnnnnnnnnnnnnnnnnnnnnnnnnnnnnnnnnnnnnnnnnnnnnnnnnnnnnnnnnnnnnnnnnnnnnnnnnnnnnnnnnnnnnnnnnnnnnnnnnnnnnnnnnnnnnnnnnnnnnnnnnnnnnnnnnnnnnnnnnnnnnnnnnnnnnnnnnnnnnnnnnnnnnnnnnnnnnnnnnnnnnnnnnnnnnnnnnnnnnnnnnnnnnnnnnnnnnnnnnnnnnnnnnnnnnnggatgacttcaagccgcgttgtcatgatccggtgtcaaaccctgtggaggcgatctgcgagttcatctcggacagccttcctgcacccttccacggcgcgagtttttgctgggcgctgtccgccagcgctgggcatcccagcaagcagggcacgctcaaggcgcacctgcatttctggctggagatgcccaggacctgtgctgaattggcggcttgggcgcggaccttgccgggcggcactattgatgcgtcgctgtactcgcctgttcaggtgcactacacggcggcccctttgtttgagccgggcgtgaccgaccctgtgcctgtgcgttctggtttctttgagtcccccctcggtctggatatggtcaggttggagattgatccggccattgttgtgcccaagcgggattacagcggtgaccctttgaccgatcctggcgccaagccgggggtgattggcgctttttgtcgcgctttcaagccgcatgacctggatcgtctgttgccagagatgttcacgcagagccagcgagaagggcactgggactggaaagggcacagcaaggaaggggtgttcctcagtggttgtgggaacgcgctgatcagcctccacgcgacggcccccacggggactagacggccgagcaatgtttacgattttgtgcgactccacctgttcaagctcttggatctggcggcgcccgaaggctgcagggcgagcgagttgcccagcgtgaaggccatgcgagattggattgaagagcgccactcgcacgtactggaagacattcagtacccgacaaacagccccgaggaagactttgggaatctggatctggatctggatctggatctggatcttgcaccgtcagatccggatgaatctgttgcccggacttctggtgcctccggacgagcaccgcttcgggtttggcggcccgctgaactgcgcagcaggcctccagcgaggtggctcgtcaagggtgtgctgcccctgcgcggtacggcctccctggtcggagattcgaatgtgggcaagtcgttctgcgcgcttgacctggggctggccgttgctcgtggcgtgccttggttcgaaagggaggtgcagcagggagctgtgctgtacgtcgctgcagaagggggctatggcttcggtcggcgcctagaggcatacgggcttcaccacgatgtcaatgtcgatgctctccccttgggcatcattgatgatgggatagatctacgcacaaaccagatcgatgcacagcgtgcgattgctgcggccaatgggcttgagcaagagacgaagactcctgtccgactgatcgtgctggacaccctggcccgcatgctaagcggcggcgatgaaaactccagcacggacatggggcatgtgcttgctatggcagacaagattgctcaggccacaggagcagtggtgctcatcgtccatcatgtggggaaggatcagcagcgcggcgcgcgcgggcactccagctttagggcggcccttgatgcccagctcatggtgaccaagccgaaggatcggtgcgtcatcaggctcgacaagcagcgcgatggcccaactgatctggagatggcctaccggcttgagaccgttgaactcgacccttcaggcgatggcctggaggcggagacctccgccgtagtggtgcagattgaccatgcaaccggccttgatgtcgcgcctacaaaactcaccaagtggcagtctcacgccctcgacgcagtgcaggcttgtcacggctggggatcaactggccgtgtaaagcgcgacgccgtgatcaacactgccgaacagctgctcttgcggccaggcatcaccctgcccaacacgtggaagaagatgctcgaacgagggttgaccgacctcattaaggagggcgtactcgacgccgagggggcgtacctagcccatggcttcatgtttccggcaagccatgacaaacaagcttttcactgaactgggagacatcgcaatgaagaaatcgcacaactcaacaccgaacacgacagacatatcgcactgccagatcggccagttcctcgacgggcgggtttacagcttggttgatgaggcacatcgccgattcggaacgcaagaccttgtggtggttctcgacctgggcagcaacacccccacattgaatgcagtgcctcgccatcgggccacacgagacaagtcgctgtcagaccacatccggctgaaactctccaggcctgcgtcttactttaaaaagtctccctgggcagctgcgcagtccttctggttcgtggtgctggataaggctcgggcggagttctgcgctgtcaacgcaatcccggcaggggccttcgccgcgctgacctgacctgggccccccccgggcattggaactctggaaccctcctatagaggaggggtccatgagttccgagttctgcgggaactcaatgaaactgaattccagaacagttccagcgagttccgagttcagcagccaggcttgccggtgcgcgggccgcgcaggcaacgcggcgctcgtccggttttgggtgtgggccgggtttgtgctggcacttgagcagaggatgcttactgcaaatgcgggtcagcatggtgaagttagggacaagctcacccgtattgggatcagtccatttcagccactagccggcaaccctgccaggcagcatgccccgcagggcacgccatcagtccgacgcagctgccaccaagcgttaggaccgatctcccagttgggttcttgatgcccggcggccggaatgctgcaccacttagcgccccaattcgcaaactgcaaaccctgaagtcaaacggtgctgctgagtctcggacctcagggttcttcaggcaagcctgcccctggcatttgcactacagtgctacacaaaagacagggaggaacgatgcaggctttcgtgctgcgcgcgcatctgcgcacgcccttaattcagatgggatacaccactctggatgcgctgttgatggcgacacttgagacaggtgatgtcagccacctgctgcgctgtgaaacgggcctttactacgccagtgccggtttcccggtggatggaattgccggccccaatgccgcattcatcgccagcatgcgtccggagcacacccccgagtggttggatgtaattgctcccaatacgatgaagggcgatgtgcaaattggcctcgcccgtcagcgtgaaggcggcaacgtgctgaatagttatcccaccacgactgcgtcagccgtggagtggtatgccaccggggacatggcagcagtgttggaggtcgtcgcccccatcatgttcatcggcaagcgacgtgcttcgggctatggtgaggtagttcgctgggaagctgagcccggggtactggatggcattgttggtcacctgggtgagccgcttcgccccatccccgtcgagcggtggactgagggcggcgattgggtcccggtggaggctgcgtggaggcctccgtactgggaggtgcgcaaccgaaccaagtgctacgtccccgaggtggctctgtgaacggcgcggaattcttcatgacgcatgccggctatcggctgctacccaaggatctgcattctggcgatgccgtcaacgatacagaagccctgtttggccgcagcctgccactgcatacgggcaagtccctgcgcctctcatcctgctggatggtggtgactcctgaatgggtcgccacgagtttcaaggcagaagcaagtgcgggattcaggcaggacatggagcgaaaggcagcaatcgccgaggccctgcgctccggcaagccttgcatgctcctgcaactgggcaagcgaactacacgtgcggcggacttgttcgtgacctatgaccgccgtgccgcgcggatctgcagtcagggcagtgcagcaacctttgatgccacgaaggacaaggcatggacatcctgatcgacaagcctccgcgattgaaaggttatgcgttgcaccgtttggtcgagcagtaccagcaagggcgccccgcactatgggctgacgaagggcaacaactacgcatccgcccgcgtgatgcgcaagctccactctttgaagttagcaagctgctgggctttgcgaccacggcctgtgtggtgcccagtacccacgccaaacacaaatacctgccgctcaacgattggcgcggccggcgtgagtggcttgagaaacaagccggcaagaacggctttgagctggttggggtgcacgtctcaccaggcatgcgccgtattgagacccacgatggccgcagcttcaccatcgatgccacggagttcacgggcattctcaaagtcacagagccagagaggtttgccgcgtgcctggtgaaaggcctgggccgtgtcggcaaagccttcggcttgaacctgcttgtagttcagtaagcgaatcaaaaggggagcaaatcaaatgactaaccgcatcatcggcaccgtgagcctagccaccgtgcagcccatcgccttcacccatcatggcattgagggccagccactcatgacgcgaggcgttgatgccgaagggcgccccttgcgtaccgtttttctaccggcctctcagctccggggccgcattcgacatgaggctgcaatggccgcactgcacagcaagggtgcgcctgtgaagcttgaagaggcctatctcgctgcgctagggcaggatctgcgccccgaagaagatcgggccgaagaactcgttcgtttgcgtgagcagcaggtgctgcgtgaagctcagcccctgctcgatttgtttggaacctggaaggttgccagtcgcttgaaggtcggccatttgctgcccgatgtcaatgtcgctcccgatagtttcagcatcatccgccgcgacctcgactccaatgaagaactgatgaacttgctgccagacgaagagcaagaccgcttttatgcccgccaggatagtcagtccatggcctccaaggtggacggcatgatcaaggtggccgagcgcgaactgcgtgccgccaagaaggccaagaacgaggctcttactgctgagttgacacagaagctggaagaactgaagaccgccaagcagtctcacaagggtgatgatgaatcctccaattccaagcacttgctcagcgtcgaagccatccctgcaggggtcaatctgagtggacgctgggtcatcgagcgagcccgtccgcgcgatctggacgtgatcgttgctgccttcgacgggcccagccggcgccctgtcatgggtgcagccacagcccgtggctgcggcgaggtttccggggcggttgtgttctctgactctgagggcgaagtcctgcttcgcatcaagtttggccagtacaccccggccatcgttgagtggacagtgtcgggcaaggccttcatgaccccagcccaggccgcatgatctatcgcagcaaggagcaggccgcttatgcgaagctgattgcaggcgcgctgcgccccggctcccctttgctggctggcggtgcggctggcctgggcaaagctcatggctacagcatcccgcttctggcatcgggcctgcgtgttgccattgccctgtccacgcgccagctcattgatcagttcgtgagcagtgatgcccttgccgaggcgaataggggccggcaaagagtggtcatggccctcaagacgcgggcccatttcgagaccgctgctgactatcaagcccaccgagcccaggctttggcggcagatgtcctcgtcctgacgcatgcggctgccttgatcgacagctggatccccggttatgccgagctgcggcagcgcgacgtggtgctgtttgatgaagctgatctactggccgatgcggcagaccttcggggcagcttcaccatcccggaagatcaactgcgtggacgtgactgtgagcccagggaagccgccacctatgtgatgcagcacaccgatgacccggaaatcaaggctgcggcgtcagcgattttgtatgcccttgatcaccccacgccttacaaggtcgtgggtcgagatcttgagggcaacctggtcctcaagcaccgcatgcccgggcgcatgctcaagcccctggtgcgcgatgtggccagctgcatcttcaccagtggcacgttgatggtcaatggccgttttgactactttgtgcgggccttgggtctgtcgggcatcgacccagcctcgcgccacattgatcccctgactcatggggacctgaacatcatctgtgccgagagcgagatgagcccggagcaaaaggcggcgcagatttcgcaggctgcgcgccccgcgcttgtgctcacttcaagccacgaggatacccaggcgctggggggtaacttgcccctggccacggtccgcatgccgggtgaggcactgctggacgctctggagcgatgccctgacgatggcatcctgattgcggcaggtgcatggtcgggccttgacagtccacgccttcgctggtggtccgtcatcatccccaaggcgccatacggccccccagtcgaagtggatggacagcaacttacccattacctagacagtcgcgtggtcgccgtgcggcgcatctgccaggggctgcatcgcggtttgcgcaccccggatgcccattgcacgctgatccttcaagatcctcgctgtcgtcggcccgagctgatggaagccatcccttcaaggttcaagggagcgctgatcagtgccatggaaggcgaagttgaggcggccctgcgcaatgagcgtgagcgacatagacccttcaggaccctggcgctcaagcactatggatgccagtgcatgtggcatgagggctgcgatgtcaaagcgccttatttgctggatgtgcatcaccgcgatcccgtctcagaaggggtgcgccgcaccgctctgcaagacctgatggttctttgtaaaaaccaccatgctgaagcccatcagcagatgcggctactcattttcaatggaggagattcaacaaaaattgatgatggatcaatgatttagcgaacatcgatgcaagctgccctttgtcggggcagctactagaacgagcatcacctcacccgggctgtgcctgacatgcaagctgccctttgtcggggcagctactagaactcgtaggtgtagttcgtcttcgggtagtcgatgcaagctgccttttgtcggggcagctactagaacgagacagccactacatcgatgaagctgaacatgcaagctgccctttgtcggagcagctactagaatgaaaccgcagtgcaggagtaagcccccatgatgcaagctgccctttgtcggggcagctactagaaccgccgcaagttcgacgccaacaagctccaaatgcaagctgccctttgtcggggcagctactagaactagtcgcaggcgcgcagctcccggccctcgatgcaagcagccctttgtcggggcagctactagaacagcacgccctggcttgtgccgctcacgaacatgcaagctgccctttgtcggggcagctactagaaccagcggcgcagcttgcccgagtcgtccagcatgcaagctgccctttgtcggggcagctactagaactacaccttgctggctgctgctgtgggcacgatgcaagctgccctttgtcggagcagctactagaaccaaacaggtcttgcgcctggttcgtgatgaatgcaagctgccctttgtcggggcagctactagaactagtgcacgcgaaacgctgcgggtttgctcatgcaagctgccctttgtcggggcagctactagaacagcaccgatcaggctttcgctgatgccgagatgcaagctgcccattgtcggggcagctactagaacttgggcaagttggtccagcggcttggttttatgcaagctgccctttgtcggggcagctactagaacaccggacgcggccggtattcggcgccgtagatgcaagctgccctttgtcggggcagctactagaaccgggaaactctgcggttggtggctgaaagatgcaagctgccctttgacggggcagctactagaacctggccctgctgctggctgcgctgcctgacatgcaagctgccctttgtcggggcagctactagaacatggcggggtggcatgtgatcgtctgcccgatgcaagctgccctttgtcgaggcagctactagaactacggtgtgtcgatgtcgccgcgaacggccaatgcaagctgccctttgtcggggcagctactagaaccaggaatttctcgacacgatgcaaggtctgatgcaagcagccctttgtcggggcagctactagaacgacatcgagcgtgaggccgctcgcacggtaatgcaagctgccctttgtcggggcagctactagaacaggttgtagttgttgtcggcctgcgtgtagatgcaagctgccctttgtcggagcagctactagaagactatggaagtggtggcggaagattggggcatgcaagctgtcctttgtcggggcagctactagaacttcgtgtacgtcatggaagagttcgccaagatgtaagctgccccttgtcggtgcagctactagaacgtagctcaactggatagagcaccagcctcatgcaagctgccctttgtcggggcagctactagaacttcaaccccgcgcaaaacggtgcccgctcgatgcaagctgacctttgtcggggcagctactagaactccacggcctgggcctagtagttgacctgcacgcaagctgccttttatcggggcagctactagaactagcatgccggcaccgttggggtgatggggatgtaagctgccctttgtcggggcagctactagaactgggatgtgggcggcgagggcgacccgattatgcaagctgccctttgtggggcagttactagaacgggtggatgaggttatcggcctggtcggccatgcaagctgccctttgtcggggcagttactaaagcgtgcagttgtaatactggctgtggaggaagtgcaagcagcccctgtcggggtagatgcgacttttgaaaactggtcagaaactgcgcgcaactacgttgggcttgcaccccgtctggcgtacctgcgaaagaggggtatgggggagggagtccgtccccctctgaattcagtttccgtttttggctttttctatgagccctgggctgcatgcgtcagcgtagctgacgctggcccatacggaaaccctgacctcaatagtgcccagctcgccctaggtagaaagtgttgatggtggctgtacggaattcacttgatttccgtatagtgaccgggcacgatcctgagccaccaactcagggagtccacatgactaagcgaagtcgccagctcagggtcgcgctgtatgcgcgggtgtccaccgacaagcaatccacggagagccagctgcaagagctgcggcatgccgctgagcgtttgggttggcaggtggttgatgagttcgtggatcgaggcatcagcggggccaaagggcgcaaggatcgcccgcagctcgatgcgttgctgaagggcgtggcccgcaaggagtttgatgtggtcggtgcctggtcggtggatcgactgggtcgctcactgatcgatctggtcaacatgctgcaagagctgcacgcgacaggcgttgacttgtacctgcatcagcaaggtatcaacaccaccacaccggcggggcgagcgatcttcgggatgatgggcgtcttcgcagagtttgagcgagctttgattcaggagcggattaaggccggattgcagcgtgcccgaaaactgggtaccaaatccggcaatgccattggtcggccgcgtgcttcacccgacgtggaggctcgaattcacgaactgcgagcaaccggcctgggtatggtgaagatcgcagctcaggttggctgcggagtctcggtggtgcagcgcgtgttgcacgattcgtagctcgaccctagggcctttgtgtggctccctatatccgcaacacaagagcaagtgttggtgtttgctaacttaaatgcaagcggtttgactgcaaactttgggtgcatcaagtccgaaatgctgggctagaaaactggatgtgatgacgctgcctgaattttgctgctcgcggtggcttgctgggtgaaaccgaaacccgaaggcgcgaatgctggtgttctacacgcgtctgcagtgatttctgcggcttttaggcgcttcaattgggcagccatggatttgatcaaaggcttgcccgccggtatgaagagccgcgctgacaaggcctgcttcgaatcatgcaactttgaagcggccgcagcttcgccaatggcagttttaactgtgggtgctacataaactgaacttatgacgcgcacttggggaggagggggcaataacgctggttcgttgcgttatgttttgggatgctgcccttcaattggcaattctgggcgctccgagagtatcaagtctggagcgcacttggcttgctcacttcaccgaattaacacgacaagatagattgaacagtctttgtgctcgggcagcgaaccgaagaaaaggagaagccatcacgcctgtctgaccgaattgcatgaccttgaattcgtacatagccattgtttgggtaagtcacggctacaaggccactcatgcttcccgtgccaaatcgacagcccgtacctgagctcgtgccggataggttggcaatttgccccgtgtttgcgccatttgagaacttggctgcgcccgagaactggcagtttgcattgattgcgaccttgatcgattggctggagtcgatgctcaccgtcaaggtgctgttcatctcatcactggcgttccacgttcccttggcgtcagctgctcctgtcgcaagtgtcatgtattcgctgaacttcaattcaaagtttgatgggccactggcatagattgccgaaccggagaggcccactccagggcggtattgcccgctgatcgagcctgaggaaactcctgcttgcgagtagtcagaagtggtgccgttgaactgtccgccgtcgccagatacaagcccgtcgacaaagccacgagatgagccaaatgcatcttcatagtagatggcaaatcttccgtccggagagacaactaggtcttggaagatgggtagacgtcccgtggttactttgcctttgtatcgaccgacggcttgaatgtccattcccttgggctgactgacagaaccggcattcgatgagttggtcgcccccccgtcgctgccgccgccaccgcatcccgcgattgacagcatcaaacccagcgaacaagctgcttttttgatcatcatttctccctcaatttaatgagttatttttgggagcgagatgttcgccatccttcccttgtcggtcaagtcctttcgtttgatgaggcttccttttttctcgggcacttagggaaataacggcgatgggctgcggggctggcttgagttggatgaccgcgatggcagagcgggggttgcgcttaacttattgatcaatgagctggcagggcgccgcgcttagggtggtagcgcaattcgagtaccggtcggccgctgaactttgccctcgggagatgttgtgccgttcgctgcttcggacggctgccatgttgatgctcggttttctaactggcgtcggtagctgcatgcgtagtcgctgaagtcgcgcttgatgttcgccagttcggggcgttggatggtgacttcctcgcagggcttgcggtcacttggggagtgcggtgcacatgcagaatgcctcacctatcttggcgcccatcacctggggtagcatccaactgaggcagcctgttgctgagattgctccgtgtttggaacgcggcaggaggctcagcaatctggttgcctctactcttttgggtcttcaaagtgtgggaatgcctgtgctcgacgtgacctgcttccggtggttgggtgtgcgtggagcagcgtggtcactgcgaatcctctgccgtacatcaatggctgcatgcggactacatgcttatggcaagggcgttttcgcagagtttgagcgggccttgattcaagagcgaatcagggcagggctggctcgggccaggaagtcgggcacaaagacaggcctcgccattggtcgccccaaggcctcagctgaaatcgagagcaggatccgcgaactgcgagcccaggggattggcataaagaagattgcttcccaggtgcctcgtggcgtgtctgtggtgcaaaggttactcgcaggccacgaattaaagacgtaaagcgggcacctgtagtgggtagctgcgccaccatcatgtcagggattgtcagtgataactaacctttatgcaacgcagatcggtgtgcttggcctgtcccggattctttgatattgcgcgaacttgtcgtacgcttgcagctcgttcgtcgcaaaatttgccttcacacggcaggggtcgcaggttcgaaccctgcaccgcccaccaagcctgaaagcccctcaagtcatgcgcttgcggggctttttctttgccccagcgttgcgatggcttgagctgctctcggccgctcggcttagagcggatagagtggaggttttcaacgcagcggccctggacgaggggagacgagtgaagcctcagaagaacatgatgatcaagcgcagagtttgtttgacggccggtgctcgagtggcggctttgctcttgggtggaggtgccctggctgaattggcctgcgcgcaagcgccaactcccggtgcaggtcgagccgcattcgatgccaagaccatgaacgaggccttgaaggccttgggctatgcggcgccagtcgaaagccgtgatgtgagcatccaggcccctgatattgccgaagatggcgcctccgtggccgtgtcagccgcttgcagccttgccggtgtcaagcaagtcatgttcttgcttgacggtgcaccgacggccttggccgccgtgttcaatttgggtgcggaacttgaggccgaggcgtccacgcgtttgcggctggcgcgcagttcggtggtgtttgccgtggccatcacacaggacaagaaggtcttgtttgcgcagaaggaagtcaaggtcgccatgggtgcttgcggtgccgatgcgaaaccggcccgaggcttgcgggcggacggtgtcagcggtgcgccggtccggtgctgagatcaggagagacattcccatggcaagtccgattcgaatccgcctgcgattgagtggcgacaagctcgctgtgcgagtggcgatcacgcatgaaatggaaagtggcctgcggcttgatgctgccggcaagaccatcgcggcccgctacatccagaccgtgaagaccgagctgaatggcaaagaagttctgagcgtggacttgggtccaaatgtggcgagaaaccccaatctggatttctccctgaaaggcgccaagcaaggcgacaccgtcaaagtgtcctggacggacaaccagggtggcacgcgcagcgacacggctgcagtggcgtaaccgccgccttgccttcgctgccctagccgtatggcggcagacgcatagctcgtccagggggtcaggtcttgctgccggcggattcgcggggacgcgatgttccccaagctgctccaggcctgcgctcgtcgcgtttgaaacgacatctctgtgttgtcggtctggacaggcgcaggcagccttggcatgctggctcggcccgtgattgagtggcccctgattgcgcggcaaccgatgcaattctgactctgaggaccttccatgcttcgtcgcagtgccgagtggtttgacgcgcagtacaacaatcgcgcccgggtcgccgacagtgcggtgttgctggaccgatggagtcgggcttcgcagctggtccgggagcaggcgctctgcgaactcgacattgcctatggcgatgcgccctcggagcgcctggatgtgtttccgaccgccaccgcgcaggcgccggtgctggtgtttctgcatggcggctactggcgcgcactcgacaaggcggaccattctttcgtggccagtgccttcacggatgagggggccatggtggtggttcccaactacgctttgtgtccctcggtcggcatggagcgcattcctttgcaactggtgcaggccttggcttgggtgtggcgccatgcagccgatcacggcggcgaccctaaccgcatcgtccttgtcggccattcggcgggcgggcacctggccagcatgctgagctgctgcgactggaaagcggtggcgcctgatttgcctcgccatctggtcaagggtgtactgtcgatctcgggcgtgcatgacctggcgcccttgcgccagacaccgttccttcagggcgacctcaagctcgatgccgaatcggtgcggcgtttgagcccggttcatttccctgcgcctgacacgcctctctatgccatctgcggcagcgaagagagtgaggagtttcgtcgtcagaatcgcttgatccgtcaggcctgggggcggcgagcggtgccgatttgcgaagagattgccggctgcaatcacttcgacatccttcatgatttggcggatcctcagggccgcagccaccaactggcgcgcaagctgcttgatctgcgctggtacagcgctttgctttgacgtggccgaggccgcgctaccatgggcgtgctgcagcttggccgtaactggggctgaacgagcagcatcgacagggacggatcagggatgaggaccaggccatgagcatcagcgcggaaagtctcctcagtctggaggactacggcgaataccggcgggcccatcaagccgagatccaggagtaccggcgccgtcgctcggtgctgctgggcgaacacatgagcttgcagttcgagagtgagcagaccttgcgttaccagctgcaggaggtcttgctggccgagcgcctggtcgagcccgaggacatcgagcgagaactgggcctctatgctcgcttgctgcccagtggcagcaattggcgggccagcttgttgattgagttcgccgacccccagcagcgcgaggtcgaattgccggcgctgcagggcgctgagcagcgctttttt

SEQ ID NO: 6 - DNA, 18021 bp, Artificial Sequence
  Synthetic Oligonucleotide
  misc_feature (1)..(4861): n is a, c, g, or t
nnnnnnnnnnnnnnnnnnnnnnnnnnnnnnnnnnnnnnnnnnnnnnnnnnnnnnnnnnnnnnnnnnnnnnnnnnnnnnnnnnnnnnnnnnnnnnnnnnnnnnnnnnnnnnnnnnnnnnnnnnnnnnnnnnnnnnnnnnnnnnnnnnnnnnnnnnnnnnnnnnnnnnnnnnnnnnnnnnnnnnnnnnnnnnnnnnnnnnnnnnnnnnnnnnnnnnnnnnnnnnnnnnnnnnnnnnnnnnnnnnnnnnnnnnnnnnnnnnnnnnnnnnnnnnnnnnnnnnnnnnnnnnnnnnnnnnnnnnnnnnnnnnnnnnnnnnnnnnnnnnnnnnnnnnnnnnnnnnnnnnnnnnnnnnnnnnnnnnnnnnnnnnnnnnnnnnnnnnnnnnnnnnnnnnnnnnnnnnnnnnnnnnnnnnnnnnnnnnnnnnnnnnnnnnnnnnnnnnnnnnnnnnnnnnnnnnnnnnnnnnnnnnnnnnnnnnnnnnnnnnnnnnnnnnnnnnnnnnnnnnnnnnnnnnnnnnnnnnnnnnnnnnnnnnnnnnnnnnnnnnnnnnnnnnnnnnnnnnnnnnnnnnnnnnnnnnnnnnnnnnnnnnnnnnnnnnnnnnnnnnnnnnnnnnnnnnnnnnnnnnnnnnnnnnnnnnnnnnnnnnnnnnnnnnnnnnnnnnnnnnnnnnnnnnnnnnnnnnnnnnnnnnnnnnnnnnnnnnnnnnnnnnnnnnnnnnnnnnnnnnnnnnnnnnnnnnnnnnnnnnnnnnnnnnnnnnnnnnnnnnnnnnnnnnnnnnnnnnnnnnnnnnnnnnnnnnnnnnnnnnnnnnnnnnnnnnnnnnnnnnnnnnnnnnnnnnnnnnnnnnnnnnnnnnnnnnnnnnnnnnnnnnnnnnnnnnnnnnnnnnnnnnnnnnnnnnnnnnnnnnnnnnnnnnnnnnnnnnnnnnnnnnnnnnnnnnnnnnnnnnnnnnnnnnnnnnnnnnnnnnnnnnnnnnnnnnnnnnnnnnnnnnnnnnnnnnnnnnnnnnnnnnnnnnnnnnnnnnnnnnnnnnnnnnnnnnnnnnnnnnnnnnnnnnnnnnnnnnnnnnnnnnnnnnnnnnnnnnnnnnnnnnnnnnnnnnnnnnnnnnnnnnnnnnnnnnnnnnnnnnnnnnnnnnnnnnnnnnnnnnnnnnnnnnnnnnnnnnnnnnnnnnnnnnnnnnnnnnnnnnnnnnnnnnnnnnnnnnnnnnnnnnnnnnnnnnnnnnnnnnnnnnnnnnnnnnnnnnnnnnnnnnnnnnnnnnnnnnnnnnnnnnnnnnnnnnnnnnnnnnnnnnnnnnnnnnnnnnnnnnnnnnnnnnnnnnnnnnnnnnnnnnnnnnnnnnnnnnnnnnnnnnnnnnnnnnnnnnnnnnnnnnnnnnnnnnnnnnnnnnnnnnnnnnnnnnnnnnnnnnnnnnnnnnnnnnnnnnnnnnnnnnnnnnnnnnnnnnnnnnnnnnnnnnnnnnnnnnnnnnnnnnnnnnnnnnnnnnnnnnnnnnnnnnnnnnnnnnnnnnnnnnnnnnnnnnnnnnnnnnnnnnnnnnnnnnnnnnnnnnnnnnnnnnnnnnnnnnnnnnnnnnnnnnnnnnnnnnnnnnnnnnnnnnnnnnnnnnnnnnnnnnnnnnnnnnnnnnnnnnnnnnnnnnnnnnnnnnnnnnnnnnnnnnnnnnnnnnnnnnnnnnnnnnnnnnnnnnnnnnnnnnnnnnnnnnnnnnnnnnnnnnnnnnnnnnnnnnnnnnnnnnnnnnnnnnnnnnnnnnnnnnnnnnnnnnnnnnnnnnnnnnnnnnnnnnnnnnnnnnnnnnnnnnnnnnnnnnnnnnnnnnnnnnnnnnnnnnnnnnnnnnnnnnnnnnnnnnnnnnnnnnnnnnnnnnnnnnnnnnnnnnnnnnnnnnnnnnnnnnnnnnnnnnnnnnnnnnnnnnnnnnnnnnnnnnnnnnnnnnnnnnnnnnnnnnnnnnnnnnnnnnnnnnnnnnnnnnnnnnnnnnnnnnnnnnnnnnnnnnnnnnnnnnnnnnnnnnnnnnnnnnnnnnnnnnnnnnnnnnnnnnnnnnnnnnnnnnnnnnnnnnnnnnnnnnnnnnnnnnnnnnnnnnnnnnnnnnnnnnnnnnnnnnnnnnnnnnnnnnnnnnnnnnnnnnnnnnnnnnnnnnnnnnnnnnnnnnnnnnnnnnnnnnnnnnnnnnnnnnnnnnnnnnnnnnnnnnnnnnnnnnnnnnnnnnnnnnnnnnnnnnnnnnnnnnnnnnnnnnnnnnnnnnnnnnnnnnnnnnnnnnnnnnnnnnnnnnnnnnnnnnnnnnnnnnnnnnnnnnnnnnnnnnnnnnnnnnnnnnnnnnnnnnnnnnnnnnnnnnnnnnnnnnnnnnnnnnnnnnnnnnnnnnnnnnnnnnnnnnnnnnnnnnnnnnnnnnnnnnnnnnnnnnnnnnnnnnnnnnnnnnnnnnnnnnnnnnnnnnnnnnnnnnnnnnnnnnnnnnnnnnnnnnnnnnnnnnnnnnnnnnnnnnnnnnnnnnnnnnnnnnnnnnnnnnnnnnnnnnnnnnnnnnnnnnnnnnnnnnnnnnnnnnnnnnnnnnnnnnnnnnnnnnnnnnnnnnnnnnnnnnnnnnnnnnnnnnnnnnnnnnnnnnnnnnnnnnnnnnnnnnnnnnnnnnnnnnnnnnnnnnnnnnnnnnnnnnnnnnnnnnnnnnnnnnnnnnnnnnnnnnnnnnnnnnnnnnnnnnnnnnnnnnnnnnnnnnnnnnnnnnnnnnnnnnnnnnnnnnnnnnnnnnnnnnnnnnnnnnnnnnnnnnnnnnnnnnnnnnnnnnnnnnnnnnnnnnnnnnnnnnnnnnnnnnnnnnnnnnnnnnnnnnnnnnnnnnnnnnnnnnnnnnnnnnnnnnnnnnnnnnnnnnnnnnnnnnnnnnnnnnnnnnnnnnnnnnnnnnnnnnnnnnnnnnnnnnnnnnnnnnnnnnnnnnnnnnnnnnnnnnnnnnnnnnnnnnnnnnnnnnnnnnnnnnnnnnnnnnnnnnnnnnnnnnnnnnnnnnnnnnnnnnnnnnnnnnnnnnnnnnnnnnnnnnnnnnnnnnnnnnnnnnnnnnnnnnnnnnnnnnnnnnnnnnnnnnnnnnnnnnnnnnnnnnnnnnnnnnnnnnnnnnnnnnnnnnnnnnnnnnnnnnnnnnnnnnnnnnnnnnnnnnnnnnnnnnnnnnnnnnnnnnnnnnnnnnnnnnnnnnnnnnnnnnnnnnnnnnnnnnnnnnnnnnnnnnnnnnnnnnnnnnnnnnnnnnnnnnnnnnnnnnnnnnnnnnnnnnnnnnnnnnnnnnnnnnnnnnnnnnnnnnnnnnnnnnnnnnnnnnnnnnnnnnnnnnnnnnnnnnnnnnnnnnnnnnnnnnnnnnnnnnnnnnnnnnnnnnnnnnnnnnnnnnnnnnnnnnnnnnnnnnnnnnnnnnnnnnnnnnnnnnnnnnnnnnnnnnnnnnnnnnnnnnnnnnnnnnnnnnnnnnnnnnnnnnnnnnnnnnnnnnnnnnnnnnnnnnnnnnnnnnnnnnnnnnnnnnnnnnnnnnnnnnnnnnnnnnnnnnnnnnnnnnnnnnnnnnnnnnnnnnnnnnnnnnnnnnnnnnnnnnnnnnnnnnnnnnnnnnnnnnnnnnnnnnnnnnnnnnnnnnnnnnnnnnnnnnnnnnnnnnnnnnnnnnnnnnnnnnnnnnnnnnnnnnnnnnnnnnnnnnnnnnnnnnnnnnnnnnnnnnnnnnnnnnnnnnnnnnnnnnnnnnnnnnnnnnnnnnnnnnnnnnnnnnnnnnnnnnnnnnnnnnnnnnnnnnnnnnnnnnnnnnnnnnnnnnnnnnnnnnnnnnnnnnnnnnnnnnnnnnnnnnnnnnnnnnnnnnnnnnnnnnnnnnnnnnnnnnnnnnnnnnnnnnnnnnnnnnnnnnnnnnnnnnnnnnnnnnnnnnnnnnnnnnnnnnnnnnnnnnnnnnnnnnnnnnnnnnnnnnnnnnnnnnnnnnnnnnnnnnnnnnnnnnnnnnnnnnnnnnnnnnnnnnnnnnnnnnnnnnnnnnnnnnnnnnnnnnnnnnnnnnnnnnnnnnnnnnnnnnnnnnnnnnnnnnnnnnnnnnnnnnnnnnnnnnnnnnnnnnnnnnnnnnnnnnnnnnnnnnnnnnnnnnnnnnnnnnnnnnnnnnnnnnnnnnnnnnnnnnnnnnnnnnnnnnnnnnnnnnnnnnnnnnnnnnnnnnnnnnnnnnnnnnnnnnnnnnnnnnnnnnnnnnnnnnnnnnnnnnnnnnnnnnnnnnnnnnnnnnnnnnnnnnnnnnnnnnnnnnnnnnnnnnnnnnnnnnnnnnnnnnnnnnnnnnnnnnnnnnnnnnnnnnnnnnnnnnnnnnnnnnnnnnnnnnnnnnnnnnnnnnnnnnnnnnnnnnnnnnnnnnnnnnnnnnnnnnnnnnnnnnnnnnnnnnnnnnnnnnnnnnnnnnnnnnnnnnnnnnnnnnnnnnnnnnnnnnnnnnnnnnnnnnnnnnnnnnnnnnnnnnnnnnnnnnnnnnnnnnnnnnnnnnnnnnnnnnnnnnnnnnnnnnnnnnnnnnnnnnnnnnnnnnnnnnnnnnnnnnnnnnnnnnnnnnnnnnnnnnnnnnnnnnnnnnnnnnnnnnnnnnnnnnnnnnnnnnnnnnnnnnnnnnnnnnnnnnnnnnnnnnnnnnnnnnnnnnnnnnnnnnnnnnnnnnnnnnnnnnnnnnnnnnnnnnnnnnnnnnnnnnnnnnnnnnnnnnnnnnnnnnnnnnnnnnnnnnnnnnnnnnnnnnnnnnnnnnnnnnnnnnnnnnnnnnnnnnnnnnnnnnnnnnnnnnnnnnnnnnnnnnnnnnnnnnnnnnnnnnnnnnnnnnnnnnnnnnnnnnnnnnnnnnnnnnnnnnnnnnnnnnnnnnnnnnnnnnnnnnnnnnnnnnnnnnnnnnnnnnnnnnnnnnnnnataggtagggcttgcataggcagtttttttgtcctaaatcctcgcccagtgcccctatagctcagctggtagagcaactgatttgtaatcagtaggtccgcggttcgagtccgtgtgggggcaccataaaatcaaagacttacgttaaatcaattattagtgctgtccgctggggaaactcaggggaaacaattgcgtttgttaagcctcttcccaatcctatttagatgatcataacttaacgttgagcagggggctagaatggaaaaaatattgaaactgtttggccaaaaactttttattatgtccatcttcatttttagtctgaatgtttcaatggctcataccaaatccttggacgaaattaagttgcttccaccagataggattaccgagctcgccaagatgggaaacccagatgctcagtactggcttggggaattaatttacaatggtgccatatcaaattggcacgacttaaggcatttaatgatgccctattgggaggatgcgatgcggcaggggcatgcaatggctacctacagattacttgagtgggtcaggggcggtgctgtgccagatgatatggctaaacttaagtcatcagagattaaattatatctcagtaaactcgctaatgcaggtgaagccaaagctaacatgatattgtttcgggatacgttatccgattttgtaaataaacgaaatacttctggtgagactgataatcttttaaaaagaactgcagataaatatctaattcgtgcttacgaaattggatcgagagacgctgcatatcggtatgcgatcatgttgtcttatggcagcatatctataccgcaggatcattctttagctgtaacaatttttgaagaagcctacgcaatggagccagatgaaccaaaaagagacgatggcagtttatcctgttcaatattaattatactttctgattattatggaggtcagtttctagttgatggtgaaaattactctggcgaagcggacgatgcatcttaccttcatacattatctaaaagcgtgaaagattcttgtccgatcttgatgttccgttactccacttacttaatggaaaacggggaggctgatgattatttcgacgcttatctcgtagctctagatgctttagatatcgctaaagctgatcatcttgctaccgattatatgtacgatttactgggaacgctagctctgaaactaaatgagccgctcaaagcgaaagagcatttttcaaaaatgaaagatgagcagtatattgaatggttatttaatgaatatttgggtggtggtctaaaactttgtagcgcgctggatgtttcaaaaaatgagtgcagggcttttatttttaattgagaaattcagcatagttatttttgtgtaaaaaatttcaaacaaagatgttaaacatttaaatgaaatattagacgtagtcgtattttaatctaattgctctgctagttgtgaagtgaagggtgccagtaaatattagatcctttacacgggtaactccgatatcgcggtggatggggctggggttcgttagggaaaaattactttggcagattctcaatggtagagggggggcaaaaaacagccgcccctttctagtgatgggtgttgctctcacatttttgactgagaatgctctatgaaataattaatacgattttcaaataaatttttagtagatttctagtatcttgtcgatactctctaataacctgagcaccagctgtaacaatcaaatcttgcggtgaattttatttatgtttgaacaagtgaaaattgaggcaacccttcgtactccgattattattcaggggtatatgacatttgatgcgctattaggtgcattactgtttgagcggctacaggatgtcgacaaaacgcactccagcattccaattcaatgtgatgatgggctgttttatgcttctgcagctcaggttgaagtcattgatcgtggtggtttggcaattgctgctaatctgagggcccagcatgacttgaacccaaatcatgtaaagaaaagtcgtgatggctcaaaactgcacaaaagtttaggattgaagcgccgtagacagtttggagcagttctaaataaatacagaacaatcactgtaaattctatcagttgggatgtgactggcgatattaaccagattgaagacttgcttaatgatgctttttttatcggcaaaaaaagaacagcaggttatggtgaagttataagttgggacttcaagaacagtgaaacagacggtctcatagatgcgcaaggacaggcactaaggcctattccggtagaacgttttaatggtgataagtctttgccaataattgataccgcttggaagcctgcttattggaatcctgagaacaggtcagcctgttatgctcctgagcctgtctcatgaatacatttgtttttctccgggagcattttgctagatatgttttgcctgatcttagcaatgacgcagtcgcagactgcaaacgtgcactcacgatgaaccatctccttgttaccggaaagtcggggaggttaagcggttgggtaatggttaaaaaagataaaacctatatccaagccaaaattgcagcaaagcatgcaaaccttataaccgccgatccacgtacccggtatgaagcatggtatgaggagctcgaaaatttttcaggacctacctgctttatagaatttacaaagagtacctttaatattggcaatatctttttgacccatgatgcgcgagttgtaaaaatttgtgggccagcttcgtctcaaacattcaattataccgatgaaccaaacgaagcttctggtgtagcacataaagtgctcgccaagatgcggagaaaaaatgctgtttgattataaaatattaaaatctgatgcaaaaaatgcctatgacttgcatcagcttgtcgctgccacctttaagggtgagagtggcagaaatttgttctgtgattacggcgaccacatacgtgtgcggagcacaaagcacactctaaatgcgaaacaaggtgtcgccgttactgtgcctgccgtcggcgcaatagctttcattgaattgcgagcatcctgttatgtgtctgggggaggaaaaaaatatttcctgatgcaaggtgattggagagccaggcatacctggcttgaaaaaaagagcgcccaaagtggcttttcggttttaaatgtaacctgtcaatcagaactgatgaaaatcccaaagccaggtgcacagttcacgcttgattgcaccgactttgctgcatgcatcaagatcaatgacatagaaaaattcgaaactgccttgcgcgatggaattggatcgaaaggcagagcgtttggttttggaatgcttgttttatgaataatatggagacaatgaaatggtaaatacgatctttaatatggttctaacatctgagcagcctttgagtatcacgctacccgtggccgagtacactcgggcaaataaatttgctaactctccagttatgacccgagggctcgacgcggaaggtgcgaagcaagaaacatgttacattcctgctacgacttttcgcggaatgctcaggcgtcatgtggttgtcccgctgatggaggagcgagccagaaacggtgatcactatactttggatgaagcctaccgtgatttgattgggcaggatgctgccagcgaacaacagccagatgaaattgatctgatggctttaaaaaatatgcgtgcacaaaatccaattgtcgatttgtttggtctcggtttgggtgttcaatcacgcctaaaagtcagtcactttcttccagagcataatattttgccagaggtatttaccaccgctcgaaaggacttaggcgatgcagacgatggtgcaatactggacttggttcgcgatgaagagagagaaaaatatctcaaaagagccaacgcaaattcaaagagatctgctgcagaaagccttctggcgcggctggtgaagcagaagaaaaaggacggttcatcagcagacttggatgctcaaatagttgcgacagaaagtaaggttgaagagtaccgtgatgcgatggatggcatgaccaattcttctcggaccatacttacgcattacgccatgcctgcgggtgtacagtggacgggacgtttaattattacaaactccactgaaaaagatatcgatgctctgtgtggagccttagatcgtttcagtagctatccgatgattggtgcccagcatgcccgtggatgcggtgagattagtggtattgctaatatagaaacagatagaaggctggttaaaagaattagttttggtggctttgcgccagcacaaatagacaacgtagcctaggatgaaggagctaatcatacattttttatattggaaatgcggttaaagttaacttttctaaatggttatgaaaactctgttgtggcccccattaatttgtggggcaactgaaactcgaaggtctgtattgtacggtcatagaaggttgtggcccccatttatttgtggggcaactgaaaccataaccctgacaccttctattggactaatgctgcggcccccagtagtttgaggggcaactgaaacatggagcaacaactaataaaaacactactggttgtggcccccattaatttgtggggcaactgaaacaagtcggtggccagttgggtgttgtaggatgttgtggcccccattaatttgtggggcaactgaaacgatggcttcacgcaagttatagcagccgatgttgtggcccccattaatttgtggggcaactgaaactctgcaccgaagcggatcttttgccgccccgttgtggcccccattaatttgtggggcaactgaaaccgccgcgtacccggccttatttctgcgatgttgtggcccccattaatttgtggggcaactgaaacaagatggcttgcccaggtgcgccagcctgccgttgtggcccccatcgatatgtggggcaaaataaagagagccaagcatgctagttttggctctctttaacgtaacgcaccatatgaagttggatttaactagtgtttaattcacacttttggttaggtttactgattcaaagtggaaaatgggggatgatcagaatttttagatcggaagagcaagatcagttttttaagctgatccaaaaacatatagaaacccctgatgcacctttactgctggaaggagccactggactgggtaaaacgctgccgttccttgttgccgcagcggtaagtggtaaaaaggttgcgatagttttcccaacccatcagctgatcaatcaggctttggatagctgggacttaaaagcaacacttgcggcctatcccgcagtgattgtgaaggcctttagacctaggtcatatttcgaagcctcacctgcagattacgcggcacacaaacaagaagcgttagacgcagacataatgttctgcacctcggtatccgtgatcatagaccaaagactcaatggcgattataatggctcaacagacagagatgtgattatctttgatgaggcagatcagcttcctcaatttgctgctttgacctctgatatttcactcagcagaattgatctaagaagcctcagaattaatgaatcttcgccaaaagagaccattgatgcaatcttcaaaaagaagacattgccgtcagaaatcagggcaaaggcgcgcttgatagaagaagcgttaggccttggcgatgtttggtttattaaggtgggttttgcggatgatggagccttagaggtgcgctcacgcttgcctggaaggctgttaaaacgcgtatccaaccgagcatcgacaatttttataagcgcaaccctgtctgtaaatggtacatttaaagacttttgtcgtgcgatgggaatagaagagaagagtagactgtctgcaatagttgagcccaagaaacatggggacctacaatttgattttataactgatgaagagcttggaagcgatgcttggctggacgcagtttgtgaagcaattgaatatgccgatcatcctgtactggtcgctacaccgtcgcattctttagctcaacagattgcaagtaatgctactcaggcgaccttaagagccgcggatgaaacaacgtcgcaagctgctgcgcgtatgggagatacaaaggttctcatagcagcgggtgcatgggcagggcttgatacgccggtacaatggaaaacggttgtggtacctagaataccctacactgggccaaacaatctcagagagttttggtatgatgatgaagaggactttggcgtccagaagccagatccgatgtcatcttttatagattcaaaaaatgctgcggctcgtaggctgaagcaggtctttggcagaggcttaagaacacccgatgccgaatgctcaataatactttgcgacccgcgaattgatcgttttaataagattgcaccagccagatttcagaaaacgtattttgagggaatggccatttcagttaatgcaacaaaatctgaacgttcgcctctgcttagaaaagcagcactcgctcattatggtgaaacctgcatggcctgtgactttattcctgagtctttaaggcaattagaaatccaccatcttgagccccttgctgatcgtgggccaagccacacgaccctgaatgacgtcgtggtattgtgcagaaactgccacggtttggcacatgacactaatccgcccatacagttgccagagcttaaattacgatctcaaaagttgaaaaagaaaagacctggattgtccatgatttaaagatttcgattttcctgtacgctggtatccattaagttaaccagtcaatttggctgatcccaaacaacaattgtttgatgaatagccccagttttttgccgtactgacataccactgacacgtgactgcgcatacgcactggctaagtaactaggttttaacgaaattggatagaattttgttaaaacggaatgtcgtcgttatcaaacgaattaatatccgcaattggtggagtgttggcgttttggaaattaactgactgcgagctgttagcgtcgttaccattgcgtgaaactttccacgccttaacatccgtgtaccaacgcccattatattctcggctctccagatcgattgaaacctcaacggtttctccctgctggatattaaactgatcaatcttatcaccccaagccatgaagcagactttcttggggtattgggcctcagtctccagaacatactcttgcttgcgccattctccattcgctgactgtccggatttaacttccaatatttcaacaatcttccctgaaatttccaaagtcattacctttcctgcatccattgtccctagttactttcgtatcaaactaggcgatctgaataaaaggccaagcgtattcttctgaatcttgtggattgagttgaagctacgcatgtgcagtaaattgtaggtatggatattcagtttgccaaatacaaagagcttatcgagcagcaattagaggggcttactgcagaggatgtgctgggccagagcgcacagaagactgtcgagttggaccagcagtccgttggaaggctttcgcgcatggacgcgctgcaatcccaagccatggcacaggcacagcagagacgcagggatgcacacaaacggtctctgcaagccgctcttcgcagattagctgaagacgagtttggttattgtatggagtgcggagaagagattgaggaagcaaggttgctagctaacccagctgtcttgaagtgcattggctgcctcaacggatagcatgcgttctcaatcttgtgtggacctgtggagcatgtggagcttcgtaacaataggctgcttacttggaatcttacagtgatacttgatgaactttagcctatatggttgagtatttggatgaagattctagatcacatgtttcgctgtgtagtagctgtgctgttagctgttggttctggagcagctattgcgaaagagcgtttgtgttgacccaaagaagctttcacattgcttttgcgaaacaactattcccgcctatgccaagccgtatgccatttatttttcccgcgctgtttcgatttaggcttgcattataattgtgcgtcgtttggttaaatccaaacttggcactcttcaaatttatatgtgaaaaataaaaccataagctgactaatccatcgagcttgaatacagctctcgagttgttctgtttttggactttcaaagttccaagctgcttccctctgcagctataatgatacacagaataaaagccagccttggctcgttttggtttagggcaaaaatttgagggtgctactttcagttgttcgatgaagttagtgcttattaaatcgttctttttagttgaaagctttgcttgtctagcaaatgcaactgctgccgcttgagttttgcgcccccatattccgtcggcactgcccgcattgcagcccgcagcattgagcagtttctgaattttgataactgctaaccttaaccgttcttcatcattgatcgaaggttccttttcttcttcagcctgtttctgttctttagctgatgcgtcgagatatttcataaatttggtgatgaaagtattaattttatgaaaattttcggagctaatttccttggtgcgagcatttagtttctctttctcctcattatcaaagacatagaattcacgacttctaaacattttctcaaagacccacggaggcgtttcaaattcattcaggaagcctattatttcagacactgtgaattgagtattttgctgtgtttcactgacctttgcattagctttatcgctatctgaaccatatgtgccagcttgatgaactgccaagatcccatcggcttgtcgtatctttccaccaaagaacatgaacgaacatgctgaataacatcctagttgctcgggaagctttgggacataagtagcaatccctttatcatgaatgatgcccgccatgttgagaccttcccaaacactgccaccatcactcgccagaacaactatattaatgtcatggtttctgatggcacggcgcaattcaaagctgtcatattcctcgatatcattgaggaagaacaatgcatttgggacagttcctgtatgcaagaaggaaccgtaaacagtaatatcaaatgggtcttttttctccgcactgactgcggttgtcaaaactagggagaaaagacctaataatttcacgaataagttatgcatacctttaacataacgctgcgagagattaattgtagtctgaaattgagttatgggtgaagttatctaaaaagccgattaccctgatgatttgatatcagaggcattttttaatgctttaggtgatgcacaagaaggtttttgtccgaagttagtagttgaagcaaatcaagtaagaagttttgctcgcgcttatcaagccagaaattcatgtcaaaacacgaaacatcgatttcggtggcttgtatcttataaacctggctccaaaagatttagttatcaaatttcttgggaaggtaactcatcaaagagctctactatgttggcagaatttcaaaggaacaggattaaattctacggttcaagtggacgtctttcgataaaccgaaacggttttgtttctaaaatgacaataggaaaatgtttatatctcacagcaatttaaaaattaataactaattattataaaatcagtatgtcttgataacctccacatggtccactggtccacacccgttagcgcagaccagtgactaaatgttagggcaggtacctcgcaaatgcctcctgtaacttacccacttcatagacattagcatgtcttctacgctccgtataaacaccgtatccttgaagcattcttgataaccacttctgagtaataggcttgccgctgtaattatgctgaaaccattcgctgtcttgcttcatcacaagatagctaaggagttcggcagcgggtatctcagtcgacttgtgactctcgatcagcaatcgaatgtcagtcaacaactcggtcccctccgacagcgggttactctctttgttgtttacctctagttcgttgaatgccacttgcactctattaggccaatcatcccccaaaaaattggcgatttgaaacattggcttccaattatctactacgcggtctgaagctgtgcgaggaattctgacttctaattgtccaagacttttgccttcgtcgtctgcccaagaccttaaacattgtcgaagctcttcgttcttttcgaagtaatctattggtgttgtagccacggtttctgtaaccatctttctacgcatcttgattttgattgaacgactgagcaaagtatctttttgcgttcctatgcctgcaaatgcttgtggcgaccacactgatatttcgatggttttatgttttccgtcgtccgttggctctgtccttagtacgactgcggttctacgtgtatgccctgcattgatgatgccgtttagcgggtcattcccacgaattgtgatatcggcttcgtcaatcaatagggtcggcttatcgctctcgattatcctgtagaatgcagctggtgttatagaagcagccatccgtgcgttgtaagaaaatgcctccactaagcatagcaagctggtcttcccgcattccctctcaggggagttgatgtagagctttggataaagcgtccagttgtccattaagtaggtgccaacaatccataaggctattgcatcaggatgggtttcattctcaaaaacaatatgccgcctcagctcctgagctatgtagtcgactgtttgggagacgtttttagaagagtgttccattatgagttacctccactgcggtgcttccgcacgcattctgaaatccatgcttgaacgtcttcttctaaccagccgcttctgcactgactgatttttatggatttgggaaagttaccttcacgagccatgcgatgtaggtgtgatcgcgatattgatgtgaggtctgatacttgttgggcttttagaatacgcatagtgtgctccatcttgttaagatgtgcataatttacgtggtcagtatggctctggcttggtcacaaaattagtttatttcgcagaaattttgggcaagaaggataaaaccttcttcgattttataaatcggttcttcattgcggaggagcccgccggaaaaatggttttaccagtttccttttttgctcgactgctagccactgcgactacgtctagaacactgccatcgtcacctgttgagacgcttggataaacaggtctggaataaacagtggcaattgtagccaccagacccagcagaaagagatgttcagtttgtgatttatttgggccagttctaccattcttaggttctttttttatgtccatgagaacgtcagaaagccatacagaaagatccctaggcttgccggcaccgtttgcttcgaaatgggcgcatatccttttggctgtaatgaatgccaacttatctttctccgctttcgcaagcaaagctgggagaaaatcgtctagttctgaatgtccactattggtcagtgctagctcgcggtagccttggaaaaagtgggcgtcttttaagggggattgtgtaaactgcacgatccggttttgagcgtattctattgcttggtctggccattcacttgacgatttcatctaacctatccgcccacttctggagcgcctccctcttttcatccatgtaggaatagcgatcataaatttgtgtgacgccacgctctgagtggttaatgattttttgtagtattaaccggtctattcctagctttgtgaggttcgtggcaaccgttcttcttaggtcgtgaaacttccaattttcgactccggacaagcagtccatctgtaactttgcttttgaaaacccattgactgggcggtctccgtttcgcccacttttgattaagaagttaccttccttttcgagcagttgattaactaagcgctgggcttgatttggaagtggaataatgtgcggctgtttattttttgtgtcagtagcggagagataccaactgccatcaatgatttgagatcgccgcatagaagctgtttcaacacgccgctgaccgcagagtagtaaaagtttaagccacgcactgtaaggcccgctcatagcctctgctgcgttccagatggctttgatttctgcatcattgagaactcgatcgcgctcgctctctttatgccttggctttatatgatcagcgggtgaatgatttaagtagcctcgctcgaccaaccatccaaaaaactttctgatatgtgctaaggctctgttagctgctgtttgcttattccgtgcgatcaggtcgtctaaaatttggtgtatgtccgctctcgtgacttcagaaattggctgtgttccatagaaattactgaggtacaggcggagattgctctcggcttgtttccaactggagttcttaggcttggcatatgtttgaataaactcatgcaccatcaactcgacagtcatttcttgcaagcgttgcttagtacgtttttcagagcgtgggtcgataccttgggaaacaagttttcgaaattcatcagcttttgttcgtgcaaactttaagtctacgtcagggtgcctgcctaatgttgcacggcccatctttgacccaagcctaaatacaaaagaaaatgttttcacgccacttggcgaagatcgcaattgaaggcctcgcgtacctctatctctaaaatcttcacgttcaacaggtggcttcagttttcttaaccacgcatctgtaaagttaacttcatatgacatggggaaacaccggggaaacattttaattgatattgagtgtaacccatgatccagtatgtttcaataagataaatttaagatactagatataaacaattattattcataaataatacttattgatcacatatgatttatataaagcagctaatttgtaatcagtaggtccgcggttcgagtccgtgtgggggcaccatttaaatcaataacttaaaagataaacatctgaacccatttttgttttgggttacaaatgggttacaaaaaacatctgtt

SEQ ID NO: 7 - DNA, 13935 bp, Artificial Sequence
  Synthetic Oligonucleotide
  misc_feature (1)..(5681): n is a, c, g, or t
nnnnnnnnnnnnnnnnnnnnnnnnnnnnnnnnnnnnnnnnnnnnnnnnnnnnnnnnnnnnnnnnnnnnnnnnnnnnnnnnnnnnnnnnnnnnnnnnnnnnnnnnnnnnnnnnnnnnnnnnnnnnnnnnnnnnnnnnnnnnnnnnnnnnnnnnnnnnnnnnnnnnnnnnnnnnnnnnnnnnnnnnnnnnnnnnnnnnnnnnnnnnnnnnnnnnnnnnnnnnnnnnnnnnnnnnnnnnnnnnnnnnnnnnnnnnnnnnnnnnnnnnnnnnnnnnnnnnnnnnnnnnnnnnnnnnnnnnnnnnnnnnnnnnnnnnnnnnnnnnnnnnnnnnnnnnnnnnnnnnnnnnnnnnnnnnnnnnnnnnnnnnnnnnnnnnnnnnnnnnnnnnnnnnnnnnnnnnnnnnnnnnnnnnnnnnnnnnnnnnnnnnnnnnnnnnnnnnnnnnnnnnnnnnnnnnnnnnnnnnnnnnnnnnnnnnnnnnnnnnnnnnnnnnnnnnnnnnnnnnnnnnnnnnnnnnnnnnnnnnnnnnnnnnnnnnnnnnnnnnnnnnnnnnnnnnnnnnnnnnnnnnnnnnnnnnnnnnnnnnnnnnnnnnnnnnnnnnnnnnnnnnnnnnnnnnnnnnnnnnnnnnnnnnnnnnnnnnnnnnnnnnnnnnnnnnnnnnnnnnnnnnnnnnnnnnnnnnnnnnnnnnnnnnnnnnnnnnnnnnnnnnnnnnnnnnnnnnnnnnnnnnnnnnnnnnnnnnnnnnnnnnnnnnnnnnnnnnnnnnnnnnnnnnnnnnnnnnnnnnnnnnnnnnnnnnnnnnnnnnnnnnnnnnnnnnnnnnnnnnnnnnnnnnnnnnnnnnnnnnnnnnnnnnnnnnnnnnnnnnnnnnnnnnnnnnnnnnnnnnnnnnnnnnnnnnnnnnnnnnnnnnnnnnnnnnnnnnnnnnnnnnnnnnnnnnnnnnnnnnnnnnnnnnnnnnnnnnnnnnnnnnnnnnnnnnnnnnnnnnnnnnnnnnnnnnnnnnnnnnnnnnnnnnnnnnnnnnnnnnnnnnnnnnnnnnnnnnnnnnnnnnnnnnnnnnnnnnnnnnnnnnnnnnnnnnnnnnnnnnnnnnnnnnnnnnnnnnnnnnnnnnnnnnnnnnnnnnnnnnnnnnnnnnnnnnnnnnnnnnnnnnnnnnnnnnnnnnnnnnnnnnnnnnnnnnnnnnnnnnnnnnnnnnnnnnnnnnnnnnnnnnnnnnnnnnnnnnnnnnnnnnnnnnnnnnnnnnnnnnnnnnnnnnnnnnnnnnnnnnnnnnnnnnnnnnnnnnnnnnnnnnnnnnnnnnnnnnnnnnnnnnnnnnnnnnnnnnnnnnnnnnnnnnnnnnnnnnnnnnnnnnnnnnnnnnnnnnnnnnnnnnnnnnnnnnnnnnnnnnnnnnnnnnnnnnnnnnnnnnnnnnnnnnnnnnnnnnnnnnnnnnnnnnnnnnnnnnnnnnnnnnnnnnnnnnnnnnnnnnnnnnnnnnnnnnnnnnnnnnnnnnnnnnnnnnnnnnnnnnnnnnnnnnnnnnnnnnnnnnnnnnnnnnnnnnnnnnnnnnnnnnnnnnnnnnnnnnnnnnnnnnnnnnnnnnnnnnnnnnnnnnnnnnnnnnnnnnnnnnnnnnnnnnnnnnnnnnnnnnnnnnnnnnnnnnnnnnnnnnnnnnnnnnnnnnnnnnnnnnnnnnnnnnnnnnnnnnnnnnnnnnnnnnnnnnnnnnnnnnnnnnnnnnnnnnnnnnnnnnnnnnnnnnnnnnnnnnnnnnnnnnnnnnnnnnnnnnnnnnnnnnnnnnnnnnnnnnnnnnnnnnnnnnnnnnnnnnnnnnnnnnnnnnnnnnnnnnnnnnnnnnnnnnnnnnnnnnnnnnnnnnnnnnnnnnnnnnnnnnnnnnnnnnnnnnnnnnnnnnnnnnnnnnnnnnnnnnnnnnnnnnnnnnnnnnnnnnnnnnnnnnnnnnnnnnnnnnnnnnnnnnnnnnnnnnnnnnnnnnnnnnnnnnnnnnnnnnnnnnnnnnnnnnnnnnnnnnnnnnnnnnnnnnnnnnnnnnnnnnnnnnnnnnnnnnnnnnnnnnnnnnnnnnnnnnnnnnnnnnnnnnnnnnnnnnnnnnnnnnnnnnnnnnnnnnnnnnnnnnnnnnnnnnnnnnnnnnnnnnnnnnnnnnnnnnnnnnnnnnnnnnnnnnnnnnnnnnnnnnnnnnnnnnnnnnnnnnnnnnnnnnnnnnnnnnnnnnnnnnnnnnnnnnnnnnnnnnnnnnnnnnnnnnnnnnnnnnnnnnnnnnnnnnnnnnnnnnnnnnnnnnnnnnnnnnnnnnnnnnnnnnnnnnnnnnnnnnnnnnnnnnnnnnnnnnnnnnnnnnnnnnnnnnnnnnnnnnnnnnnnnnnnnnnnnnnnnnnnnnnnnnnnnnnnnnnnnnnnnnnnnnnnnnnnnnnnnnnnnnnnnnnnnnnnnnnnnnnnnnnnnnnnnnnnnnnnnnnnnnnnnnnnnnnnnnnnnnnnnnnnnnnnnnnnnnnnnnnnnnnnnnnnnnnnnnnnnnnnnnnnnnnnnnnnnnnnnnnnnnnnnnnnnnnnnnnnnnnnnnnnnnnnnnnnnnnnnnnnnnnnnnnnnnnnnnnnnnnnnnnnnnnnnnnnnnnnnnnnnnnnnnnnnnnnnnnnnnnnnnnnnnnnnnnnnnnnnnnnnnnnnnnnnnnnnnnnnnnnnnnnnnnnnnnnnnnnnnnnnnnnnnnnnnnnnnnnnnnnnnnnnnnnnnnnnnnnnnnnnnnnnnnnnnnnnnnnnnnnnnnnnnnnnnnnnnnnnnnnnnnnnnnnnnnnnnnnnnnnnnnnnnnnnnnnnnnnnnnnnnnnnnnnnnnnnnnnnnnnnnnnnnnnnnnnnnnnnnnnnnnnnnnnnnnnnnnnnnnnnnnnnnnnnnnnnnnnnnnnnnnnnnnnnnnnnnnnnnnnnnnnnnnnnnnnnnnnnnnnnnnnnnnnnnnnnnnnnnnnnnnnnnnnnnnnnnnnnnnnnnnnnnnnnnnnnnnnnnnnnnnnnnnnnnnnnnnnnnnnnnnnnnnnnnnnnnnnnnnnnnnnnnnnnnnnnnnnnnnnnnnnnnnnnnnnnnnnnnnnnnnnnnnnnnnnnnnnnnnnnnnnnnnnnnnnnnnnnnnnnnnnnnnnnnnnnnnnnnnnnnnnnnnnnnnnnnnnnnnnnnnnnnnnnnnnnnnnnnnnnnnnnnnnnnnnnnnnnnnnnnnnnnnnnnnnnnnnnnnnnnnnnnnnnnnnnnnnnnnnnnnnnnnnnnnnnnnnnnnnnnnnnnnnnnnnnnnnnnnnnnnnnnnnnnnnnnnnnnnnnnnnnnnnnnnnnnnnnnnnnnnnnnnnnnnnnnnnnnnnnnnnnnnnnnnnnnnnnnnnnnnnnnnnnnnnnnnnnnnnnnnnnnnnnnnnnnnnnnnnnnnnnnnnnnnnnnnnnnnnnnnnnnnnnnnnnnnnnnnnnnnnnnnnnnnnnnnnnnnnnnnnnnnnnnnnnnnnnnnnnnnnnnnnnnnnnnnnnnnnnnnnnnnnnnnnnnnnnnnnnnnnnnnnnnnnnnnnnnnnnnnnnnnnnnnnnnnnnnnnnnnnnnnnnnnnnnnnnnnnnnnnnnnnnnnnnnnnnnnnnnnnnnnnnnnnnnnnnnnnnnnnnnnnnnnnnnnnnnnnnnnnnnnnnnnnnnnnnnnnnnnnnnnnnnnnnnnnnnnnnnnnnnnnnnnnnnnnnnnnnnnnnnnnnnnnnnnnnnnnnnnnnnnnnnnnnnnnnnnnnnnnnnnnnnnnnnnnnnnnnnnnnnnnnnnnnnnnnnnnnnnnnnnnnnnnnnnnnnnnnnnnnnnnnnnnnnnnnnnnnnnnnnnnnnnnnnnnnnnnnnnnnnnnnnnnnnnnnnnnnnnnnnnnnnnnnnnnnnnnnnnnnnnnnnnnnnnnnnnnnnnnnnnnnnnnnnnnnnnnnnnnnnnnnnnnnnnnnnnnnnnnnnnnnnnnnnnnnnnnnnnnnnnnnnnnnnnnnnnnnnnnnnnnnnnnnnnnnnnnnnnnnnnnnnnnnnnnnnnnnnnnnnnnnnnnnnnnnnnnnnnnnnnnnnnnnnnnnnnnnnnnnnnnnnnnnnnnnnnnnnnnnnnnnnnnnnnnnnnnnnnnnnnnnnnnnnnnnnnnnnnnnnnnnnnnnnnnnnnnnnnnnnnnnnnnnnnnnnnnnnnnnnnnnnnnnnnnnnnnnnnnnnnnnnnnnnnnnnnnnnnnnnnnnnnnnnnnnnnnnnnnnnnnnnnnnnnnnnnnnnnnnnnnnnnnnnnnnnnnnnnnnnnnnnnnnnnnnnnnnnnnnnnnnnnnnnnnnnnnnnnnnnnnnnnnnnnnnnnnnnnnnnnnnnnnnnnnnnnnnnnnnnnnnnnnnnnnnnnnnnnnnnnnnnnnnnnnnnnnnnnnnnnnnnnnnnnnnnnnnnnnnnnnnnnnnnnnnnnnnnnnnnnnnnnnnnnnnnnnnnnnnnnnnnnnnnnnnnnnnnnnnnnnnnnnnnnnnnnnnnnnnnnnnnnnnnnnnnnnnnnnnnnnnnnnnnnnnnnnnnnnnnnnnnnnnnnnnnnnnnnnnnnnnnnnnnnnnnnnnnnnnnnnnnnnnnnnnnnnnnnnnnnnnnnnnnnnnnnnnnnnnnnnnnnnnnnnnnnnnnnnnnnnnnnnnnnnnnnnnnnnnnnnnnnnnnnnnnnnnnnnnnnnnnnnnnnnnnnnnnnnnnnnnnnnnnnnnnnnnnnnnnnnnnnnnnnnnnnnnnnnnnnnnnnnnnnnnnnnnnnnnnnnnnnnnnnnnnnnnnnnnnnnnnnnnnnnnnnnnnnnnnnnnnnnnnnnnnnnnnnnnnnnnnnnnnnnnnnnnnnnnnnnnnnnnnnnnnnnnnnnnnnnnnnnnnnnnnnnnnnnnnnnnnnnnnnnnnnnnnnnnnnnnnnnnnnnnnnnnnnnnnnnnnnnnnnnnnnnnnnnnnnnnnnnnnnnnnnnnnnnnnnnnnnnnnnnnnnnnnnnnnnnnnnnnnnnnnnnnnnnnnnnnnnnnnnnnnnnnnnnnnnnnnnnnnnnnnnnnnnnnnnnnnnnnnnnnnnnnnnnnnnnnnnnnnnnnnnnnnnnnnnnnnnnnnnnnnnnnnnnnnnnnnnnnnnnnnnnnnnnnnnnnnnnnnnnnnnnnnnnnnnnnnnnnnnnnnnnnnnnnnnnnnnnnnnnnnnnnnnnnnnnnnnnnnnnnnnnnnnnnnnnnnnnnnnnnnnnnnnnnnnnnnnnnnnnnnnnnnnnnnnnnnnnnnnnnnnnnnnnnnnnnnnnnnnnnnnnnnnnnnnnnnnnnnnnnnnnnnnnnnnnnnnnnnnnnnnnnnnnnnnnnnnnnnnnnnnnnnnnnnnnnnnnnnnnnnnnnnnnnnnnnnnnnnnnnnnnnnnnnnnnnnnnnnnnnnnnnnnnnnnnnnnnnnnnnnnnnnnnnnnnnnnnnnnnnnnnnnnnnnnnnnnnnnnnnnnnnnnnnnnnnnnnnnnnnnnnnnnnnnnnnnnnnnnnnnnnnnnnnnnnnnnnnnnnnnnnnnnnnnnnnnnnnnnnnnnnnnnnnnnnnnnnnnnnnnnnnnnnnnnnnnnnnnnnnnnnnnnnnnnnnnnnnnnnnnnnnnnnnnnnnnnnnnnnnnnnnnnnnnnnnnnnnnnnnnnnnnnnnnnnnnnnnnnnnnnnnnnnnnnnnnnnnnnnnnnnnnnnnnnnnnnnnnnnnnnnnnnnnnnnnnnnnnnnnnnnnnncgtcgtggcacccaataatggcggactccgactccgccaagcatcaagcaaacacgcgccttcgggcgcgttttgcgttcatacatacccaaaaacttatccaacggtcaggcgcttgaccgtcggctcaaagcgggtgctggttcgcagcggtttgtgtcctgagatgcaaacatgtttgggtaggactggccttagatggcgtaaagcaggtccccagggtccatcacgggagcgtacaagaagctgcgggcttcgctggggtaacccccatcgcgctgattcatggcgatcagcttgcgttcaactagaagccgcctcttgggtggcgctcattcggacaacagaacccggagctactgggcgtgctgccaggggggtccgcatagcgagcaagttccgacttgaacagatggcctgccaacagaggccaggggcgccagcgttaccccccgtccccgatcaacttaggttgggaagtctgacgtagccatgagtgggggagcttgggtggccatcggggtgtgcgaccttcacgcgcttcaattgggaactgcaaccctacgcgcccaagacgctcagaacggttgctctgctgattccgtagtcccgagcgatttggctcacgctgacgcctaaggccttcttggaggcgatctcagtccgctgtgcctcattggtcttgttaggccggcctagcttcttaccttccgccctggcgcgcgccagccccgtctggacccgttcgatgagaaggctcttctccatttccgcacaggcagcgaggacatttacgatcagcgttcctgcactgctggtgaggtcaagggttcccagttgcagcaccacgagcttgacgcctagctcttgaaatgctttgaccgtcgacatgcagtcgatggcatctctgcctagtcgtgaaagctctcggacaaccaccgcgtctccagcttcgagcttgtccatcatccgcctgaactgagggcgggtcatcgctggcgtgctaccgctgatcacgtcttcaaagtagcggcccgccgcaatctggaagccggcctgctcaatcgccagcttctggttctcattggtttggaccccagtgctaactcggctgtaggcaaagacgcggctcatggctagtacctcaaatcgtcgggaaacactgttgataatagcctgcacgtagaaaatagcaagacctatttttccaacatgctcggagcacgcgatcggagggtgtcggataacagttgttttccgacgggtgcggcatggtggggcgggcaatggaagtcggcgcatcgccgtaagccttcctcgaatggaggatggttggcaatcggcttgctggctggttgcgtcgcatgggcttgaccaccggctgctcgagcccatcggccatctgccatctaccgagttcgaacaggcctactaatctcaagtcgctgagccggccgcattggcctgacacacatcgacaggactccgcaacgcgcagttcaatcaagagagcgtgaggctttgggtctcaggagccggctgaaccattcagacctctcccggggggacccccaccgtacccccaccccccatttgccaggatgggacccacagatcggtatgaactcgaattcgctcaaacaacgccctcggcccaggatttcggctcgatgtaactcctcccaacttctcgcactcagggcaaaccctgcacgctgtaatgccagcatcggattccagtggcccaaaatctggtgatggttcctttcacattgagggcacggctggcagcgcccatcatccggcgtgggttcggcaccttggatgccctactgatggctgtgcttggtcgtggggacgtttccgacctgctccagtgtgaacaggagttgtacttcgcaagtgccgggatcatggccgtcgggggcgcagcacaacccgcctcatttgtggccagcatgcggcctgagcacacacctgagtggcttgacgtcgtggcgcccaacaccgtcaataccgatctgtccatcccggatggtgccaaggggcgtgcccgttacaacgacctgaggatcggcctgtccaggcagcgcgagtgcggcaacgtcatcagcagttacaccgccgtttccggtggttccgtcgagtggtacgccacgggtgatgcccaagctgtgctcgatgtcgtcaagcacgtgccattcataggcaaacgccgtgccgcaggctatggagaggtggaaggctgggaggttgaggagggcgtgcttgacggggtctgcgggttcctgggggaacctttacggccagttcctgtttcgcgctgggtccatggcggtgactggataccagttgaagccgcctggaaggccccgtattgggacgtccgtaaccgagcgaagtgcttcgtgcccgagatcgcatgaacggtgcagagttcttcatgaagcacgccggttatcgcttgctgccagccggcatgagcaccggcgatgcagtggacgatgcacggtcgctgttttccatttccttgcccctgaacacaggctcgacgcttaggttgtcgtcatgctggatggtggtgactccgcaatgggtggccaccagcttcaaagccttgccggaagctgggttccgtttggggggtgaacgcgccgccgcaatccttgaggcgttaaggtcaggggagccctgcctgattctggctttggggaaacgctccctggagcctcgtgacctgtttgtgacctacgaccctcgtgccacccggatgtgctcagaaggcaccacaaagacctttgacgccacgaaggagaagtggtggacctcctgatcaacaaacctgcaagcgttcgcggctacgccctgcaccgtctggttgcagagtacctccaaggccgccctgcactgtgggcggatgaaggtggccaagtccgaatacgaccgcgagacgccacgcctcctgcgtacgtcgccggcaccctgctggggttcaccgtccgcgcctgcgtttcacacagcaccaaaaaccgccaccactatctgcctgtgggcgactggcggcggcgccgcacatggctggaggccaaagctgcgccgaatgggttcgaggtcgttgctgttcatgtcagtggtgatatggcactgatcgaggcacatgacggacgccgtttcacggtggacgcaaccgatttcactggcctgctgcgcgtgacagacccgcaagccttttctcgatgtcttgttacaggggtgggcaaggttggcaaggcgttcggcctgggcctgctcatcgtgcagtgatccatttacctgggaggtcctacaaaatgaatccggcattcatcctggccgatgtgctcatccatacggcccagccgctgacctacacccatcacagcgtcaaggatttgccgctgatgacccggggcgtcgatgcggaagggcgcccccaacggaccgtgtacctgcctgcaggccaattcagaggccgtttgcgccatgaagccgccatggcggcactgcgcgccaagcctgagaaggtcagacttgaagatgcatatcttttggctcttggccaggacctcgctcggcaagaagaagatgaacccgaggcggtgcgcctgggtgaccagatcaagttccggcaagacaacccgctgctggacctgtttggcacctggaaagttgccagccgcctgtttgtgtcccatctaatgccacaggtcaatgtcatgcccgaccgggtcagccacatcaggcgcgatctcgacagcagcgaggacttgatgggcatgctggcgggtgaagagcaggaccgcatgtatgaccgacaggccaagcaggcactggcctccaaggctgggaccctgatcaagctggcggagggagaactcagggcggtacgaaaggcaaaggacacggcgctcattgatcagcttgaatcgaagctgaaggaacttgaagaactgaagaagcagcacaagggggaagacgactccgacaacaccaagcacctcgtggagttgcaggtaattccggcaggaattgatctgctgggcaagatcaccgtacaagcgccccgacgaacagacatcgggttccttatccaggcacttcagggtgtgagcatgaagcccttgatgggtgcccagcgcgctcgtggctgcggcgaaattcgaggtcgcgcttctttccgtaccccagatggcgaagtgctgacggcagttgagtttggcggctttcagcctgcgaaggtcgactggactgcggagggccaagccttcatggggccagcggcagcctgaacgttgcctgtgtgaacttccgcagcccagagcaacaggcctatgcccgcctgatcgaaggtgcgctgaagcctggaccacccctgctggccggggcagcaccgggtctgggcaagacacacgggtacaccttgcccttggtggcaagtgggcgccgcattgcggtggccatgagtacccgtcaactcatccagcagtacctgtccagtgatgccatgcgcgctgcacaagcgttgcgtcctgcgagcgtggttgcgcttcaaacccgccgagacttcagcaatgacgcctcccacagagcgcacagggctgcggcgatgcaggctgacgtactggtggtcacccatgcggctgcgctgatcgacagttggcacccaggttacgcagacctgcgttcccgtgacgtggtggtgtttgatgaagcggacctgctggctgacgcagcagacctgcgcagcaccttcagcatcgatgcggaagttcaggaggaatgcggcgctgacaaactggacctgctccaggctgtgcaggcggtaaagcagaaggccaaggcgacggaggatcgtgcagcggcgtcggccatcctctatgcactggagcatccggcttggtacaaggttgtgggccgtgaagaagacggcactttgacgctgaagcacaggatgccggggcgaatgctgcgtcgtttggtcgaggaggcgccgcgttgcatcttcaccagcggaacgctgcaggtgggtggccgtttcgaccacttcgtgcaggcagtcggcttgaagtcgatggcgcccgagagccggcacattgacccggtaaagcatggtgacctgagcgtggaactcgctgctgaagacatgagtccgcagcagatggcgctgcgcatccaggcagcagagcggcctgttctggtactgacgacgagtcatgccaccacacaaaccctaggcgagttgtgcacaggtgcagtctggcgtgcgcagggcgaaacgctcggtgatgcattgaaccgtgtgccagacgatggcatcttcatcgcagcaggtgcttggtcggggttggatgccccgcgcctgcggtggcgtaccgtggtgattccgaagactccctaccagaggccagccatcctggatgggcagcaggtcacgcggtatctggactcacgggtggtggctatccggcgtataactcaaggcctgcaccgaggtctgcgcacgcctgatgcccgctgcactctcctgctgcttgacccgcgcagcggtcgtgacgaacttcgagaagccatacctgcgcgatttcgggtgaattggcagagttttgacgagggctcgccaagaatgcgcgcccatgtggccggtgaaaggcatccctccctgcgtaacgctgccctgaaggcgctgggggcgcattgcagtcaccctggctgtgaagtcacagccgtgcacctcctggacgtccatcacctgaaaccagttgctgaagggcagcgcaaaaccagcttggctgacatcgccgtgctttgcaaaaaccatcacgccgaggcccatcaccagatgcggcaggccgaaattcttgaggtcaaggaggaagaatcctgaacggaatcaagcacttgaaagaattgagatcaagccgcctgttagatgggcggttactggaacagcagcgccagaatcagcgctaccagggaagatcaagccgcctgttagatgggcggttactggaactggatcactagagagcgaagcgctgcaggggatcaagccgcctactagatgggcggttactagaacatcgcttcgcgcatggcggtcatcatgcccgatcaagccgcctactagatgggcggttactagaactactacattgaaccgaccatcgcgctgcaagatgaagccgcccactggatgggcggttactgaaacaagacggtgggcgccttcaccgacatcagcgatcaagccgcctgctagatgggcggttactgagacaagaacttatgcggcattggcaccgtcgtggatcaagccgccctcacgggcggttactggaatgacatcatcatgctgcctcgtgcagccaaggataaagccacccgttatgtgggcggttgctggaccattaaagacgagatcactgggggcatccacgttcgatgtgccctttaggtgcggccatttccggcggagcccagatcaagctcaaccaccggtcgatctgctcaggaaccggcttaccctgctcgtcacgctcaacgtggtgcagccagacttcgccatctgaggcggtgatctgcatggtgtcgcggtcgatcaggccgcaggcaacaagtctgctgtgcatggccgagatcgtcggccttagggggaagcaagagcaatccctctaatggggggtgtccacaggcggcccgggttcatcatccgatccaggctcacgctcccactgactacatccgtctgccgcgatggccctgacctgggctgatccaggcgcgttacaccgtgccgcgctacctccgaaaagcatggcaccaaagtggacgcaatgccagcaaggccggcgttcgctgctccaggggctgaagtggccgatgaactgcacgcagacagcatggcggtgcagtggctcagcaggtgatccagtctgaacacagtgcgactgtgacaccgtcggcgatccctgatggcgccagcatgggcagatcattgcgttgtccgctcaaggcgatgcacatcgcaagttcagccccctgtctgcttgccctggcatcactgaaagactccctacgcgaccgtatcaacggaaacaggccgagccccatgccgacctaagaccggtcaactccttggcccatcaagtccatcgcgtggtcaaccagctcaccgggcggcatcgacaacgcagaagccaatcgaaagatgagcgccaagctgggtgagtgggtaccgcgctcaatcttgcccatgtgcgagcgctccacttgagccgcactcgccaactcctcctgtgagattcccatctcttggcggcgttttctgatcgcagccccaaaggcttgcgcgggcagggggtcgaacgtcttcgccccaagtggtctgcctgctctcggacgtcgatgctcctgcattcgacaagagcttgtccatgtgggagactttaaaccacgttaaaaatcacccatttccgacaactgaccgctggtgtctagcttcacgagtgaaccatgaacatcaagacagcttccttggcaatggtgacagttgctctactgacctctggctgcgccactcctgagcagcgttaccgccaagagcaacagcggatcgcggcccaaagcgcagttgccgagaacctgagacgggatctggagagtagatgccgtggctatggcttccagcctggaacaaccccattcgcacagtgcttgatgcagctggatcaggccgttcgacaagctgcagcagcacaaaaggcgaaaaaggaattggagtcgaagtgtgcgcttgcagaagcagaaggctacctagcacccacccgcactggaggttttgccgagtcccagcaacgggcgtcggcagcttacagccgctgtatggctggtctacctccaccgcaaccaataaacatcatttgccaaaccgttggaagagatcaggtacggtgcttcaaccagtgatctgatacctacctatgacgtgatattcgaatctgactggcatgaaagaacagcaatagcccctaagaatcagaatgaaaaaagtagcccttcgtgtcgtggcatttatattctttgccatatttctattcgcgctctttgcaaatatcaaagcaatagttgatcagaagcatgaagcgctagcacaaacaatcaaattactactgagtccagacaaagcgttaatgtttataaacctcatatgggcaaactcaataaagataggtattgg

SEQ ID NO: 8 - DNA, 13851 bp, Artificial Sequence
  Synthetic Oligonucleotide
  misc_feature (1)..(3521): n is a, c, g, or t
nnnnnnnnnnnnnnnnnnnnnnnnnnnnnnnnnnnnnnnnnnnnnnnnnnnnnnnnnnnnnnnnnnnnnnnnnnnnnnnnnnnnnnnnnnnnnnnnnnnnnnnnnnnnnnnnnnnnnnnnnnnnnnnnnnnnnnnnnnnnnnnnnnnnnnnnnnnnnnnnnnnnnnnnnnnnnnnnnnnnnnnnnnnnnnnnnnnnnnnnnnnnnnnnnnnnnnnnnnnnnnnnnnnnnnnnnnnnnnnnnnnnnnnnnnnnnnnnnnnnnnnnnnnnnnnnnnnnnnnnnnnnnnnnnnnnnnnnnnnnnnnnnnnnnnnnnnnnnnnnnnnnnnnnnnnnnnnnnnnnnnnnnnnnnnnnnnnnnnnnnnnnnnnnnnnnnnnnnnnnnnnnnnnnnnnnnnnnnnnnnnnnnnnnnnnnnnnnnnnnnnnnnnnnnnnnnnnnnnnnnnnnnnnnnnnnnnnnnnnnnnnnnnnnnnnnnnnnnnnnnnnnnnnnnnnnnnnnnnnnnnnnnnnnnnnnnnnnnnnnnnnnnnnnnnnnnnnnnnnnnnnnnnnnnnnnnnnnnnnnnnnnnnnnnnnnnnnnnnnnnnnnnnnnnnnnnnnnnnnnnnnnnnnnnnnnnnnnnnnnnnnnnnnnnnnnnnnnnnnnnnnnnnnnnnnnnnnnnnnnnnnnnnnnnnnnnnnnnnnnnnnnnnnnnnnnnnnnnnnnnnnnnnnnnnnnnnnnnnnnnnnnnnnnnnnnnnnnnnnnnnnnnnnnnnnnnnnnnnnnnnnnnnnnnnnnnnnnnnnnnnnnnnnnnnnnnnnnnnnnnnnnnnnnnnnnnnnnnnnnnnnnnnnnnnnnnnnnnnnnnnnnnnnnnnnnnnnnnnnnnnnnnnnnnnnnnnnnnnnnnnnnnnnnnnnnnnnnnnnnnnnnnnnnnnnnnnnnnnnnnnnnnnnnnnnnnnnnnnnnnnnnnnnnnnnnnnnnnnnnnnnnnnnnnnnnnnnnnnnnnnnnnnnnnnnnnnnnnnnnnnnnnnnnnnnnnnnnnnnnnnnnnnnnnnnnnnnnnnnnnnnnnnnnnnnnnnnnnnnnnnnnnnnnnnnnnnnnnnnnnnnnnnnnnnnnnnnnnnnnnnnnnnnnnnnnnnnnnnnnnnnnnnnnnnnnnnnnnnnnnnnnnnnnnnnnnnnnnnnnnnnnnnnnnnnnnnnnnnnnnnnnnnnnnnnnnnnnnnnnnnnnnnnnnnnnnnnnnnnnnnnnnnnnnnnnnnnnnnnnnnnnnnnnnnnnnnnnnnnnnnnnnnnnnnnnnnnnnnnnnnnnnnnnnnnnnnnnnnnnnnnnnnnnnnnnnnnnnnnnnnnnnnnnnnnnnnnnnnnnnnnnnnnnnnnnnnnnnnnnnnnnnnnnnnnnnnnnnnnnnnnnnnnnnnnnnnnnnnnnnnnnnnnnnnnnnnnnnnnnnnnnnnnnnnnnnnnnnnnnnnnnnnnnnnnnnnnnnnnnnnnnnnnnnnnnnnnnnnnnnnnnnnnnnnnnnnnnnnnnnnnnnnnnnnnnnnnnnnnnnnnnnnnnnnnnnnnnnnnnnnnnnnnnnnnnnnnnnnnnnnnnnnnnnnnnnnnnnnnnnnnnnnnnnnnnnnnnnnnnnnnnnnnnnnnnnnnnnnnnnnnnnnnnnnnnnnnnnnnnnnnnnnnnnnnnnnnnnnnnnnnnnnnnnnnnnnnnnnnnnnnnnnnnnnnnnnnnnnnnnnnnnnnnnnnnnnnnnnnnnnnnnnnnnnnnnnnnnnnnnnnnnnnnnnnnnnnnnnnnnnnnnnnnnnnnnnnnnnnnnnnnnnnnnnnnnnnnnnnnnnnnnnnnnnnnnnnnnnnnnnnnnnnnnnnnnnnnnnnnnnnnnnnnnnnnnnnnnnnnnnnnnnnnnnnnnnnnnnnnnnnnnnnnnnnnnnnnnnnnnnnnnnnnnnnnnnnnnnnnnnnnnnnnnnnnnnnnnnnnnnnnnnnnnnnnnnnnnnnnnnnnnnnnnnnnnnnnnnnnnnnnnnnnnnnnnnnnnnnnnnnnnnnnnnnnnnnnnnnnnnnnnnnnnnnnnnnnnnnnnnnnnnnnnnnnnnnnnnnnnnnnnnnnnnnnnnnnnnnnnnnnnnnnnnnnnnnnnnnnnnnnnnnnnnnnnnnnnnnnnnnnnnnnnnnnnnnnnnnnnnnnnnnnnnnnnnnnnnnnnnnnnnnnnnnnnnnnnnnnnnnnnnnnnnnnnnnnnnnnnnnnnnnnnnnnnnnnnnnnnnnnnnnnnnnnnnnnnnnnnnnnnnnnnnnnnnnnnnnnnnnnnnnnnnnnnnnnnnnnnnnnnnnnnnnnnnnnnnnnnnnnnnnnnnnnnnnnnnnnnnnnnnnnnnnnnnnnnnnnnnnnnnnnnnnnnnnnnnnnnnnnnnnnnnnnnnnnnnnnnnnnnnnnnnnnnnnnnnnnnnnnnnnnnnnnnnnnnnnnnnnnnnnnnnnnnnnnnnnnnnnnnnnnnnnnnnnnnnnnnnnnnnnnnnnnnnnnnnnnnnnnnnnnnnnnnnnnnnnnnnnnnnnnnnnnnnnnnnnnnnnnnnnnnnnnnnnnnnnnnnnnnnnnnnnnnnnnnnnnnnnnnnnnnnnnnnnnnnnnnnnnnnnnnnnnnnnnnnnnnnnnnnnnnnnnnnnnnnnnnnnnnnnnnnnnnnnnnnnnnnnnnnnnnnnnnnnnnnnnnnnnnnnnnnnnnnnnnnnnnnnnnnnnnnnnnnnnnnnnnnnnnnnnnnnnnnnnnnnnnnnnnnnnnnnnnnnnnnnnnnnnnnnnnnnnnnnnnnnnnnnnnnnnnnnnnnnnnnnnnnnnnnnnnnnnnnnnnnnnnnnnnnnnnnnnnnnnnnnnnnnnnnnnnnnnnnnnnnnnnnnnnnnnnnnnnnnnnnnnnnnnnnnnnnnnnnnnnnnnnnnnnnnnnnnnnnnnnnnnnnnnnnnnnnnnnnnnnnnnnnnnnnnnnnnnnnnnnnnnnnnnnnnnnnnnnnnnnnnnnnnnnnnnnnnnnnnnnnnnnnnnnnnnnnnnnnnnnnnnnnnnnnnnnnnnnnnnnnnnnnnnnnnnnnnnnnnnnnnnnnnnnnnnnnnnnnnnnnnnnnnnnnnnnnnnnnnnnnnnnnnnnnnnnnnnnnnnnnnnnnnnnnnnnnnnnnnnnnnnnnnnnnnnnnnnnnnnnnnnnnnnnnnnnnnnnnnnnnnnnnnnnnnnnnnnnnnnnnnnnnnnnnnnnnnnnnnnnnnnnnnnnnnnnnnnnnnnnnnnnnnnnnnnnnnnnnnnnnnnnnnnnnnnnnnnnnnnnnnnnnnnnnnnnnnnnnnnnnnnnnnnnnnnnnnnnnnnnnnnnnnnnnnnnnnnnnnnnnnnnnnnnnnnnnnnnnnnnnnnnnnnnnnnnnnnnnnnnnnnnnnnnnnnnnnnnnnnnnnnnnnnnnnnnnnnnnnnnnnnnnnnnnnnnnnnnnnnnnnnnnnnnnnnnnnnnnnnnnnnnnnnnnnnnnnnnnnnnnnnnnnnnnnnnnnnnnnnnnnnnnnnnnnnnnnnnnnnnnnnnnnnnnnnnnnnnnnnnnnnntcgaagctgacatttatgatcgtgtccatctgggctacccggacacgatcatcgtgcccgcggcaccctcaatcttcacgatcagatcttcagcgtacaggcggcccacgccggaggggtactaactgttggagggcgcggtagacgctgtggaggataacgtgagcggcatcactcgatcgatctacagccgttcaagtatctcgacgcatacgccaacgactcagcaggaagttatccgtattcatcattgggtccgtctcgtgatgtgcgacctgttggggctcgctatttcctaaggctaccaatcgacctgatgtaatgctcgcgaggccactcaaagacgtgcggcccaaatacccgcttacttaaatctaaactgcagcgctcaaatcgcacagcctatctcttcaggcacttaggccaatttggtcgaggatatcggtaattgtgggattgtggacctgttcgctgcatcggcctttgccaacgtcgccaatttgaggcgcgggcggaaagcacgatgagcggagacgctgaggtttgcacacgattgcaaagctgagtgtgcggccgacgaagtgcctgtgaggcatctttttttgcctgtaggggcgatgttggaactggatgacggggaatgaacccgaacgcataaaaatcgctccgataggcccgctagggccagttgcacttctatccctgctcgatgtccgacagcttaatcgtgatcttgtggccgttagaaggctcgatcccctcgaactcggagaactgttcaaacggcttgatcttgaccgtgattatcgatccgttctggtagacatcttctgatggctccatcgatgaattgagagcagcaaggattatcccgcatctgagatgcgcgataatcccaaacgatcgaagtcccgtgggctggggggcgcacacgagttgcggctggccggttcgcatcccggtccccacccctggggcgggctgatgctttcgatgctctttcctatagattgtgtgtccaatttttgccgcttgcatggtttatgcggcgggctcgtcaatgcgtgagatgcctcaaatgaacagctcgaccgatcccacccaggaccagactctcatcgtcgtccgcagcgtggccgacctgcgccgcgccgtggccggctttcgcaaggccggtcgtaccgtcggtctcgtgccgaccatgggcgcgctgcatgaaggccatgtcagcctggtgaagggcgcgctcgagcgcggcgacgtgccggtgaccagcatcttcgtcaatccgacgcagttcggcccgaaggaggatttctccgcctatccgcgcgacgaggagggcgacttcgcgaagctgcgcgaggcgggttgcctcatcgccttcgcgccgaccaaggacgagatgtacccgggcgagcagctcacaacggtgacggtcgccgggatcaccgacgggctgtgcgggccgctgcggcccggccatttccagggcgtcgccaccgtggtgagcaagctcatgctgatggcgatgccggatcgcgcctatttcggcgagaaggactaccagcagctccaggtcatcaagcgcatggtgcacgacctcgcgatgccgttcgagatcgtgggcatgccgacggtgcgcgaggccgacggtctcgcaatgtcgtcgcgcaaccgctacctcagcgccgacgagcgcacccaggcgctgggcatgtaccgccagctcgtgaaggtcgccgacacggtgcgtgacggaaagaagtcgtgcgtcgaagccacgacggcggcatcgcaggcgttgcgcgacggcggcttcgacatcgtcgaatatttcaccgtcgtcgatgccgagagcctgaagccgctcgaccatgtcgccggcccggcgcgcgtgattgccgccgcccgactcggccgcacgcgcctgatcgacaatctggccgtttgaacggatttcggtcttccgtcctgggcagaccaaaccacctcaccctgaggaggttgcgcagtggccatctcgatcatgaggttggtgtttgtaaacgcgacactggtcgagcacgccatgacggtggagaaggcaggcaccgcgccatcggcctttgcgaagggcgcgcaaacgctggctgcaattcagacgtccgtcgctcgcttcatggcgggagcctagtctagaggccgccaaaagggccaaggcgaccctgctaatcgccaagctggaccggctcgcccgcaacgtggccttcgtcgcccaatcgattgcgagatattcacgcactcaacctccgccctcaagcagagcgaatatgggcagactttgctgaccctccatggttgtacttggtcaagattgagctatggtagtctgccctcggatggggagcgccgtgacggtggatcgaggccggcaaatcaagctgctgaacatgacggagagcgcgcacgacggggagtccctgaatgcgatccgggcgtccaacgcactcatgcggcagtcgaaggtgacatggaccgacttgatcgcggttgccccggcccggaggctcgccccggaaccaccgcctccgcggcccagcaaagctgccggctgatcgggaacacgcaaattagtagatggggtactgcatgcgccgcttccgggtaactgcccacatgaattcccccatcatcttcgggggcggttacgctactcttgacgggctacttggagccctgctttttgatcaactggacgatgtggatgcagcccatgcggcgatcccgctggccaacaccgacggccttttccatgcctcggcggcgttctacgaacccgtcgaggtcggcaagacgaccttcgttgccagcttgcgggcgcaacacgatctggatgccgacctgctcaggaaaaacaagacgggcaccgcgacgcatcgggccatcagcacgaagcgcgagcgcgacttcggcaatgtgttcaatacttatcgccgggtcaccacgccgaagatcgactggtatgccgagggcgaccaagccgccgtgctgcgcctactccaggacgcgcgcttcatcggcaagcgtcgggccagcggatttggcgaagtcgagaggtggaccatcgaagaggacgaactcgacggcattaccggccacctagatgagcccctgcggcccgtgccggtggagctattcaaaggcgaccagagcgcgatcaaggcggacgcggcctggcgacccgcgtactggaaccctgcacatcgggcgatctgtttcgtgccgggagacggccaatgaacgtctacgagttctttaacgcgggattgggacgtcacctcgtcgcccagaacggcgcgcctcatcgggcggctcagctcgcgctgtcgagcacacacaagctcgccaacggaggcgagaaccgcattacctcaggctgggcgattgtgcggccggatggtgcagtgatccagcagaagctggccgcgaccggcatcacatacgacgaccgcacgcgcatagaggcttttctcgacgagctgaaacgatgggacggcacgccgcggctgttcctcatgttcgacaagaagccaatccccatcgcgaaccttttcctgacagccgatctgagggcggtccggatttgttcgcccaaaggcgtcgagacattcaactttactgcaccgccgggccccgaggccggcgggatgcagaaggccattcacaggaggaaggcagatgcttgaccacgtcataccgaagcccgcccgcgttgccggctacatgctgcaccaactggcggaagccatgaccgacggtgcacggcccctgttcgtggaccgaggcgaccatctcgtcgtgcgtaccgacaaggcgatcacgccaaatccgacccccacgcgcgcagcgcaaaatggagaagtcatcgccttcgaactgcgtgcctgcgtggccaagaagaacaaggggcaccccatctattttcccctcggggattggcgcgcgcgtcacgaatggctcaatcgcaaggcaggacaaagcggcttcgaggtcctggcgcttcgctcaaccaccgcgatggcgaagatcgccaaggcaggccgcacttttaccatcgatcagacagacttcgtcggggtcctgcgcgtcaacgacgtggcgctgttcgagatcgcgatgaccaagggtgtcgggtcggtaggccgcgccttcggttttggcatgctccacatcaactagaggtgcgtcatgacgacaacgatcatcaacgcgacgatccacaccgtcggtcccttttcgattgcgatgcccgtcgcggaaggcggcaccgccaatgcctacaagaacttcccggtgatgacacggggggtggacgaggatggcaacaagaagctgaccggctacctgccagcaaccacccttcgtggcttcctgcgccgtgccgttgtcctgcgcgacatgaagaaggcggcggcggccagcctgccctacacgttacagcgcgcctataccgaactgatcgggcaggacgccgaaagcgagagggcggaagacgataggatcaacctcgttgaattgcgcaagacgagagaggcttctccggttctcgatcttttcggtagcggattgggcatcaagtcgcgcctgatggtctcgcacttcctgccgatgtccaatgtcttgcctgatgcgttcacgggcgtacgcaaggacttggaagataccgagggcgttctggatatggtcaaggcggacgaagtcgaggcgtacctcggacggtcggaggcgaacagccggcgcgctgccgccgagggcctgctgtcgcaaatgaagcgtaagctgaacgcaaccaaaaggaagggcgagcctaccgccgatctggaagcccaggtttccgtgcttgagacgaaagtcgagggcctgaaggctgagatgggcgatatgcggaacagttcgcgtaggccggttggccactttgcactgcctgccgggatcgatctcaagggacgattggtgatcaatagctcgaaggacatcgaccttgaaatgatcgagcacgccttgaacgaactctccttgaagccggtgttgggcgcgcaatcagcgcgcggttgtggagagataagcggcacgttcgacgtcgtggtggaaggcgtcttgaagaagaggcttgcaatcggcggctacgaacctgcccggagtatcgatttttcctcaacgccagaaggagaaaaggctgcttgatcagggagttcggtcaacatcaggtgaagccaccccggaattgggtggctactgaaacgagttggtcgaggcgacgtcggcgttggtgggtgaagccaccccggaactgggtggctactgaaacgggaggcctgcagaaccggttcaagaccgcggtgaagccaccccggaattgggtggctactgaaacgtgttggccgccggcgtgaccgtcacgcggggtgaagccaccccggaattgggtggctactgaaacagtagcgggccaggtgtctcgcagtcagcgggtgaagccaccccggaattgggtggctactgaaaccgtgacaggctgaattctcgcgcgctaggaggtgaagccaccccggaattgggtggctactgaaacctcgactactctgtccatgagttcgagtggggtgaagccaccccggaattgggtggctactgaaacaggaactgtgtctcacccatgctcccgtctggtgaagccaccccggaattgggtggctactgaaacctcgatgccgattacgaggccaagcgcgctggtgaagccaccccggaattgggtggctactgaaacccgccgccgcgctgcgatgattgccccgagggtgaagccaccccggaattgggtggctactgaaacagcatcatgcgttccccatggtcttgatgtggtgaagccaccccggaattgggtggctactgaaacttcgttgttagagagggaagaaccgggcgaggtgaagccaccccggaattgggtggctactgaaaccacgccaagatcgccatggagtcgatcgccggtgaagccaccccggaattgggtggctactgaaacagcacgcgctcgacgcggtcgtaatcggccggtaaagccacccccaaattgggtggctactgaaactcgggtgttcggaaaggatggcgtcgatcatggtgaagccacccccaaattgggtggctactgaaacatcaagtcttgcgcgaggcgcttgtgaaggtgaagccacctccgaattgggtggttactgaaacggcgcttgcgagtgatcccgcggcaccaggggtgaagccacccccaaactgggtggctactgaaacatcacgaggttgttttcgagttgcgccagaggtgaagccacccctcaattgggtggcaaatgaaacgacagatcgcaaagcatgtcgcgcgctctggtgaagccacccctgttttgggtggttactggaaggacgtctgatgttccgatcatccgaacagcaaaacttcgccgcgatggtcgccgcccacatctccaaggccgacggcccgttgctgctcgaaggtggcaccggcatcgggaagacgcgcgcctatctgtcggcgctcatcggctccggcaaacgggtcgcgattgtgttgccgacccaccagctcatcgagcagctgcttgcttccaccgatctcgcagaggccaatgccagaggcatcaccgtcgccgcttttcgaccggcgtcgaagttcgataccagggccgactacttggcgaaccgtgaagtcgcggccagtgcgcaactcatgttgtgcactgccgccagtgtcatcatcgaccgccgtctggacggcaaatacaacggcgcgaccgaacgggattatcttctcttcgatgaggctgaccagttgccggcgatggccgctcttcagtccgacatggaggttaccggcgaggccctcaagacgctggggatcgaaggcgaaacgacccgtaatctggccgacgccgtcgtcgcgtccaagaaggccgagccggaacagcgcgccgccgccaagatgatcctcgaagtcctgggcgagcccgcgtggtttcatgtggcaggcaaggccgacgatggtggcatccgcctctggcatcggctaccggggcggctactgcgcgagatcgccaaccaaccaaacgtcgcctttgtcagcgccaccctgactgtcggaggtctgtttaacgacttcaagtgtgcgctcggcatccagagtgaaagcgagctgtcgggtgtcgtcgaacctgagcgacacggcacggtcgagttccggaccgttgtgtcgcaagccgtggacgccgacggctggctcgaaaaggtggcggcgaccgtcaggcaggcagaggctcccgtgctggtcgtaacgccctcgttcgaccgtgctgagaagattggcgcgctggtggaaggcgcgacggtgcggcagcgcgaggaagccgttggcgacgccatggctcgaatgggcggctcccgaaccctgattggggcagccgcctgggccggcctcgacacgcccatccagtggcggtcaattgtcgtgcctgttgtgcctttcgagcgcctgacggagatcgaagggcaagtcgagagccactacatcgatgcgcgcaacacggccgtgcgacgcctgcgccaggtgatcggtcggggactgcggtcgcccgatgcccgctgcaccgtctacttcctcgatcctcgtgtcttgaagctaccggccttctggcccagccggttttcctcggcctgggtggcccgccctcgcgatccgggtgtcctcgaaggggcgcgaggcgaggtggtcctgtccaaagccgagcgcgacacgtctcttagaaagcgcgcccttgcccactacggtctgcattgtcgggcgtgtggtctggtacccaaggtcgccgcccagatcgaggtacatcacctcgaccccatctcggaaggcatccggcgcacgacgttagcggacctgtgccccctttgtcggaactgtcactcacttgcccactccacgagcccgcctatgccggtcgaggaggttgcgaagatcgtgggggcctagggtccgaatgcaattggacgtaacgcgttgccttcaagcttcggcaatccggcaggcagcactagtctaggccgcctgttcgagcgtcgaggcgacgtcgcgcgtggtcacgcggcgcaggtcgcgcaccttggtcgtgtcgaacggccgcgcacgatgcatggtgcagcgattgtcccagatcacgaggtcgcccttcgcccagcgatggacatgcacgaagcgcggctgggtcgcgtgctcgatcaggtcgaggatgatcaggcgcccgtcggccaccggcaggcccaggatgtgcgaggcgtgcgcggcgagatagagcgtcctgcgatgcgagccgggatgggttcgcaccacccgctgcggcaccggcggcagcgaggcgcgttcctcgtcggtgtactgcacgacgcccagctgctcgcgcgaccgccagatcgaatgttcggcgaccagcccttccagctccttcttcttcgtctccggcagcgcgtcgtacgccgcgcgcaagtcggcgaactcggtgtcgccgccttcctcgggaatgacgtgcgcgtagagcatcgagagaccgccgggcacggcgcggaacgaggcgtcggtgtgccagagccggttggccaggccgtcgagccggcgccgcgcgtcgggcttcatgacgttgccgtcgccgtcgaggttggagatgtcggcgacctggctcgatgcgatccggtgcttgatgtcgcgatgccgaagcttcagcgccgacgattcgatcgggccgaaattgctggcaaaggccacctgccgctcgtcgtcgagcgtctgcccgcggaacaccacgaccgcgtagcggttgatggcgtcctcgatggcctgccggtcggtgggcttgagcggtcgtgccacgtcgacaccggcaatctcggccacgaattcaggatgagttggcgtaacggtgatgctcacgactgcctcccgcggctatagtgcatttgcaatcattctctcccaggaaacgccatgccgcaaaccatgaagctcgctttgctcgacgattaccagaaggttgccctgcgcatggccgactgggaccgcctcaggaagcgcggcgtcgagatcacggtgttccacgagcccttcgcctcggtcgaggatgcggcgcagaagctggcgccgttcgacatgctgggattgctgcgcgagcgcacggcgttcccgcgcgccctgatcgagaagctgcccaacctcaagttcatggtgctgaccggcgcccgtgccgccagcctcgacgacaaggccgcggccgagcgcggtatcccgatctcgacgacgcccggcggcacctcgaacgcgccgacggcggaactcggctgggcgctgctgatgatgtgcgcccgcgatctcgccaaggccgagcggctggcgcgccagggcaagtggcatgacggcatcgagcagatggtcgtgctcgagggcaagcggctgggcattctcggtctcggcaagctgggcagccgcgcggcccactacgccaaggccttcggcatggaggtcgtggcctggagccagaacctcacacccgagaaggcggaagcgggcggcgcgaagtacgtcaccaaggacgagttgctggcgacctcggacttcgtgtcgatccatcttgcgttgtcggatcgcacgcgcggcctgatcggtgcggccgagctggcgaagatgaagaagaccgcgatcctggtgaacacctcgcgcgggccgatcgtcgacgaagcggccctgatcgaggcgctgaagaaccgcaccatcctgcacgccggtctcgacgtctacgacagggagccgatgtcggccgaccatcccttcaccaggctcgacaacatcacgctcattcctcacctgggctacgtcgtcgaggagagctaccggcacttctacgagggcacgatcaaggacatcgaggcctggctcgatggcagtccgatcaacgtcctcaatccggacgcgctcaagaaggcctagcgtccttccgtcctctgttgacggacccacctcatcctgaggagcgccgcccctcgagtacctcgggataaactccacggcgcgtctcgaaggatgggcaacggacggggtgcgcgtgcccacccttcgagacgctcactgcgttcgctcctcagggtgaggtcggtatgtggatgcccggctggattctttctcgtccggaaaggctcctgcaggctgctgaaaagtcggagctggggc

SEQ ID NO: 9 - DNA, 31673 bp, Artificial Sequence
  Synthetic Oligonucleotide
tgaatgcaaacccggacggtctggatttttccggtccgatgttcgaagcgctgcatctgaccggcctgttcacccgcgaaggatcactggaccgcgcggggtattcctatacgtctgcggttcaaatggtgcaggatgtggcgcgcacgggcatggcctatatctggcaggtaacggcgacaaacacgcgcaatgatcagattgccgccggtcgcgactgggtgcgcctgaaccttgccgccacaacggtggggctggatgttcaaccgataagccaggcccttcaggaataccccgaaatggctgcttggtatgatgcggtgcatttgcaactggcgccggatggcggcactgtgcaaatgttgggcagactgggctacgggccaagtgtcgggcacagcccgcgctggccgctggaggcaaagatacgcaatggatgaacaggatgccggcgcctattttgcgctgttcaatgaaatcggcattatcgaacagatcagccgaacctttcttgaggcgcgtctgccggaagggttgctggcctcgcatttcggagtggtcaaccacctgatacgggttgcggacggccagacgccgctggttctggccaatgcgtttcaggtacccaagacgacgatgacacatacgctggcgggtctggaaaaacatgggttggtcgaaatgcgccccaatcccgatgacaaacgatcaaagcaggtctggctgacgccgaaagggcgcagttttcgcgatgaaacgatcaaacggatggtgccgctgtttcaggaactggcgcaggacattccgcccgacagaattgcggcccttttgccactgttgcaagaggtgcgcaccagcatagatgccttgcgcgaccgtgtatcctaggcccggtgcgccccgtccgacagggttttgacaaaggccagaacctgttgtggtgtttcacccgccccgatttttgcaactatcgccgaccctacaaccgccccgtccgccacggacgcgatcgcctgtgatttttcgggcgtgttgatgccgaacccgacaatgaccggcagatctgtggccgatttgatccgcgccacttccggcccgacatcggtggccgatgcctcggctgcgccggtgataccggttatcgacacgtaatagacaaaaccggatgtgttttgcagcacgcggggcaggcgtttatcatcggttgttggggtggccagacggataaagttcaaccccgccttttgtgccggaatgcacagttccgcatcttcttcggggggcagatcgacaatgatcagaccgtcaatgccggcggctttggcgtctttcagaaaggtttcgacaccgcgactgtagatcgggttgtaatagcccatcagcacaatcggggttgtatcgtcctgttcgcgaaacgccgccgccatatccagcgtcttctgcaatgtcatgccgccttccagcgcgcgctgaccggccaactggatggtaggcccgtctgccatcggatcggtaaagggcaaccccagttcgataacatccacccctgcggcgggcaggccgcgcaccacctcaagcgatgtgtcgtaatcgggatcgcccgccatcacataggcgacaaacgccttttttccggcagcagcaagttcggcgaatttggcatctatacgggtcatgatcaggccttttgaaacagtcgttttgcaatgcacaaagactgcgggaaaatcaatgctcgggcgcgaaaactcttgcaaagagttttgacgcagcgtttggaaaaaatcccgcggcgcggcgtggcttgcgcccgtcgggtctgcgcactagaagcggccaactgctatcaaggagagcgtaatgggctttaaaatggggatcgtcgggctgccgaatgtcggcaaatccacgctgtttaacgcgctgacccgcaccgcggcggcgcaggcggcgaattttccgttctgtacgatcgaacccaatgtcggtgaagtgggtgtgcccgatgatcggctggacaaactggccgcgattgcgaaatccaaacagatcatcccaacgcgcatgacattcgtcgatattgccggtctggtcaaaggcgcatccaagggcgaggggctgggcaaccagtttctggccaacatccgcgaagtggatgccattgcccatgtactgcgctgttttgaagacggcgatgtaacccatgtggaagggcgtgttgatccggtatcggacgcggaaaccatcgaaaccgaactgatgctggccgatatcgaaagcatcgaaaagcggcttcaggggctggtgcgcaaggttcggggtggcgacaaagaggccgtggcgcaggagcgtcttttgaaaatggcgctggaggcgctggaaaacggacaccccgcgcgcacggtgtccgtggatgccgaagacgccaaggcatggaaaatgctacagcttctgacggccaagccggtactatatgtctgcaacgtgggcgaagcggatgcggcagagggcaacgcgcattccgccgccgttgccgagatggcggcagcgcagggcaacgcccacgtgattatctcggcccagatcgaggaagaaatcagccagcttgatcccgaagaggccgagatgtttctgacggaaatgggtttgaaagaggccgggctggatcggttgatccgcgctggctatgacctgttgcatctggaaacctattttaccgttggcccgaaagaggcccgcgcctggaccatcagacagggcacttccgcgccacaggccgccggtgtgatccacggcgatttcgaacgcggatttatccgcgccgaaaccatcgcctatgacgattttgtcgcgctggggggcgaacaggccgccaaggaagcgggcaagatgcgcgccgagggcaagacctatatcgtcaaggacggtgacgtcctgcatttcctgttcaacacctgatcggggtgtttctattgcggaagcgggcgtttagcgccgcccgctttcacattcaaaggttggtggctgcccggggccgccacggcaccatttcatcaattggtcgttctgttccacgcttgcccacaggggcgggatgaccgtgttgatcgggtctgctgtcgctgaggtctgcgccagactgccggttgtaatcaggatcaagccaagtatccggttttgaatgcccatgttcaaatgctccttttgccacgtccaagtttctatggaccggcgcaaagcgcaaaacacatccgttcactcctgtgttgaaaaccgtgagcgaatgccggtggcaccgcacctggccgttcccgaaagcgcgtccacagtcgcgataaaatccaacgattacccgccgcgtcatgtgcggcgggtcagtgtatttgccctcacaaacccgaattgaaagccggtacctttttcgccttgtttctcgcaggcgcgcccgataaacgggtcagcggagacgtggccgagtggtcgaaggcgctcccctgctaagggagtaggcccggaagggtctcgagggttcgaatcccttcgtctccgccacccatccttattgcctttattcttatataaatatagggttctgaccatacgttggaacatattttggaacatatggcatggtggaattacctcatacgaccctcgtaaagatcaaagacaaatattacgtcaactgtacgatacctgatgacttgaggccgttcttcaagggtcgaaagcaaatcagacgaagtactggtacggcagacaagtctcttgctgagcgcaggaaacattcaatttccagtaagatttatgctgagttcgatgcagccagacctgacccgatatccgaactattccgcatgatagatttcccaaagcatatcgaagacaagctgtatgatgtccccccagaggacgatggtttcgaagactgggaacccgaactgaccaaagctgatctgcaagacctgttggctgtcgctagagttgccatgacaaaggtcgaaccgtgggagacagtaggtaggacacctgaaccagaagccagacgcaagggacgtgaagcctacttgatcttgaaagagatgctaactgacacaaagacaacgaagtcctcaagtggctgtcctgtcctatctgtggttcagaaggactatctggctaccaaaccatatgggccagctaagacaatgcgggatgctgaattagcgataacggaatttatagacttcacgaaggacattgctcttgatggtgttactgctgtcctgatccacagttatgctgaaaagatcggggagactaagagcagggagactgtagccaaaaagattggatacgttaaacgaatgtttgattgggcagtccgaaaaggatttgtcgaaaccaatatctttatgactgtgaaacttgataagaaacttggaacagcaagggcaagctaccagcctttcaccaatgctgaactagaaagcttatttagcttaaagatgcctgaccatctcagaaatttgctgtctatcttagcgacaactgggatgcgcttagatgaagctgcgttactagactgggaaaacataaagacagaagcgggtatccttcacttcgatctgacagacagtattgttaagaccaaaggttcagcccgtaaggttccaatacccaaggtgatacaacctcttttcatctctcctgccaaaggaccactgtttcctgagttctcaagagacaaagacgggaaggcacaggctccagcgagtaaggctttgatgaaacagattaggaaggtgacaggcgatagactgaaggttgttcattcgctacggggtaacttgaaagacctgttgcgtgacgcaggaatatcaaaggaggttaacgatttcataacgggtcatgggtctggcgatgttgccgggtcttatggctctggtcctagcttgaaagtccgggcagatgccttgaactccgtggaacacccttggctaagaacaaggtgaacctgcctcgtacgcgcgtaagaacttaaggtatactttctttaggtaaatataaagttattgtattaaaaacaaatacttatgtgtatatgaggtattcagagtgaaattgaacattaatgactgcctatatgttgtgtcttctactcagaataaatcaatatatagaatatccacgtacagccacggagaggcaccttacagtcgttctaagtctctaggctaggggttcctcaaaaatagagctagaggcgctctagcacccctctcaggcgctctacggtgccattctctgctctacgttacgtaccgttgaagcgtaccagttcccacccctagctgtctcaatccccagtctgttcaattcctgggctgtctccttgagtgtcatccctttggccctgaaggcttcgatcattgggaagacatgatttgcccggtgatcagcttgagccttggtagcttcgttcctctgttctgtcccacgtctgagaccaccaaggataacaccccttgccttagcttccttaagtgcagccttggtcctcttgcttatgaactctcgctcttgttgagctaaggcagcatagatatgaagttgaaacatatcggcatgaggcatctgggctaccttcagatcaaggttcttgtcatccattaaggttgcaatgaaagacaccttacgtgatagcctgtccagctttgagacaagaagtgtagccttgctctcttttgccagtgctatggccttagttagttctggtctgtcgtttaccttaccggatacgatatcggtaaacctacctatcacactgtaatcatttacataattgtctaggtataactgtatgtctctctcttgtgcatctaggccaagaccactctcaccctgccctttggtactaaccctctgataaacaacgtacttcattatctctcatccttatgcataactaaagtttagctaagcatactattgtaaatacaaaacttcaaggaacgttgtgctttgtatacccctgtcaggtaggatcagaggaaggaaattcttattatttgtcttacgtacagcaagaggggaccgggggggatggggggccttcttatatactgaatggtacctaaaaattatctcgacaaaaattagctggtgcacctatggtatccattatctgtataaggaagaaatattatgccaaaggaagaatttgaactgaaagacacaagcaaaatccacctcaaaacgcttggtgagctacaggcagaacaggcagccttagatgaaattaagaaaacattgaaaagaattcagaaaaactacgatcagagactagccaactggcagaatgctggcgctaaactgtttggactgagcgggtctggcgatacgggcaagaaaagacagacttggacgcctgaacaaaaagctaagatcatcaagaagtatgatgctgctaaagagggaacaaagacagccgtgctaaaagaacatggcgttaaagcaaatcctattgggacatggaaagatcaaaaggatgtaaagatggctatgcaaaagatacaagaaaagaagtgatccagtacactatccgcactaggattgctctttcattataggttttgtgctgacgtggaacagacgggtctaggtgaaatagttttactatttggcgtaattgtcatcaagtgtgcgttggctattttatgcgcgaaaattgcacgctctttgaacagaagtccaatattttggggattatttgcagtcccatttacgttattggcaatgattattctagcagtgatccccgctgcgccaaagaaaccagatacctagggataggaccctaagaggcaatgcgtagtagcctagtaggctgtcctctatctgttgccactgatgcgcacttcaaatgaaaacaccaaaacgcttgctaaatcgatctggcgcagtctacggatgatgcaagatggaaaatctgatttttacggcttcgctcaagtcacccctgatagcccaagggttcatgaccttcgatagccttttggcggcagtgctttttgaccgatgcggtgatgtcgaaacggctcatacatcagtgccgctaaagtgttcggaaggcttgttccacgcttctgctgcaatcgtgacaccggtggagcgaggcagttattctattgcggcatcgcttagagcggatcatgatcttgacgccgatttattccccaaaaacaaatcaggtcgaatctacagaaaaatgggcaggaaacgccgacgggacttaggcaacgtcttgtcgacctatcatacaatttcaacgccaagtgttcgctggatttgcacgggtgatctggaccaaatcaaagggctactcggcgatctccgctttattgggaaaaagcgcgcacagggttttggcgaagttgccgcctggagcgttgaaaagaccgaccttgatcctcttgtagacgaacaaggcttaccacgtcgcccgatcccggaaaacatgtttactggtgataggagcctgcctttgcaggatttggcttggaagccagcctactggaaccccgaacaccgcgcagcttgttacgcgcctcagccgctttagaggagggccggatgaatacctttgaactcatatccaagggctttgcgcggcatgttctcgggaactcaacaaccggtgatccgatccgtgacgctgcaaaggcgttgacaatgaaccacttacttaacaacgaaaaaggtacatcgtcccgattaacgggttgggccatttttcgtgcgtccggatcaacagtgcaggccaatttggcagcgaaaggagtaatggcaaacgatgggcgcacccgatacgaggcttttgccgacgaactaagcgattttcgggaaccggtagtctttctccagttcaccaagtccaccgtcaacctcggtaatgttttcgcgacgttcgatccgcgtgttacgaaaatctgtgcgccggatgtagcgccagagatatttgacttttctgttggcaccctccccgaaactgccggtgtcgcggaaaggaacatccgcaaggccgttctgaagaaggagaaaagcaatgctgcatgatcacgtcatccccaagccgccaacactcggggcatacgccagtcatcagcttcttgaaggcttaacggatggggccagacccctttttgtcgataacggagaccatctgttggttcgctcagttgaccaatcccttacacagtcatcaaaacctgtccccacagtgaacttgggagatgtccttggttttgagttgcgcgcgtcctgtggcgtcaaagtcaaaggtaaacaccgctatttcccactgaaggactggcgtgcacggcacgcttggctgaaccggcgggcatccggatttgacgtactggctgtcaccgtttcggcacggagcactccaataaagaaaaacatccgcattgatcagagcgattttgccggggttctgcgtgtgacggacatcgaagcgtttaaccaagttcttgaacatggcattggcggaccgggcaaagccttcggccacggaatgctggtaatctgaaggagaacaccttgaaccaatcaactttaattaccgaagtcgtaatccggctggaagcgccactcagcatcgcaatgcctgtggcagaatacactaagcccaacaagtgggaaaactttccagtcgccccggttggctatgatgaagaaggccaacccatacagtcagggtttttgcctgcaacaaccattcgcggggccatacgtcgctttgctgtactgcccgaaatggcagccgccgctgaaaaaggcgcgcattatcggctggaacgagcctattccgagctgatcgggcaagaccccggcagtgagcagcagcccgacgaaattgatctgaccgccattgcggaagcgcgagaggaatcccctatcgttgatctgtttggcagcggtctcggagttaagtcccggcttttggtatcgaattttgttcctgaccacccaacgctcccaatggcctttacttgggttcggaaagacattggtgacaccgaaggcgtattggaggcattgcctgacgaagaccgcagcgcctatcttgcccgcgagcaggcaaatcgacatcgggcgcaggcggaagctctggtcgccgatctaaagcgcaaagaaagcaaggctgtcaaaacagggtcggacgatgccgctgacctgaaggttcagcttgaagcagcagaaaaactggcagcaaagtacaaggaagacatgggcgacatgcaggtatcaacgcgctcactgggggtcagctatgcattgccgcaaggtttggaattgaagggtaaatttgttgtgcgatcagcccgcgaacgtgatcaggatattctacttagagggctggatgggctgagccgctggcccgttttaggcgcacaaagcgcccgtggtgcaggtgagattagcgggactgcatcattcaagctggacgggaagataaccaagattgtcagttttggtggctttgaaccgctaaaaattcgcgactttgaagcaacttaagaaggaattggtgtgttttttccaaccttcctttgcatttatacgagctttatcagagggttgatgtgacatctaatacagccatccggaaattgggtggctactaaaggctaaaaggcatgtcgagcgtggtggcgcgaatacagccatccggaaattgggtggctactaaaggaggtgcgcgcatccgaatgcaggcaggcttaatacagccatccggaaattgggtggctactaaaggtggattgcgcggatcacgtctggcggtatgaatacagccatccggaaattgggtggctactaaaggtagcccttgatcgtctctttcgtctccggggatacagccatccagaatttgggtggctaacccaaggcacttgacgccaaaagcgtagccaccaagagtggttaatcgagacgaaaggacgacccgtgttcagatcgccagaacaagctgagttcaaccaatttgtagcaaaccatatcagcaatccggatgcgcctctcttgatcgaaggggcaactggccttggaaaaacacgggcctatctagcggctgtgttccaaactgataagcgcgttgcgatctgccttgcaaccaatgccctgatagaacagattttgaactccagcgacttgccttgggcacaggaactagctccggacaaaactgtcgctgtcttccgcagccgtagatacttcgaagatgaccgggaagcctatgaagcgcaacgagaggccgctcagattgcagacatcctgatctgtacggcaagttctgtaatttttgatcagcgtctgtcgggcagctacaatggcgttaccaaccgtgatgtcatcgtctttgatgaagcagatcaaattccgggccttgccgcattggcgtcggatttatcgattgaccgaaaaacactccgcgatttgaattgcgcggcgtccaccgcactggaggtggcaggcaaactgcttagcctccctcagctggacagcgagattagggccaaggccaagatcattgctgaaatcgccagcgaaccagaggtctggtataaacgtgtcgggatgacggaagaaggcggcgtatccgtgatccaccggttgccagggcggctactcaagaaaatctccaaccggccttctacaatattcatctcggcaactctatcaatcaacggtcagttcaatgacttcaagcgcgctatggggatcggtgacagttccagcctcagccggatcatcgaaccaaagcatcacggccacctgagcttttcgtttttcacggatgatcccgttgatagtgatgaatggttggcaaccgttgtcgaacagattgaagccagtgatacaccggttctggttgcgacaccctcccataaactggcgacggaattgggagatcgtataagcggatcaaccgttcgtcagcgtgacgaaacaatgacagatgcggttgggcgaatgggggatcgtgacattgttatcggtgccggtgcttgggccggaatggataccccggtgcaatgggccaccgttatcatccctcgtgttccgttcaccgggccaaacgagctgttcgatacttggaccgacgaggatgcatttcggatcggtgatccaatgactagctactttgatagcaagaacgctgcgacaagacggctaaagcaggtgtttgggcgcggtctcaggcatccggacgcccgttgcgccatcgtgatatgcgatccgcgtatttcccaattaggcgatgtggctcctgtccgctttcgagagggctggtttgaggggcgtcgggttgaggttgtgcaaagtaaggctgaacgcaatcccgctttgcgtcgggacgctctgcgccaccatggcactgattgccaaacctgcggccaccaacctctgatcttgcgagaggttgaagtacaccatctaaatcccatagcggaggcgaagggtatgattgcaacgtccatggatgatgtggccgtgctttgccgcatttgccatgctcgcgcccacaaggatggcaacaacgtcatcccactcgaaaggctgcgggaaattgcaaaggccaaaagtcggacagaagcccagcagctaattagtttctgagattttgcgaccttgatacttcaaatgggtcagatcctgtttgataggggtacctgttctattcagaacgacatacccaaattatctcggtaatttctcactggatgtaacgaattgatttacttgagaatttaaagccgaccttttgagttgatttggatcagtgctggctaaaaattccaatgtatgtatgtatttctgatctgggatttattattttgatgtgggggaatattttatgatgaagaaaattttaatggcggcggtcgtttcgttgtggggggtggcggtttctacttctgcgcaggcggccactgtgacctacactttgacgcttgagcaaactctcccagatgcatcaattattgtcggaagctttggtattgacgactcattgcttgtcgctaattcatttatcaacttcgcttccttcgatttcttcgacattaatatcgagggttttacttggtccttagctgaagctgaatcgccaaatattgacggtgtacagacggacggatcgggagatgtaataaattggagttcatataataatgtatcagtcctgttttgttctttcggtcaacgtggcgtatgttttgattatcttcagctttcccaaacatccactttttggagatcgggcgtggatatcgggctcgtgagtgaggcgagggtatcgggctcgtggcgcatcgcagccgtgacgaatcctccgctgggccctccacctcccggctgcatacctagcaactacacacccccgaagtgtgaaccgtggcgtcccgatggtctgtctgcagtcccccttcctgctgccctgccgatgcttctggctggcataggtggtcttggcttcattggtcgtcgtcgtaaaagaaaggccaaactagttgagtgaactatggttaaaagtccaatggtcagccttacgggcctcccttcaaagtgaaattctttgattttattggaaaaggtctggcgctggtaggttgggagttaggaatgacatctagttttaggcaccgcgcagctgttctgacgttgttaattgtcacagctttgttcccgtcagcgaccttagccgatcaatgcaagttgattgttgcgtccagaaccactctgcaggaaagtaaacagcttgccactgaatatagccagagtttccagaacgtcgaacttttagaagcagcgaatggtcgatttgctatctctttgggtacgcttccttatgctagtggatccgacgtgagcgggtatatcagcgaatatggattgccgctggattcattttgcatgaggatggatagaatttctcgctatatagcatttgagaaagtcaaacaaagaccaagaaccgttgcaccgactgaaaactcatttggcatgagtaaatgtcctagaggttacaagccagatgggttcccggttgagtattgcaccgaaatagtcactcccccaaatgccgaactagacccctcggggaataattggagatgtttgaccggctacatccgcagaggggaccaatgtgcctacgttactgttccaaaaaatgctcatctgacttcaaactcaatcatcttacctgggataaaggggtgggcatgcaacagaggatatcgagaagtgggagatgaatgtgaaagggttttcgtccccgaaaatgcgtctttgaatgcatttggaactggttacagctgcaacactgggtttatcgacgccaataacaaatgccgtgcaatgacatacactgaacttgttacaggccttgagagagcggaacaaattgcgttgcggctgctatctcaaggaactggcaagtcctgttcaaagattgtggacttgtgcgaggatacttgtgacgatgatttctcttattcttcctctcctaacaaaagggaatgcgagaaggtctgtgaggcgattgaagacaactgctgaagctctaccagcaaccgtgttgttttggttgtggattcagaggctgtaccgagggcaaggggggggctgcctttacgggtggcccttctagatttacgtgggattatcctaattaaatgtacccaaatctgacgaacggcacctatagaattctaacagtaccttgcactaaggtagttaaattatatggcgataggtactgttaaaattaggtcacccctttagttgtaccttaggagagtgtctccccataattgaaataagaagagggaacccttggtgccgtctgcgtcaaattggtacgaatagatgtcctgtaccgtatcggccactttcacccttctggaattgataacctgaacccttcagtatgccgtccttatcagccttaaggtctgaagtgtatttcctgtagttctttattccaagttgctccgatacgtacttgacggaaagaggtgcttctacgacctgttcccgtaagaagtctgcatatttactcagaacagcacctttcgtactgggtttactccggtattcaacctgacatttggggaactgagcggagagcatatcgaagtaacgcttatcaaccaccatgtaagctgtcatcttatgggaactgccatcgtcgtacctctgtcgtaccctgccgcgacccaacagttgaatcatattagacaagtagcttccacgtttaacatcttgatatgaacccctcagataattctgtgcatcgtccagagtttccttggtaatttcatcccctacgatagcgtgtcttttggcgacatgagcagcacctggcttatgatcatcaaggaaatagatcactgcatcacagtcctgccaatcgtttgacccagtgccaatgccatgatgcgaggtgaacacctccttgccctcaacaaaatcacaatcctgaactaggggcagtatcgcctttggacacgtgataaaaaccttacgctctggaatgtccgctaccagtgtttcaaggtaattcgtcatcttggccttagctgaccggctcccagaaaacgtcttgtaatagatcggtaagccagcaggtttatctagatgaacaagggacaagttgcggtaatctggttctgggagataaccgtcgaagtgagccgtgtatttgtcaggagccaatttgtaaccagacacccatgctgtagcagacaggatcacagtcttctctggataggccagctccgacgatatgccgttaaatgaaatgaccttcacatcaccgtaggatcggctgtttacaaaccccattccgataaccacagccttacagaactgattcaactcgttcacttccaaggtcacagcggggtcagccttacgaagtgccagcatatcccaagacgatatctccagcacccaaggcaggcattccactggttcgaagttggctttgatattgtcatacgtgaccgttgcccaatcaagggcttcacgtgtcgtagcaatcatggccttatcaccaaccgaattggcccattcgtgagcatgagcaaagtctgccagtgaaacagaactgaaacgggagttctctggttcctcgtcccaaacccacagatcacgatcacctaggaacagtgccttgccattctccgatacagccttgtgacaaatgacagctatgccgtagtccttcacttctgacttggcaaatttttgggagtaagtctcatcttttgagttcagatcatgtttcgaagtccacacgcaaacgttgtcacggcctaccaagtccaccagacccctatccttgaggagcatctgttccacagcagctaggatttcttccctgcgttgaacatcaggatcagccttagagtagaaagccttctcccctagcttttttcggtcttctaccatctggcgttgcacagtggttgattgatactggcgcttctgttcacggcgcatcttgttgtaatagtcaaaggtcttagggtttcgttcagtcatggtgttttgcctgtctttcttttggttggttgaagggtgtcctgttcggacggtcgatagcctctcaaaagaggtctaattttggggttgaggtagggtacccgcttgatggctaaaaacggtgaatttcagccatataaataaggggtttcagaagctaatttgcagagtggtatggtctgtgagtaagacagttgccagatgatagaactctgcctttgtcagctcacctttggtggccttcaaacgacacttctcgagtagcggtgcctctgtcactgggtccagcaagcgatcagctttcatgtccaatgcgtcaacatcgtacagagttggcagacgggacttccactgagctagggtgtaaccgtgagggcgttggactgacttccatacggtgtcagcaacatcccgtcccttctgcttccgtgccaataggatcagatcatcgtatttgtcagaaggactacgagccttgctgatctgttcgacatgctcttttgagagtgggtgatcttttcggagaggggagttcttgcgatagatagccgttagttcttgagcagcagcggacatattgagccagcctccatatcattcaaaatgtgatgtgaagtccgggcgctaccccggcgctgacgttctcaaggctctacgcctcctgccgtcctatgctgacgcctcgtcctatgtgctatcacgacacacagcggcaatccctcggttcgtcacgattggttacgtgatcgctcatcatccagcagtcgattacactgccctatgctaatactctaccacataacacatgatatgtcaatagtgctgacacatttacacaaagggacagcatagttaatccctacaataatatactatcacataacacaggatatgtcaatagtgttgacacagttttgacaataaatggaacatacgaaccgtactcagacggaacatacaggaaaataaaatataataaaaacaatgcagtagagataatagttctaatcccttcgtctccgccaccaacataacccattgtaattatgtgataaattctcaaaattctgtccgatttccccgcgattttgcaggatttgagtcgtgctgagacgggatttctgctgattttcacgggcatttgcgtggttgtctcagttggctggtttggacggtggggtttggcggggaattccctgttaacagggaatttacagggaattttttcgatttcggcctgtttgagtggttttggcgtgaataaagcgctggcattacagtgggttagaaggagaattccctaagatatggaacagggaattttctgacccttaacagggacttttcgcgggcgaacagggattttcagggacggaacagggaacggggttgcaggggcgttcggggtcaggattttgcgtcaaacccgaacaggacctcctgagcgttccagtcccgtggcatgcgcgatctgatcagggtttccagggtcagagataccggctgggtgccgtcgatgatggctttctggatccggggagcgaggaaggccaggagcatgatgcgcgagacatagctgtcggacttgttggcctgcatcatgacctcccggatcgaggcgcctgccttcatttgtctcacccaggcatgcgcattgcgcagggcgcggatcatggttttgtccggtacgggctggaagctgcccgcgataatcttcatctccgccccgcgtcgccggcaatggaacggggccttgatgcgcaaaagggcgggagtgagttcatccacctgcagctccagcgcattcgaaagcgccgccgcgcacagcgtgatgccgagcctgtccttgcggatcgtgcccctgtcgatcagaggtgccgcctggcgtatgccttcgcgttcaatgcgtgccgccagactgtgtgcccgcgccgaggcgtcctgcaccaccacgacatccttcgcaatgatgacctcgtgtctctcggctgcgcgtgtcaggctgtcctgaatggcgcaggccacggcggcttcaaatgccttggccggcaatcgccagcctgcagggtccggctttcccgagaccagtcggtttgagacatagtagcgatgacgacgattgcctttcttcgtgtgcgacggtgtcaggatgtcgccggtctcgtcgcggagcttgccgagcagcggcgcttggacattcagggcatgtgggtgggggccattcgctgttttgctcccgcgcttgcgctgatacgctcgctggaagtgttcatcgcagtggccgaaaccggtcagatgcgggccggtgcaaaacttcttaacctgacacaacccgcagcgtctcagcacatctcggcactggaaaaatcatttggcactatgctgcttgaccgcggaacacgcccggctggattgacccacgcgggtgcgcgtttgcttggcaaagctcagaagattttgaatgcaatttcggacatggaaaccgaactacgccatatcggtgaaaagtcgctttcgctactacgtgtcggacttcaagcctccattgcaacgaccttgacgccctcactgatcgatttggcccaacagactttcggtgttgaggacatcaccctgtacgccgggcaaagcggcaaccatgagcatctcctgcggaccaaacgcgcggatttggcgatcacgtccaacccattcctcgacatggacgggttggagcggcaccatgtcttgaccgaaaagtaccttctcgttttgccaggatcctacgatggcccaactgacagcctagaagccattcaggagaacttgccacttgtcagattcggcgacacgacaaatgcgggccgtcagattgcccaacacttgcgccgtctgaggttcgagccaaggaaagtcatccttgccgataggtccagtatggtgacatcctgcgtgtctgccggtcagggtttcagcatgctgacaccgactttgctgatcgatggaatggtcgagaatatgaacctgcaactgagagaactgccggtgtcaggcctgtcgcgtactttgacggttgtagcgcgtaaggctgaactacaggatcttccaagcgcgtttgcagacagatcgagccaagaattgctccaccagatcagggcacagatgggtgatatcgccgaagcgaatgtgagtcttggctgatcgctgtgtccgggcaaaacaccaatcccgtacatgtaatatctcagatcgggaaaagtgaagtccgcaaagcgggctgcgaccgcagcatgtcgaccagtgggtgaacggcaggagtgggccgttcgtgaggtggtcaacggcagcaatgcgcggttcgcgcttgttcatgcaagacgcagcatcggtcaatatgggctcaaggcagtctttcgccgcggaacgtactaatgtcggcagagcggacgaagtaccaattcgcggcgttggcagaaggtgctggtccgaggccattccttggcgtctatgtgccacgaacagtttcggtgtcgcaaacggaaggctaatgcaacagccttaaagctagcaatgaggcagaaatgtcttatggagactgaattactgccatgaaccaatcgtcactcggcactgacgggcatcggttcggtgtcctgtttgtctttgctgctggtgtgctttggtcgaccgtcgggcttggaatacggctgatcgaagacgcggttgtgtggcagatattactttaccgttcggccagcttgtcacttctgctttatgtgttcattcgcatgcggtctggtgaaagcccccttgcccagatccgccgcaccggttttccagcggtgatcgcggggctgtcgctggtggctgcctattccggcgggatttatgcgattcaagcgacatccgtggcaaatgccatgctgctttttgctactgcgccttttatggcggcagttctgggatggattgttctgcgtgaacctgtacgccctgccacctgggtggcgatcaccgttgccattgccggtatcgcgatcatggtcgcagataaatccggaggcgtcgccctgaaaggcagccttgcggcgttggggtccgcctttggatttgcggtcttcactgtggcgctgcggtgggggaaatcgggtgaaatgctgccgtcggtgtttctgtccggattgttcggcatcatcgtgacgtccggcatatgcctatttttggaattgtccctagtgttgtcggtccgagatggcggcattgcaatgggcatgggggtgtttcaggtcggcgcagggttgatcctgtatacactggggtctcgcagccttcctgcagcggaacttgcgctgttgtcactggctgaggttctgcttggcccgttatgggtctggttgttcatcggcgaaaccgccacgctaaacacactgacaggcggcgcagttttacttgcggcgatcgccggaaacgctctgtcaggcaagcgacgtaggccgccgccgatcacgttaccttaggggattgggaacaacctattcctgatggatctgccgtgggtcggtgctttgcatcagtgatcagatccacttgcgcgtgatgattgttgcacttggggttccgctgtatgtgttgctattgcgcagctttagccaaaaggacgtctagctacccttcgcgttccagtttttttcgcgcaagttttcgggcgcggcggattgcttcgcctttttcccgcagccttttctcggaaggtttttcgaagtgttccttcagcttcatttcgcggaatacaccttcgcgttgtagtttcttcttcaacacccgaagagcttgatcaacattgttgtcgcgaacacttacttgcatgtggttttcaaacctttccagaaacaacttattgagatttgcacgagcctgtcagttgtcaaggtaatttttgtatatgcaactgaacgttggaaaaacggtgttcttcctaattctggttttcgaccgttgagccgcgttttcagcagtatcttcgctcacccagtatcagccgaggctgctggcagattaaggtaacttcttgtcaaactcatccagttccatggcctcagcatccaacgcgtccgccaataccacagaaggcgcgcctggggtaaaaaccgtctgagccgtgggcgggttgtcgtctgcggagcgattgacccgaagctcacgataggctgtgtacatgccgctcactatgatcagtaccatgccaatgaaggtcgtatggggtgggacttccccccacagcaggtatgcgaggatggctgccaacggcaggtaactatagtcgaatggtgcgatcacactcgcgctggcgatttgatatgcgcgcgagaccagtgtataggccaccgttccgattgcacccagaaaagccagcatggcgatgccctcgacatttggcatcggccaactcatgcgcagatggtttagttctggcgagaccacaaccatttgcgttaccacaaatcccatcggaacgattacaaaacccgagaacgagatcgtgtatagcccgatgacgagcgatgtgtcctgctctccgatctttcgcacaatgatttggctgattgcataggtaagtgcgcaaaaaagcggaagagccgaaatccagccaaaatttccgcctgtggggttcatcgcgatgacaacgcccgcaaaccctaccagcagcgcggcaatgcggtgcattccaaccttctcctgcagaaacagcgctgccaaagtcgcagtcatcaggggtgcggcgaagaacagcgtcgtgacctcggcaaggcccataaaagggaaggcggcatagaacatcgcgaagcctgaagcaaagagcatggcacgtgctagataccaaggccaaagaggggtcaaaatacgatgcggcgcacctagccacaggacgagcggcagcaaggtcatcaaagcgacgatggagcggctgaagatcagcatccacaccgggtaatgtgtcaacatacccttcattagaacgtcctgcccgacaaacagcaccatgcccgttagcacacaggtgatcccttggagagtgcgggacagcgacggtgcgtgtgtataagttgaggcagtcatgacagtagactgcttattccaagatgagcatcccgccacgaagcgaccggaatgtcggtttcaatcaataatccagatcaaaggccagtttgtcccacaactcggtcatagcctctgtcgagtttgctgcggattgcaccaacggccgcttttctttctgcggcgcaattgatggtttcgctcaactgagttgctgcatctgcgagcatcggtgccggaccatgtctgcattgggctcgatgcagtcattcgactgtttttctctgatgaccggttcgtcgcgttaagcagccgttcacaaccggaaattcgaagttttggttctaaacgactgctttcaccaggaccggacgttcgctgcggttgcgacgtatgtctcacatgcgggacaaagcaccatttcgctgctgctgcgccaaggtctgctattgctgcgtacgggacgcagatgactttgtataagaagcagtttctccgaattgctttttgtaagcgcgtgcaaaactctccgggttgtcaaagccgcattgtgagccaacttcgctaatccggtagttcgcattcagcaaaaggtttcgtgcctgagacaggcggagaaaacggaagtaggccgaaggcgtcattttgaggtgccgcttgaataggcgttcgagcgtccattgcgggacgctcaattgcgagctgagggtcgagatgctcaatgggtcgctgaggtttgccaacatcagatcaaccgcacgaccgagtgtgcgatccaactggactagggacgtttccgcgagcattctctgttgcggcccgtcatattcggttggtcggtaggtcaggatttccgcgacccttttcgcaagctctcgccccgagaaccgcgcaatgagggcgagggtcatgtcaaaggttgcgacgccaccggcgctggagcaacgattgtcggacagatcaaacatccggtccacgaacatctgatccgcataggtttctttgtagcttcgcaatgcttcaaagtggaccgccgccgggttttgggtcagtaagcccgcctcggcaaagatcattgcaccagtatccacgcagcccatgagggtcccggcccgcgccctacgtctgagccatcccagaaacggcttcgtcagtgcgctttcgggggtgtaggacgacagcagcaacacgatatcatcgcgggcttcgtccagatgacctgtcggcacgtcgataccgcttgagcttctgacaacacctcccgatgcggacaagatgcgacaatgccatgccggttgggccagttcgcgattggccacgcgcaagggttctgtgaccagcgtcagcgacaggatcgggaagtgattcgtcaggacgattacgacatttggcacggctcgcctccactatttgcagaaatgcgtcaagcaatcgctgatatttgtcaagttgtttgagcgtctacgttgtatgccggagaaaggaggatcgcacgatgacagctttaccgataacgcccgacttcgatgtttggcccgtagatcatcaggttcaaagtctcgacgtgtcgtccgaggcattgacaatcacgtggtcagacggccggaaaagcgcgcatcacgcattgctgctgcgcgaaaatagccctgatcccgtgacgacacaccccaaagcacgtgaaatggcgattggaccggaggagcttgcggaagacctttgtctcacgggtgccgaacttcgggcctctggtgccatcagcgttaccttctctgatggtcttacctccgaataccaccccggctggctccgcggaacggcctggttcggtgatgatacacctgaacccttggttctttggaccgccgccgagcaacccgaacccccgaccttcaacgggcctgccgccttggatgatccggcagtctttcttgactggcttgaagcgctgcacgtctacggcgttgcgcgtttgcgcggtttgccacagcaggacgggcttctggaacagatcgtgacccggatcggccccgttagggaaagcaattttggtcggcaatacgtgctcgagatcaaggacgatccggacagccaagcctatacctcaggcgctttgcttcagcacatcgacctgcccacgcgcgaactgccgttcggcctccaattcctctacatgcgtgaaaataccacgactggcggcgaaggcctttatgtggatgcctatcgcgtggccgaggacatgcgcactgcgcaaccagagcacttccattcgcttatcaccgacgtctgggaatataacaaccgcgccaagacctcggattatcgcgggcgcggtcccgtcgttgaaaccgatgccaccggcgcgatcactggggtgcgctataacacgttccttcgcgctccgatgaaggcccctctggaggtccaggcgcgggcttacaaagcctatcgcgccttttccgagcgcgcgcaaagcccagaataccaaatgaagttccgttatgaagcaggcgatctactggcttttgacaaccgccgcgccctgcatgggcgcgcaggctacgatgccaagggcggcgcgcgcttcatcgaaggcatttatgcagatcgtgacgatctgcattcccgcatccgcaccctcaaacgccaattccgcgccgacagcgtaagctagataaggaccgcaatcatgacccttgcttcgatcaaaacacgccaggactgctcagacgccgaatggcaggcgcgcgtcgacctcgccgcgctgtttcggatcatcgcccattatggcatgtccgatctggccaatggtgccgtctgcgcacgcgttcccgacgaacctgatcactaccttgtccacccatacggtatgttctgggaggaggcgcgtgcttccaacatggtcaagatcaatgccgagggccagccggtagacccggatgcaccgtggctgaatgacggggtgcagaatctgtgccaatggatcctgggatctcggccggacgcgaacttctttgtacatgggcatgaggaagaggtgatggccgtgggctcaatcgaggaaggtcttttgcccctcaatcaacccgccgtctatctcggaaacataactggatacattgaatatgagttcgaagaggatgaagccttcggtgatcacttcgtggagtgcctcggccaaaatcaaatcctgatcagccgcaaccatggctactacgcattgggcgaaacggctgctgctgcgtttttccgcgcctacttcctgcggcaaacctgtagcacgcagatcaagactttatcgatgggacgagagctgcacctaatcgatccacaaaaggttgcacggtatcaggatcaaatggcggtgtccgaacactaccactacaacggaaagacagagtgggcaggtcttatgcgcatgctggatgcgcgcggtcgagactacgcaagctgagaaccacacagggagccgaaaaaccgctattcgccatcacgcagcaaagtggaaggaatgggctcggaacagaccttcgacggattttggtaagtgtctgctgtgtcgcgtcaagccgccgttcgcgactggaaattcgaaactttggttcttaatggccgcttgccacaagagcggacgctactgaaaaataggcctacttccgctctgcgggactattcagaccttcgcgaccctcaagccgacacttgctgccggcccaaaggagacattaaccatcaccactggcgctgcggtgcagctttcgcatcgctgccattcgagcgtcgtgcagcacatttagaaaggcaatggctgggtcgtggaccaagctgccgttcattcgaatggcccacagcctagcttgttctatagaaaagcgttcgagaataagttcaggtttccgcccattgcgactgatgctgcgaccttcaccgaggtcgcctctgggctcgcagccgcctttcggtgttccagcaatccaaccggatttgacgtaatctgaatgtctgctctcaacattctgcatctaacaaagcgcacctgcagagaacgtccgctttccgcccaattcgacggtgtccaaagttgcataatcggcagtatgaaaagcagacgttcgttttctgtgcagcgaacgaccggtcagagcccactttgcctaatgctgtaaattatttgaatggcagtgtttcggtcagatcgccatgtaagaggatgtcacctagacctcataaaactcgacacaatgaaaaatagtatgctgcgctcaaagctgtcgcatttgggcaagacttggcatctttcagaaaggacgctgatcgcctaaatggcatttcgaggctgcaatggcgaaccatactgaccctgaacccgtgagccgggaatggaattatcaccccgatctgccgctcgcggacccgtcgattttcaaatggccgcctgaccctcgtttcttgggtcgttggctcgtgtgcaactggctcatgctaagcgagcgcgtgatgctggtgctgctggccacgctgtgttggtggttattctacccctcattggaagcggcgaagaccttttcagtcgggtggatttttcaggtgtggcttgtcaatctgggcctgatgattggaatggccggagggcttcacgggtatttttacatacgaaaaggccaaggcaaggcgctgaaattcgatcatcgtgaaccggcacgcggcaaccgtctctggaatttctcgaaccaggtccatgacaacatgttttggtcgctgggaagcggtgtgttgcagttgaccctgtttcaggccgccatgatgtggctcatgacaaacggatacgtgccgacgattactctagcctcgaatccgatcctgtttgccgccggattggtgttgttgcccatctggtccgcctttcatttttactgggtgcatcggttgctgcatgcgcctgccctctacaagcgtgtccacgcgctgcatcaccgaaatgttaacgtcgggccatggtccgggctgtcgatgcatccggtcgagcatctgctctatttctcttcgctgatgatccattgcgtgttcccaagccatcctatccatctgtatttccacgtgatatatctcgggccgggggctgcgatgacccatacgggctacgaagacctgctggtgaaagacaagcgcagattggcgttggggacgttttatcaccaactgcatcatcgttattacgaatgcaactatggcaatcaggaaatgccatgggaccgctggtttggtacgtttcatgatggaagcgacgaggggacgaaagtgacgcgcgcgcgcaagaaagagatgcatggcaagatttgacgatacgagtgttttgccagaacgtgagagggaggccgcttgctacccgaagcgggcaaaggcgcaccgcccaattcaggcaaagctgatacggttttgacgacagcatcgttcgcgttcgcagcatgacactccgaaagctgaacgtggagcaactgccacgaacgcacactgagtcccgcaactcagtcattgcccctccagattttgctgcgccgagaaggaacgaccgtttttctttctgcagcgcagctgatggtttcgctcaacagagttgctgcatctgcgagcatccgtgccggaccatgtctgctaatgggatgtaccggctgcttcacccagcaggttaggcttggcctatactgcaaaaaggagaagtagcatggcgaagaatgattttgatgagctgatgtcagttggcgttgatatcggcaaagacgtatttcacttggttggctttgacaaagaaggtcggcttgttttgcgcaagaagatcaaacgcatggcgttggttgcgacgtttgaggagctgccgcaatgtattgtcgggatggaagcttgcctgagcgcgcactttgtcagccgaacgctgagcaagatggggttcgagccccggatcattcccgcgatttatgtgaagcctttcaacaagggccagaagaacgactacaatgacgctgaagctattgcagaagccgctttgcgtcccaatctcaagacggtatcggagaagacgcaggagcagcttgatctccaggcgctgcatcgcgttcggtcacggcttgtgtcacgtcggacagcagcaatgaatcagatccgggcctttctgatcgaacaggggatcactgtccgacgtagtgtcgcggctctgcgcgcctcgctcgaagccattcttagcaatcgcggcgacgagatgtccttgcggatgcggagattgatcctggggctccaacaggattggatatggctggataaacggatcgatatgaccacatctgaaatcaaagaggtcagcgagaccgaggaaagctgccaacgtctgatgaccattccgggcatcgggccaatcatctcaacggctgtggttgcagctgtcgggaccggcgaggcttatgatcgggggcgagattttgcggcttggctggggctcgttccgcgacaacacagcaccggcgggcgcaccatcctgggtcgtatcacaaaacgaggcagccggtatctccgcatgctgtttgtgcaggccgcgcaggtcatcatgatgcgaccgaagaactggcataagtttagttttggcgcatggttggaagccgccgcgacgcgcatgcagcacaacaagctcggcgtggcgcttgccaataagctagcgcggatcgcatggagtgttcttaactcaggcaaggacttcgattggatggaaaaagaattggcgactgcgatctgatcacagccgcaaacgacgttcgtaaacctcaaatgcatggaacggaataaaaacgcactcaaagtctgagagcccgaatggtcataatcgacctgtccgctaatgagacaaaggcgcgtgcgtactcccaacagggccacggcaagcaacacaagccgatccaaaggccggatacatatcagcgacttccagaagacatgcaattgaacacttgcgaacagcagccggtacatacattgggctcgatgcagtcattcgactgtttttctctgatgaccggttcgtcgcgttaagcagccgttcacaaccggaaattcgaagttttggttctaaacgactgctttcaccaggaccggacgttcgctgcggttgcgacgtatgtctcacatgcgggactaaggagacatcaggttctgtttttctagccgaaaatcactttatcaaatcatccgctgttggcttccagaaatggactgatctcatggaaaaactcatcaaatcctggatggccgcgaatcatacaatgattggctcccggtaactccgtaaatcctgcgcccggaatttccttagccagttctctgccttccttgattgctgccgccatgtcgcctttgacatgcaacaccagcgtcggaacgcggattgcacgtgcttctttccgtgaatccacatatgcgttcatttccattatcctgagcgcgttttccgggctggttgaaattcgctgcatctcgtcaaaactgtctccttctgccttcgttgcatctgggatataagcggtggtgaagaagtggcgatataccggacttggagagccccaacctgacgagaccatcgcgcgtgaggcttcataaaattgagctgcatccggatcatcacgaaccattcgccctcgcgcgtatccgccaaggaggattaagaatttaaccctttccggatgctttacggcgaagcgaacgctgaaggccgctccctgactgatgccaaaaagaccaaagcgctccaatcccgccgcgtcagcgactgcaagcatatcatctatcattcggtcttcagtaatgtcttcgacatcccagtccgacagaccgtttccccgctgatcgaaccgcacaagattacaacgcttcgagaattccgaaaggaagtctccccaaacggggctagtccattcatattcaagatggttcagccaatttggagccttcagcacaggcattccgcttcctgttgatgcccatgccagatgtgtaccgtctgccgattggcaaaagcttacgcgctgctgcagcgatatgtctggtggtttgcgttctggcggcgcgtcgggagaccattgccagacgcggatcggacgtgaaaggtttttgacgcgctgtcctcccatatctcgaaaggaaacatctatccggtctgccgctgactggtggacgacatccgacacacagattcctccaggcggggcaagactttcaagtctggaagcaacatttacgccgtcaccgaagacgtcaccatcgtcaaaaataatatcgccaagattaatacctatgcggtaagagatacgctgttcctcaggttcatcggtttctcggcggttcatttcactttggacgtctattgcgcaacgaactgcatcctttatcgatgaaaacgtgacgagcataccgtcgccagtcgttttgataatttcaccgcggttggatgcgatcttaggatctatcaactctttccggtgtgctttttggcgagtgagaacgcccagttcgtcgatttccattagtcgcgagtagccgaccatatctgtggccattattgctgccagacgattttgcataagcgtggtcctcctcgaggattacctcttagcatcttttgcctgcttcaagttggaaacatttgcccgagcgtttggaactatgttgtgtagaagcaatttccactaatgggatgtaccggctgcttcacccagcaggttaggcttggcctatactgcaaaaaggagaagtagcatggcgaagaatgattttgatgagctgatgtcagttggcgttgatatcggcaaagacgtatttcacttggttggctttgacaaagaaggtcggcttgttttgcgcaagaagatcaaacgcatggcgttggttgcgacgtttgaggagctgccgcaatgtattgtcgggatggaagcttgcctgagcgcgcactttgtcagccgaacgctgagcaagatggggttcgagccccggatggctctgtcagaagaaactgacttgagccgggcaggacggtttcgtaacgtctgaagatgaccaaacctgacccatttcgctatttcaaaacgagccgtgagatcatccgcctggcggtaatgctgtatgtccggtttcctctgtcccttcgcaacgtggaagatctgctgcatgagcgtggcatagatgtgagccatgaagctgtgagattctggtggcatcggttcggcccgatgtttgctgcggagataagaaagcgccggattaccggcatgaaatccagccggtggcgctggcatctggacgagatgttcgtgaagatcaacggcgaacagcactatctctggcgggccgtcgatcatgaaggcgaaatcctggaaagcttcgtcacaaaggcacgtgataagaaggctgcgttgaaattcctaaagaaagcaatgcgtaagcacggcagtcccgacatgatcgtgacggacgggctggcatcgtatggcgcggctcttaaggagatcggcgctgcagacagacaggaaactggtcgctggttgaacaacagagcagaaaactcacacctgccgttccgacgacgagagcgagcgatgctgcggttcaggcgcatgcgaagtttgcagaaattcgccgccgttcacgcttccgtctataaccactttaatcaggaacgcagcctctcaagtcgaacgaatttcaagctcaaccgtgccgccgctctggctgagtggcgcggtctcggtgcggcataaggatcagccttactgtccttgcagagactggttcgaattcgtctgacagcaccagttcctgaattggtcaaagaccggtggcgtctacagtgcacttggccgcaatcacccgctcaccgtcgagaaacgtgagcggagccgagaacggcaaagacggagacgctgaattcttgcgtcgagcacgacgaagcgaaccatcggttc

SEQ ID NO: 10 - DNA, 31646 bp, Artificial Sequence
  Synthetic Oligonucleotide
gatcaccagggcggcgatcatcaaaaaggatttcgtgtgttgcatggctgctccaatgagggggcggttggaaagaagggaccgaagaaggaaccggcatccgcacagcgaatgtctttcgcatatcggtggatgcccaccagacttgagacaggcgctgccaggggccccaggtccgtccatgcattgtgtggaacgcccgcctgcgcaaaggcagaaacaacggtgcaacggccgttcagttcggacggtcagcctcgccctggcgagacgctcttgagacgcttttgtcagtgcgggcgggcggccttgagcacctgcgtgccctgcttcgccagcgccttgagggtctggaagtcggcgtcgtgttcgaccacgaggtgatcgatctcgcggacgggtgtgacgcggtgtggcagctgcagacccaacttgtcgttggtggccatggccacgcaatggcggctgaccgcgcgcaaggcgcgcttgaaagcggcgtcggcggcgtcgacggtgcagacaccggcatcgaccgtgatcccgcaggtgccgaggaagcagcgctggatgttcatctggccgacggccagcacagcggcggcgtcgatgcagccacccaccagcgggtcgaccgagccgccgaccatgatgagctgcacgtcttggcggcgcagcaatgcggcggcaatgtccaccgagttggtggccacggtgagcgcgtggtcttcgggcaggcactcggccagcgccaggttggtgctgctgctgtcgaggaacagaaattcgccgggttcgatggtctcgaccgccacccgcgccagcgcggccttgcgctcgcggccttggtccatgcgcaccgccatcggggtcgcgccgggcaggggtggcaacgcgccgccgtagacgcggcggccgcgcccttgggcggccagcgcgcgaagatcgcgccggatggcgtcgtccgacacctggaattcggcggccagcgcagtggccaccacggtctggccctgggccaggcgcgcggcgatcaactcgcggcgctcgagcggtggattcgtgtacatacgcggatcataacgcgcacaaacaagaattcaaccatgcataaacgttcgcccttcacaccaccagcacagcgcggaaatcgttcacgttggtgtgcgtggggccggtgatgaccaggtcgcccagcggttcgaaatagccgtaggcgtcgttgcgggccaggtggtcggtgactttcaggcccagcgcggcggcgcgggccagggtgtcgggcgacaccagcgcgccggcgttgtcttccacgccgtcgatgccgtcggtgtctgcggcgagcgcccacacaccggcctgcccgcccagcgcctgggccaggccgaggcagaactcgcctgcccggccgccgcgacccttcttctggccttcggtgcgcgggcgcaccgtgaccgtggtttcgccaccgctgaggatcacgcagggtttggcgaagctgctgcggcccagcgccgtggagcgcgccagcgcggcgtgcaccttgccaatctcgcgcgactcgccttcgatttcgtcgctgagcacatagacgttcaggccgagcgcgcgggccgcgtcggcggcagcgtccaggctttgttggggcgtggcgatgaggtgggtttgaatgctggcgagtcgcgcatcgccaggcttgggggtttcgagtgcgccggcctccagctgttgccggacagcttcaggcacctcaatgccgtatcggcccaggatgtccagcgcctcgtcgcaggtggacgcgtcggccacggtggggccgctggcgatcacgctcacgtcgtcgcccggcacgtcgctgatggtgagcgtgaccacgcgggccggcgcgcaggccgccgcgaggcgcccgcccttgatggccgagaggtgcttgcgcacggtgttcatctcgccgatgtgcgcgccgctctccagcagctggcggttgatgcgctgcttgtcttcgagcgtgaggccgtcgcagggcagcgtgagcagggctgaaccgccgcccgagatgagacagagcacgaggtcgtcggcggtcagaccttcggtgagtttcaggattcgctgcgcggcctgcaggccggcggcgtcgggcacagggtgcgacgcttcgaccacctcaatgcgctcgggcaagccggcggggcgcggtggcgtgtggtggtagcgcgtgacgaccaggcccgaaagcggcgcgtcggtcggccacagcgcttccaccgcctgcgccatggcgccaccagccttgccggcgccgagcaccagggtgcggcctttcgggggcggcggcaggtgggcggcggtgttgcgcaacggcagcgcgcgctgcaccgccacgtcgtacagatggcgcagaacggcgcgcggttcgtgaagggaagggctggtcatgcgcgtctcctgtcttgctgtgtgttcgaccgagcgggccggcggcgcgtggggtgggcttggcacaaaatgcccgcatgcggcgcattgtcgcgcagcccttcacaccgcagaccatgcccaacctgctgatccaacacgccggctgcatcgccaccttcgaccacgccgagccctccaaaggacgggagttgaaggacgcgagcctcttcgttcgcgaccacgtgatcgagtggatcggccccgccgcagagctgccgccggtgctgcgcgaagcggctgatgacaccatcgacgcgcgcggccacctcgtcacgcccgggctggtgaacacccaccaccacatgtaccagtcgctcacgcgggccatcccgggcgtgcaggacgccgagctgttcagctggctgcgcgggctctacccgatctgggccgggctcacgcccgagatggtgcaggtctcgacccaggtggcgatggccgaactgctgctgagcggctgcaccaccagcagcgaccacctgtatatctaccccaacggcgtgcggctggaagacagcatcgaagccgcgcagcagatcggcatgcgattcgtggccacgcgcggcagcatgagcgtggggcaatcgcaaggtggtttgccgcccgaccgcgtggtggaaaaagaagacgcgatcctgaaggacagccagcgcctgatcgaaacctggcacagcgcggcgcacggcgccatggtgcaggtggcgctggcgccttgttccccgttttcggtcagccccgatctgatgcgccagagcgccctgctcgcccgcagcttccagggccagggcgtgcgcctgcacacccacctggccgaaaacgaccacgacatcgcctacagccgcgagaagttcaacaagacgcccgcgcagtacgcgcaggagctgggctggctgggcgaggacgtgtggcacgcgcactgcgtgaagctcgacgacgaaggcatttcgctctttgccgccagccgcaccggcgtggcgcactgcccctgcagcaacatgcgcctggccagcggcatcgcccccatccgccgcatgctgaacgcgggcgtgccggtgggcctgggcgtggacggcagcgcgagcaacgacgcggcgcacatggtgaacgaagcgcgccaggcgatgctgctggcgcgcgtgggccgcgcgttgatgccaccggaaacccggaatggaaaaaccttcttcggctgcgacctcggcccggccgagatgacggcacgcgacaccctgcacatcgccacgcgcggcggcgcccaggtgctggggcgccaggacatcgggcacctggccgtgggcatgtgcgccgacctcgcgctgttcgacctgcgcacgctgggctttgccggcggcgcggtgcacgacccggtggccagcctgttgctctgcgccagtccgcccgcggcctacaccgtggtcaacggccgggtggtggtgcgcgagggccagctcaccagcgtggacctggggccgctggtggagcggcacaaccggctggccggtgtcctgtcccgccaatagttgtatgaaatgaaaccgatggattcgcgcccagggcaaggcgcaaaccgcagcgatagcttgtgctatcgcgaggatttgcaacgccgccatgggtgtgaagacgcggtttcatatgcaagctattggcgggacaggacaccgggctttggccgaggcggcgcgcaaagcctgagcccctgcgggacaatggcccgatgaccccttccccctccatctggagccccctgcgacagcccgctttccgcgggctgtggctttgtggcgccgtctttttcatcggcgcgggcatgcagaccatggcggcggcctggctgatgatcgagctcaccggttcgtcctttctcgccgcgctggtgcagaccgcggtcttcctgcccatgttcctgctggcgctgcccgccggggtgctggccgacaccaccgaccgccgccgcctgatctcgggtgcgctgatcgcgcaggtggccgcctgcgtgctgctggcgctgctggtgctgggcggctggggcgggccggccacggtgctgttcctggtgttcgtgtgcggctgctgcaccgccgtgttgacgccggcgtggaactcgtcggtggtcgacccggtgccgcgcgacgagtggccgcaggcaatcaccgccatcggcatcgcctacaacgcggcgcgcgccatcggccccacgctggccggcctgctgtttgccgcgctgggcgcgggctgggtgttcgtggtcacggtgttcaccacgggggtgatgtgggagtcgatccgccgctggccgccgaaggcgcacccgccttcgcgcctgccggccgaacgcctctggggcggcacgctgagcggcctgcgcttcgcctggcactcgcgcatcatcctcgcgcagctggtgcgcgtgatggcgtacagctcggccggctcggcgctgtgggcgctgctgccggtgatcgcgcagcgccaactcggcaccggcgcgcagggcttcggcctgctgatgggctgcatgggcacgggcgcggtggcctcgggcctggtgatcgggcgcctgcgcagccgcttcgggctcgacgccatcattgccgcggcctgcgtggcgtttgccaccgtcatgctgctggcggcctgggtgcgcgtgccggcactggtgtacgccgccatggcggtgggcggcgcggcctggatggcggccatgtccaccttcaacacagccacccaggccagcgccccgccctgggtgcgctcgcgcgcggtggcgctgcacatcgtggcctcgctcggtgcgttcgccatcggctcggcgttctggggcgcggtgtccgacatcgccggcctcaccacggcgctggtggccgccggtgccctcatggccgcgggcctgctgctggcgcgcccgttcccgctgcgcgtgggcgaggcgcacgaagtgacccagggcaccccgtgggacgagctgtttgtgaacgacgaacccagccccgaggccggcccggtggccgtggaagtgggctaccgcatccgcgcgggggacgacaaagtcttcctcgacaccatcagccgcatgaaggcgccccgacggcgcgacggcgccaccttctggcgcatctacaaagacctgggcgagccctcgcgctatgtggagcgcttcatcgtcacctcatgggccgactacctgcaccagcgcgcccgcgccaccgtggccgaccacgcgctcgaggccgaggtgcgcgagtttctggcaccgggcgaaagcgcgcacatgtcgcactacatcgcagagaggtgacccccctgcagcgcttcgcgctaccccccgagggggcggcactggccgtccggcggagccggcccggcggtgccctgggctgcctcccctgctcgcttcgatgtgacgctccggcgccctgaaaacgatttcagaccacgctcagcacgcccgtgagccaggcgctgatgtcggccagctcggcgtcgctcacctcgtggcccatgtcgtagaggtgccagtccacgaggtggcccatgacctgcagcacggtgcgtgcggcacgggcgcggtcgatggcgaccacctcgtcctgctgaccatgcgccaggaagatgggcaggcgctggttggcgatgttcgactccatctgcagggtgcgagcgcccaggggcaggtagcccgagagcgccacgatcgcggccaggcgctggtgcgcacgcaggccggtctgcaaggcgagcacggcgccctgcgaaaagcccatgagcacgatgcgctcggacggcatgccctgcgcctgttcccgctcgatcagggtctgaaccaagcgctgggaggcacgcaggcccgcctcgtccgccggctgggacgcatggcgcgacgccgcgggtggcgcggcgtcgtaccaggcgtgcatgtcggtgccgttgaagctcatggttcgcgtgggcgcatcggggaacacgcagcgcaccggacccacggccgacaggtccatgtggcgcagcaggggcacgaagtcactcccctcggtgcccagcccgtgcaacacgatgaggctggccacgggcgtggcggacggatcgcgtccggtcacgaactcctgcaattggatggtctggggcaatgaatctggcgcatacatcggcccagcataagcgcccgccgaccaccgatgaaacgaaacgggccatcaacggccctgtggttgcacacggatgcagatttcacaaacaaacgccacatggccacgattaccagcgcgttgatctcaagtgctggaagcggccgagacggcaataccccaaccagcgccggacacccgattggttaggatggcacgggccagtcaggccatacagagggaggacatagcagatggatcgatttcgactgaccctgtctttgggcagcccgctggtcgtcaatggcggctacatgacgctcgacgccttgctcgcggcgctgatctacgaggcgaccgacgatctggagcaggcccacagccagatacccctgaaaaacacccagggcctgtggcacggcagcgcggccatcttcgagccatgggacacgcagcgggtgagtttcgttgccaacctgcgcgcctcgcacgatctggacatcgatctggtggcgcagaacaagcaaggccaaccgcacaccaaactcggcctcacccggcgccgcgagtttggcgcggtgatgaacagctaccgcgccatcgccacgcccgaggtgacctggtacgcccaaggcgatagcgcccaggtcgaacggctgctcagcggcgtgagcttcattggcaaacgccgagccagcgggttcggtcaagtcaccggcatgcgcatcgagcccgacgaactggacggcgtggtcggccctttcggcgacccgctgcgccctgtgcccatcgacctgttcgcaggcaacggcaccgctctcaaagccgacgccgcctggcggccggcctactggcatcccaccaaccgggccgtgtgcttcgtgccacagggggtggcatgaacaccttcgaattcttcaacgaacacttcggtcgccacctcgtcgccatcggccacgaatcgccccacgacgccaccgcgcgagccctgagcagcaaccaccggctcgccaaaggcagcgaaagccgcttgtcgtccggctgggccatcgtgcggcccggcacctccagcgtgcagctcaagctcgcggccgcccatctgcacttcgacgaacgcacccgggtcgaggcctttctggacgagctggcgcactgggacgaaaagagcccccgcatcttcctcatgttcgacaaagcgcccgtgcccattgcccacctgtttctcaccgtggacaagcgcgccgttcgcatctgttcacccgcaggcgttgaaaccttcaactggaacgaagccccgtcgccggaatctggcggcattcagaaagccctttggaaacggaggacccccgcatgatcgaccacaccattcccaagcctgcgcgcaccgccggctacccattgcaccggctggtggccgagctggtggacggcagccccgcgctgtttgccgaccacggcgaccacctgctggtgcgcaccgaaaaaccgctcacggcgaacggcaagcgcgtgaaagcccccgccggtggcgacctgctggcctttgaactccaggcctgtgccgccaggcgccagggcggaaaaaacatctaccccgagctgggcgactggcgcagccgccgcgaatggctggaaaccgaaggtgtcaaacacggctttgccgtcatggccgtgcacgtgacggcagaccgcctgcaggtcagcgccgccgggggcaggcgcttctggatcgacgccagccacttcaccggggtgctcaaagtcaccgacgcagcgctcctcgcccaggccctggccaccggcatcggccgcgtgggcaaggccttcggcatgggcctgctcgaaatctgaatctcgccaacacaggaggacacaccatgaacccacgcatcgtcatcaacgccaccctcaccaccgtggggccgctctccattcgcatgcccaagtccgagggcggccgcgaaaacgcctttgacaactttcccgtcatgacccgcggggtggacgacaccggcaaccgcctgcaaacgggctacctgcccgccaccaccctgcgcggcttcctgcggcgcgctgcgacattgcgcaacatgcgcgccgccgccgaagccggcaagccttacaagctgccgcagatctacagcgaaatgatcggccaggacgccgagagcgagaagcaggcgggcgacatcgacctgctcgccctgcggcaggcgcgcgaggccaacgccgtgctcgacctcttcggcagcgggctgggcatcaaatcgcggctcaaagtcggccacttcatgccagcggtgaacgtgttgcccgaggccttcaccggcgttcgcaaagacctggacgacaccgaagaagcgctggacctcatggaccccgccgacctgcaagccttcgccagccggagcgacaacaacaaccggcgggccgctgcggccgcgctcgtcaaacagctggagggacaggtcaggcgcctggataagaagggcgaagccgtgcccgaagacgtcgcccgctcgctggcgctggccaaggccgaagaagcccagttcaaggacgccatgggcgacatgcagaacagcacccgcaccatcgtgcaacaccacgccctgcccgctggcctgcccctgagcgggcggctggtgatcgacgcggcgcgcgagcgcgatctggagctgctcgaccacgcactggacgccctgagccagcgccctctgctcggcgcgcacagcgcccggggctgcggcgaggtcgcgggcctgttccagttttttgacgctgaggggaagttgttgaaaacggtctcggtgggagggttccagccagcgcaggtcacccgtttttgagctgcacagaagcggtttttcccttcagagtcacgccattgaggtccaagccgccctgtaaaagggtggctactagaagtacaccgctgactacatcgtgtcgaactcggtccaagccgccctgtaaaagggtggctactagaagtagtcgccggccaccatgatcagcctgttggtccaagccgcggaaagggtggctactagaagtggctgaaacgcttggtgccgtctttgcctgtccaagccgccctgcaaaagggtggctactagaagggaacgacggagcagaagcatgccggcactgtccaagccgccctatagaagggtggcgactagaaggtgtactcaccgcgcttgaatgctgtgtacctccaagccgaccggtaaacgggcggctactgaaaattgattctctgtgcgcgagcacgtaccgaggacaagccaaggagtagcaacgaactgctaaaaatccaacgacgacgctgggaatcagcaatgccaccgcccttacccaagcctgtaccgcacggcgtttcgcgatactcggcaccatgcgagcccaagccaacgacctccacagcctgtttcgctcagccgaccaggccaacttccacgccgtcctcgcgcgccacatggcggcgcccgacgcccccttgctgctggaaggcagcaccggcctgggcaagacgcgcgcggtgctggccgccgcgatgcacgcggcgtcagaaggccagcgcattgccatcgcgctgccgagccaccagctcatcgatcagttgatggcctccagcgacatgagcgccacccggcggcctggggtggcggtagcggcctttcgaccagcgcgctggtttgaacgccccgccgaccacaaggcccaccgggcggaggcgatggcggccggggtgatggtgtgcaccagcgcggcgctgatcatcgaccagcggctgggcggcgcctacaacggcgcgagcacccgggactacctgatctttgacgaggcagaccaactgcccgacgccgccgccctgcaaagcgaccgagagatcacgaccgctgcgctgcaagcgctgggcatcaacgccacagacaccgcagctgcgctggcggcggtggttgccgacacgcgggccgagtcggaggtgcgcgccgctgccctgttgatgcaggacgcgctggccgagcccgcctggtaccagcgggtgggtttcacggacgatggggggcttgccctgcaccaccagttgcccgggcgcctgctgcgcaagctggcgaaccggccagcggtggccttcatcagcgccacgctttcggtggcgggccgtatggacgatttcaagcgcgccatgggcatcggtgaacagagcgcgcactcgggcagcctggagcccgcgcgccacggcgcgctgaccttccgcgtgtcggaccttcaggtggacacggaggcctggctggaggcggtgacgcagtgtgtgcgccaggccgaagccacgggcacggtgctggtggtcacgcccagccacgcgctggcgcgggccctgggtgagcggctgcccggcgccaccgtgcgccaggcagacgaaaccgtcagtgcggcggcagcgcgcatggggccgagccgcacgctggtggccaccgctgcctgggcagggttggacacgccggtgatctggcaacacatcgtggtgccacgcataccgtttgagaggcccgtggtgatcgacggccacaccgagagccgctacgtggacacccgcaacacggcggtgcgccggatgcggcaggtcattggccgggggctgcggtcccccgacgcggtgtgcacggtccacatcctcgatgaacgctggaagcaggtggcggggtttgtgccagaacgctttcgcgcggcatggcagcagcgcatcggtttcaccgaaggcgcgcgctcggagctggtgctgtcacgcgctgagcgcgaccctgcggtgcgccgtgcggccctggctcaccatggccgccgctgcatggcctgcgggttcacgccgagggtggacagccagctcgacgttcaccacctgaaccctgtggccgatggcggcgaacgggtgaccacgctggccgatgtggcggtgctgtgcgccaattgccaccgtctggcgcactcggaacagccaccaatgacgctggaagcgctgcgatctctggtgcaggactgaagcgcctcaggcgcccaggcgggccaccaaccaggcgttgaggtcggtcacctcttcggggcacaccgagtgccccatcgggtagctgtgccactccaccgcgtaaccgagcgatgtcagcgcgtcgcgggccgcggtgccgcgctccatgaccaccacgtcgtcttcttcgccgtgggccagaaagatcggcgtggcgcggttcgcggggtggacttcggtggcggtgtgctcggccagtgcgaggtagcctgagagccccaccagcccggccagccgctgaggcgcgcgcagcccggccatgagcgtgacgacgcagccctgagagaagcccatgaccaccacgcgctcgggcggcacgccgcgcccggtctcgcggtcgatcagggcctgcacgatggcctgggcaccgcgcaggcccgcctcgtcttcatggcgtgggatggcggggtcggtgctgggcggatggatgtcgtaccaggcacgcatctcgtacccgccattgatcgtgaccggccgcaccggcgcgttggggaacacgaagcgcaccgggccgatggcactgaggtcaagctcctgcgcaataggcacgaagtcgctgccgtcggcgcccaggccatgcagcacgatgatgctggccgcgggctgggcggcggggtcaccaccggtgacgaattcgcgaagctggatggaggggttcgggctcatggcgccagcataacgcgacacagggccggcagccgctcagcggcggcgtccgccctcgttccagatgtcttcgtcgacttggcctttgagctcggtgtacatcgccgggtccagggtcgttcccccggaacgcgcgcctcagccccactgcacgcagcgcatcgacaacgtgccttcgtggaacccttcgaagacatggcgcggcttctcgcccgactgcgcggcgccggccgcgtagagcatggggaaatagtggtccggaaacggcaccgccgtgcgggcgccttcggtgaggccttcccaaccggccagggccttcgtgtcgccagcgtccatggccagcttcacggccaggtcaaagtcctgcgcccagggttggctcgcactgtcggtttccccggcgtcgcggctcaggatgcgcaggttgtgcaccacgttgccgctgcccacgatcatcacgccctcgctgcgcagcgcggccagcgcacggcccagggcgaggtggaacgcgccatcgcgggtgatgtcgatggagagctggaacaccggcacgtcggccgccgggtacaggtgcttgagcacgctccaggtgccgtggtcgaaaccgcgcgcggcgtcctgccccaccagacgcggcgccagccgggcggcggccctcagcgcctcggccggcgcacccggtgcggggtattgcacctcgtacagcggtttgggaaaaccaccgaagtcgtaaatcatcggcggcttcgcggtcgtggacacgcgcgtgtcgcgctcgctcagccagtgcgccgagaccatgaggatggccttgggccggccgagcgcctcgccccattgggtcagggtctgcgtgaagcggttgctctgtatcgcgttcatcgggctgccatggccgatgaacagggccggggccgggccggtcatgagcgggagggtgctgggcagggtctgggcctgggcgttcgggatctggcgcaaccaggcgcccagggtcagcaaggcagcgctgacgccggtggcggccaccagcgcgcggcggggaagtttgtggtctgaggtcatgttcgaggcggaatgatgacccattgggaacacctacagccccaacagttcccgcgccttcgcaaaagacgcggcgggttgcagcacatcaaagtgcaccacctgcatgccggctttcacgccgccgtcggcattgcgtttctggtcgtccacgaacacgcaggcgctggcgggcagccccagcgcttcggtcaccgccgcgtaggcgcgcgggtcgggtttgaggatgccggtgtaggtggcgtccacgatcagctcgaagtgctgaagcaatggcaggcggcttcggaagtcggcgccgtagaacaggtccagctcgttggagaggatggccaggcgcttgccggccgccttggctgcctcgatggtggccaccgcctcgggccggatcaccgcttccacatcggcgccgcgcgcgcgctgcacgaaggtctccatcgagtcccactcttcgccaacgagacggccgacctcgcgggtgcgggccatccagtagtcgcgctcgctcagctggtcggcctgcatggcctgccagagcgggtcggtggaggggtcgaacgggcccttccaggtgagcgtgccgggcggcaggcccagtgcctgttcggtcaggggatgcgtttcgaacagcatgcggctgatgacgccgccgaagtcgagcaccagtgcctgtgccgttgatgcttcgctcatgccgccctccgctcgtcttgggcgtcgatcacccccggcggcaccagaccggcggccacccaggcatcgaacacctggagtgcggcctgcacgaaggcctcgtcgttgatgtgggcgtccaccggctggaacaccgtgtcgggcgagaccacgtggcacatctcgtccacaaacgccttgaggccctcggggtcgtgcagggcttcacccgggcggtcccactgctccacgccgcccgtgggcagcagcaggcaggtggggccagtggcttcggccaggcggtcgctgatggcgcgcgccacgctgcggcgcatgtcgtggtccacacagaccgaggcgatcaggcggttgtggtcgtgcacaggtcgcccggcgaaacgctcggggcaacgcgtccaggccgcaaagtccaccatgtcggtggcaccgggcgccacgatctgcggcacaccggcgcggcctgcgccgagcaggcgctcagctccggcgctcacgcagctgccggccagatcgttcaccagctcctgcaggctgaagtccatcacacaggcgaagtagccacgttgcgccaggtcttcgaaggcgcggccgcccatgccggtggtgtggaacacggcgagctcatagccacgcgcttccagcgcgggcctgagcttcttcatataggagagcgcactgctgccgagcgaggtcatgcccaccacggggcgcggatcgtgctcgaccccgcgcgccaggcaagcgcccaccacagcgcccgccgcctggctcaacgccgacttgcacaggcggttcaggccgtacaggccgccagcccagagccgcatgatgagatcgggcggaatgcggtcgggcgggatcagcggcgagtacgcgatggtcgagagcacgaccttgggcacgcccaacggcaggcggttggtcacgtccagcgcgaggtcggtgcccatggtgccgccaagggccagcaggccgtcgaagcggccttcgaggtaccactggttggcgatcagggcggcgccgtcggccatgagcttcatggaggtgttttcgtcgccggtctccatcacctgctgcagggtcactcccgcggccgccgccacctcggtgttgaggatgtcgggcgtgaagccgcccttgcccagcacgcccacgtccatcaccagggccgtgccgccgcagtgttcgaccgactcgcgcaggaaggccatctcgtcgctcttggtgtcgacggtgccgatcagcaggatgacgggcgcgcggtccgcctttgtcgggctcacaacgtcgcctccaccgcagcgaaggcggcctccagcgtgtcgcacaggtggttgatctcttcgagcgagatcacgagcggcggggagaggatgaggttggggccagagatgcgcaccatcaggccgcgctggtaggcctctttggccacgcgcgccgggatgtcactgctgcgcggcatgggcgtgcgcagcgccttgtcgtcgaccatctcgatgcccagcatcagccccacgccacgcacgttgccgacgaagctgcagctggtctccagcttgcgcaggcgctcctgcaacaccgcgcccacgcgccctgcgttgcccggcacgtcgagccgttgaatttcgtccagcgtggcgagcgcggcggcggcacccaccgggtgggcgctgtaggtgtagccgtggcccacggcggcctggccggtcttgtcgtcgttgaacacctgagacaccttggccgagatggccgtggcgcccagcggcacatagcccgagctgatgcccttggccaggcaccacatgtccgcgttcacaccccacatccgtgtgccgaacaaatggccggtgcggccgaagccggtgaccacctcgtcggcgatcagcagcacgccgtgtttgtcgcaaatcttgcgcaccagcggccagtagttggccggcggcacgatcacgccgcccgcgccctgcaccggctcggcaatgaaggcggccacggtgtccggcccctggaacacgatctcgcgctccagcagctcggcgcagatctcgcccagctccagcgggtcgtcgctgtaggggttgcggtagagccagggcgtgtcgatgtggaagcagccaggcagcagcggctcgtaggcccggcggaagttggtgttgccgttgacgctcataccgccaaagtgcacgccgtggtagccctggcgcaggctgatgaacttgaagcggtctttctcgccgcgcagcttgtggtactggcgcgccagcttgagcgcggtctccaccgcgtcggagccgccgctggagaacatcacggccgacacgccgtcgggctccatcagcttcaccagccgggctgagagctcgatggcgcgcgggtgtgaggtgccgcggaacgtgttgtagaagggcagctcgtcaagctgggccacgatggcgtcgcgcacgggtttggcactgtggcccaggttgctggcccagaggccgcccacgccgtcgagcatcttgtggccgtccacgtcccagatccagcagccctcgccgcgcgccacgatgtcgggcttggccttcttcatcgccgccgggtgcgccatggggtgccactggaactggccgttgtctgctttgagttgttcgatggtgttcatgtgcgtctccttgttcaaaaaggtcttccgaccgtgatggtcttgatctcggtgtagtgcgtgatgccctcggcgccctgctcctggccgaggccactttccttgtggccgccaaagggcagctcgggctgcgagacgccgtagtggttgatgccgaccatgccggcctcaatcgcttcgcccagccggtgcgcggtgtgcaggtcgcgcgtgaaggcgtaggcgccgagcgcgtaaggcagcgcgttggcctcttcgatggcggcgtccagcgtgtcgtagggctggatcacagcgatggggccgaagggctcctgctgcatcacgcggctgctggcgggcgcatcggcgaacacggtgggttcgaagaagaagcccgggcgcgccacgcggtggccgccggtgagcagacgtgcgccctggcccacggcgtcgtcgacgaagcgctccatgtcctcgatgcggcgcgcgtgcgagagcggccccatctgcgtggcggcgtccaggccggagcccagcacgagcttctgcgcagcggcggcgaagcgttcgctgaaggtggcgagctgcgcgcgcggcacgtagaagcggatcggcgaggcacagacctggccggcgttgcggtacttggcggtgaccgactgcttgagcacgaagtcgagcccagcgccttcggccatgtcttcgcacacgatcaccggcgcgtggccgccgagctcgccggtgaaacgcttgacatggcgcgcggcctgctcacccagcagcttgcccacggccaccgagccggtgaccgagaccttggcgatctcgggccgctcgatcaggaacgacgacaccagcgccgggtcaccccagacgaggttgatcgcgtcgccgggcacgccggcgtcgaggaaacagcgcaccagcagcatgcagctggccggcgtttcttcggccggtttgatgacgacgctgcagcctgcggccagcgcactgccgagcttgcggctgggcaggttgaccgggaagttccagggcgtgaacgccgccaccggaccgaccggcacgcgggcgacggtgtgcgagaggatgccgtcgacgcgtggtgccacggtgcggccatacagacgtttgccctcttcggcctgcacatcgatgatgtcggccgagagcagcacctctcgcttcgcttcggcgagcggcttgccttgttcgagcgtgagcacggtggcaatctggtccacccgctggcgcagcagctcggccgcgcggcgcaggaccacgtagcggtcgtgcgggcgcacacggcgccattgttcaaagccgcgccgggccgattcggcggccgccgccagctcggtggggccggccagcggcagccgggcgagcacgctctcatcggcggggttgatcacggggcgttcgcccccggaggcttgtgtgagccactggccggccacgtgcagggccagggaagggtaggaagaggtcatgctgcgcactgtgccggtcaccgcctgttgggcgtgatcggaaatgcgcaaacttggcttacgggtttaccccaggttctttgtctcactgtgtgtctcgctcgcggaacctcgcggccaaggcgtgtgcgctcaggccgcaacgcttgagtgaggcggccggcgctgcgcaccgactgccctgcgatgctcgcggtcgtggccccgtcgccaaactcgctccgttcgcttcgctctctctgctcagacatggcgacgaatcagttgatgaagcgcgctgcgcgcgcggccacggccactgcgcttctcggcgcctcacaaggcgcgctgcggcctgagcgcacacgcctaggcaaacaacgtgttggcgcgcaaccggtggaatacccaacgcttcatgctgcggcaggcgctgtgcggtgggggcgatgttccggggtggctgtgtccgcctgtctggggccgggcgcgcaagtgcgcgcctcgtcaactgactcgcggccactgtttgagcgaagagagcgcaagcgaacgcagcgagtttggccgcgccggccccagacaggtggacgcagcgaagtcggcgcagccgaccaccccggatgagcccccaccgcacagcgcctgccgcagcacgcgaggtgcttccccagcgaaaacaacacccacacaccaacaaaaagaacaacccgaacgatcagcccctgctcttccgggcgcgcgccagcgtctccgacggcagctcgaaaaagtgcttcttgtagtccagcgaaaactggcccaggtgccagaagccccagcgcgcggccacgtcctgcaccgtcgcgcccgtcccggcttcgcgcaggccacgccgcacgccgttgagccgcaacgcccgcaaatactgcgtgggcgaggtgcccagcacgtcctgaaaacagtaattgagcttgcgacggctcgcccccacacggctgcacacggccaggatcgaaggcggctcgtcggggttggccatcatcagctcgcaggccttgtccaccatgcgcttgcgccgtgccagcgaattcagatcggagatgtccacactcggcggtaacgcctcgatccattcgatcaggatgtcgtcgcgcagctgattcaggtgcgatgcgtcggtgaaatgctgtgccagcgccagcgcctctttcagtgcttgctggtgcttgctgcgcagtgcggtggcactctcgggcgtgggcagcagatcgacctgatgctccagccaagtggccagcggcttctggtacatgtgctcccagagcccgttgagcaggctgcgctcgaccgtcaaggcgatcaggtgatgctgcggcggcgtgacgaaatcgatctcgcgcccgctgccgcagaggatggcgtccgggtggaccttgcggccatcgaagtacacatccccggtgggcgccaccgacatcgcaaacccgtagacctgctcgcccagccgcccgcgctggcgcagcgcgaggctggtcttctcttcggtcaggcgcaccccgtcgagttccaccagggacagttcgccacgaaagcggccgctggagagctgttcgtaatgcaaggcccagtcgccctgggccctggcgtgggcgtccatgtcgaaggtcagcagggagtgtgcccagccaggcgcttcagcgtcttcttgggcctcgtcaatggggtcgctcatggcgcgcagcgtagcagcaggaaggccgattgggagaaacccgggccacatcgtgcgcagttttgataacccgtttggcagtgcgtccctagcatccgtccaccccctggcgctgcgtgccggtggcacggatcacacagacacaacgacgaggaacagccatgaaaaccgcatctacttcactttcaccgtccgggtcagacccgggcaccgagcagtccctgcgttccggtcggctgggggtgatcggcatcgtcttcttcgtggtcgccgccgcctcaccgctggtgggcatgaccggtgcactgcccgccgccatcctgctgggcaatggcgctgccgcgccgggtgcttacctgctggcgggtctgatcctgctgctgttcagcgtgggctacgccgccatgagccaccaggtgacgaactccggcgcgttcttcgcgtacatcggtcgcggcatgggtttgcacctgggggtgggctctgccttcgtgtccctgctggcctacctggccattcacctgtcgatcttcggcttcttcggcgggctgatggccgagcaggtcggggggctgccctggtggggatggtcactggtggcgtgggccgccgtgacctggctgtcgctgcgcagcgtcgacgtgggtgcgcacgtgctgggtctgttgatggggcttgagctcctgagcctggtggtcacttcggtggcgatcttcgtgcagggtgggccggaggggtggaattttgcggcgtccttcagcccggccaacatcctggcaggtggtcttgcgggttccgccggcatcgccctggcgttcgcgttcgcctctttcgtgggcttcgaagccaccgccatttacggcgaagaatcgatcgaccccaagcgcaccgtgccgctggccacctatgtcgccgtggtgctgatcaccgtgctgttcgccttcacctcgtttgcggtggtgagcggtctcggcgctggcaaggtgatggaccgtgtggtcgagctgtcgtcggtcgacggtgcgcccctggtcaatcccgccaatgtgctgttcacgctggcgggccagtatgtgggtgactggctgtctgcgctgatgaaggccctggtgctctcgagtctgtttgccgccatgctggcgttccagaactccgccgcgcgctacctgtttgccctgggccgcggcggcaccttgcccgccgcactggccaaggtcaaccagcgcggtgcgccgtcggccggatcgatcatcgtctcggtgatcaccgctgctgtgattgcgctctttgcggtggcaggcctggacccgatcctcaacatgttcttctggttctccggtctggcggtggtctcgatcctgctgatcgagatcctggtctgtctggcggtgatcgcctggttccgccgtgtgcccggtgacgcgaacatcttccagtcgctgattgcgccggtgttggccaccgtcggcctgtcggtcgggctctacctcctgctggcgcggtttggcctgttgaccggggcggtcgccgaaggcatggacccgaccacgacctcctgggccatgaacggtctgggctggttcatggcgctgatgccctttggtgtgctcgtgctgggctacttctttgccatcgcacgccacaaggaaaacaaagagctgatccaggacgtgatctcctgaaggcgtccttgtctggacgcattcgctgaagaagttctggcgccgggggcgccagcacttgttttttctggttgactgccttgatggaacactgaaatgaatcaaaccgaactgttggagaagcggcgggccctgctcgggccgaacgtctccactttctacctgcgaccggtgcacatcgtgaagggcgaggacgtgtggctgtgggatgcggaaggtcgtcgttacctcgactgctacaacaacgtgccccacgtcgggcactgcaaccccagggtggtggaggccatctgttcgcaaagcgcgcagctcaacgtgcacagccgctacctgcacgagaacctggtgaactacgccgagaagctgacgtccacctatggcggcgaactcaccaacgccttgctgacctgcaccggctccgaggccaacgacatcgcactgcgcatggcggaagcgatgaccggcaagcggggtgtcattgccaccgacgccacttaccacggcaacaccagcctggtcagccaactgtcgaccggcaatgcgccgaaatacggctacgggctgaaccagtacgtgcgccatgtcgaggcgcccgacagcttgcgcatcgatgaccctcaggggttgcgctttgcggcgaaggtgcaggagcagatcgacgaacacgagcgctcgggcatcggcttcgcggcgctgatcgtgtgcccgttgttcctcaatgaaggcttccccacccaggctcccggctggttgcgcccgacagagcaggtggttcgggaggccggcggcctcctgatctgcgacgaggtgcagtcgggctttgcgcgcagcggcagccatttctgggcgcaccagaagcagggtgtgacgcccgacgtggtcaccatgggcaagccgatgggcaacggctacccggtggcgggtctggtcacgcggccggaggtgatggaccgtttccgcggctcctaccggtacttcaacacctttggcggcaaccccgtggcctgcgccgccgccatggccgtgctggaagagatcgagcagcgcaacctgcaggcgaatgccgccaagatcggtgccctggccgcgcaggcgctgaccgaactgtccagcaagtacggtgtcattggcgacgttcgccagagcggcatggtgttcggcgtcgagttcctcaaggacaagaccacgctggagcccgcctccggtttcgccgaccaggtggtggaggcgatgcgcgagcggggcgtgctgctgtccaagctggggcggcacaagaacaccctcaagatccgcccgccgatgaccttttcggaagaacacctgggcctgctggtgcagacgctggacgaggtgctggccgaactggcgccacagccatgacggacctcgccaaggcggcggccgccgaatggggcctgggtggtgcgcgcctgcggttcatcgccggccgggaaaaccaggtctaccgggtcaccgatgacgccggtgattacgccctgcgcctcaagcgccccggctaccggacccgcatcgaactcgaatccgaattgcagtggatggcggcactggatcgagcggggattctggtgccgagaccggttccttcgatcaaggggcggttgctcgaacaggtggacggccatctggtcgacctgctgacctggctgcccggccagaccctgggcacgctgctgaccgactgctccgacgccgacgcgcaggtgctgttccagcacctgggtcgggacatggcgctgttccatgcggcttccgacgcctgggtcaaaccggccgaattttcgcgcgtcgcctgggacgccggagggctggtgggcgaggcaccactctgggggcgcttctgggcgcatcccgggctgtccgccgaagacaaggccttgtttgaggcgttcagagccgaggcggcgcaagacctgcgccagatggacgccggcctcgaccgcggcctgatccatgccgacctggttcgcgaaaacgtgctgatcagcgatgggcggatgggaatcctggacttcgacgatgggggatggggctatcgggtgttcgatctcgccaccacgctgctcaagtttctggacctgcctcgtttcccccagctgaaagaggcgctgctgcagggctacctgagcgtcaggtccatcgacaccggctcgctcgacctgttcctggccttgcgggccgtgacctacgtcggttggatcgtgccccgtctgggcgaagaaggcgcaggggaacgcagccatcgctacgtggcgaccgcccgccatgtctgccagcggtacctgtcgaacccgccaggccattgagcttctggccggcacacggcccgtgccaccgttgatccagatcagggtcgcgcgcaaaactggagtgcacgctctagaaagcacgcgggaaagcccgctgcccgaacaccggccaggcccggtagattccggcattcacctggagacccgcatgaccaagatttcacccgactacctcgccctgcaacgcctgtaccactgggaaaagaccgccccccaacgcatcgccctgacccagcccatgggcggcggcgccgtgcaagacttcacctgggcccaggtggccgaccagagtcgccgcatggccgcccacctgcaagcgcagggttgggcgcccggttcgaaggtggcgatcctctcgaaaaactgcgcctggtggatgatgagcgacctggccatctggatggcgggttatatctcggtgccgctgtaccccacgctcgcgcccgagaccatcacacagatcctcacgcacagcgaaagcaaggcctgcttcatcggcaagctcgacggctgggcgcacatgaagcctggcgtgcccgcgggcctgccctgcatgagctaccccttgtcgccggacgacgcggtggccgcccacgagggctgggacacgatcatcgcgcgcaccgcgccgctgcagggttcgcccgtgcgggccgaggacgagctcgccacgctgatctacacctcgggcacgaccggcatgcccaagggcgtgatgcactccttcggcaacttcgcgtgggcgctggaccggggcatccagcgcatcccgctcagcggcgatgaccgcatgctgtcctacctgccgctggcccatgtggtcgaacgcatgctggtggaacacggctggctgcgcacggccatgcacgtctttttcgccgagtcgctcgacacctttgccgccgacctgcagcgagcgcgccccacggtgttcttctcggtgccacggctctgggtcaagttccagcagggcatccaccacaagatgccgccggccaagctcaagcggctgctgggcatcccgctgatcggcggcctcgtgcggcgcaaggtgaagaaggcgctgggcctggacctgtgcacgttcgcggctggcggcgcggcgcccatgccgcacgcgctgctgagctggtacagccagctgggcctgagcatcaacgagggctacggcatgaccgagaacctcgcgctctcgcacatcaccgtgcaaggccagaaccagcaaggcacggtggggccggcctacccgggcgtggagcagcgcatcgaccccgagaccggtgagatccagatgcgcagccaggcgctgatgatgggttactacaaagaacccgaaaagaccgccgaggtgttcacccccgacggctggctcaagaccggcgacaagggcgccatcgacgcgcagggcctgctgcgcatcaccggccgggtgaaggacctgttcaagaccggcaagggcaagtacgtggcgccctcgcccatcgaagacaagctggtcatgcacgaagcggtggaggcctgcgtggtcaccggcgccaacctgggccagccgctgggcatcgtgatgctcaacgccgacttcgctgccaaggccaaagacacggcaggccgtgccgagctcgaagcctcgctcgcccaacacgtgaaggccatcaacgcgacgctggacccgcacgagcggctgcagtgcgtggtggtgaccaccaccgcctggaccgtggacaacgacgtgatcacgcccaccttcaaggtcaagcgcaaccgcatcgaagacctgtacgcccggcactacgaggcctgggaggccagcggcaagaccgtcatctttgaaaagggctgatcgactgagcggctgagcgccgcattgttttttgcgcggaagggaataaaagggcttgtggcggtgtttaccgcaggcaagccctttttttcttccctctttcaggagccttccatgacaccccgcaccaccgccctcgtccttgccctcagtgccgccctcatcggcggatgtgccagcggtggtggcggcatggccgccccggccggcgtcaagatgagcgacggcgtgctcgccggccccaacggcatgacgctctacaccttcgacaaagacaccgccggcagcggcaagagcacctgcaacggcccttgcgccaccaactggcccccgctgatggccggcggcgctgcggcggccggcgactacagcgtggtcacgcgcgacgacggcacccagcagctggcctacaagggcaagcccttgtaccactgggtcaaagacgccaagcccggcgacaagaccggcgacggcgtcaacaacgtctggcgtctggccaagccctgacccctcgatcttgggccccgaagacacgctgccccacatcccccgtctgcgccgctacgcccggctgctcacgggggacgccagccgcgccgacgacctggtgcaggacacactggagcgcgcgtgccacaagtgggccttgtggcggctgcgtgccgacggctcgggcctgcgcgcctggctgctgtccttgatgcacaacctgtacctcaaccaggtgcgcgaccaggtgcacgagcgccaatcggtggcgctcgacgagggcaacgagcccagccacgacccctttgcccgcacccctgagcgcctggacctggaacaggcattggcggcgctcagcccggtgctgcgggagacggtgctgctggtctgcgtggaagaactgggctacgccgaggcggcgcaggtgctgggcgtgccagtgggcacggtcatgtcccgcctctctcgcggacgcgaacagttgcgcggcctgaccagtggtgaacccaccgcccagacgccggcgccccgtttgaaaatcgtctcctgacccacctgccatgaacaccgaagccaccgccaccgtcagcgaagccgagctgcacgcctgggtcgacgggcagctgtcccccgagcgcgccgacgcggtcgccgaatggttgctggcgcaccccgagcacgctcgccgcacgcaggcctggcaagcgcagcgcctgggcctgcaggccctgcagcgggacgtgctcgacgcccctgtgccgctggcgctggcgcgcgccgcccgcccgaaacgctggggaagcgccgcgcaggcgctggccgccagcgtgttgctggccctggggtttgcgggcggttcatggtgggggtcgctggaccgctcgccggtgccgatggcgcaggcactgcccgggtttgtgcaggaggctcgggtggcccatgtcgtctacctgccggagaaacgccatccggtggaggttggtgccaatgaacaggtccatctggtgcagtggctctccaagcgcctgggcgccccgctgaaggccccgctgctgcaagaccagggctactcgctggtcggcgggcggctgctgcccggccagaacggcgaggcgcgggccctgttcatgtacgaaaacggcgccggtgaacgggtcacgctgcatgtgtcagcgctggggggctccaccgcacccgaagccgccgccttccgcttcacccgctcgggtgacaccgaaaccttctactggatcgaagaccggctgggctacgcgctcagcggcaacctgccgcgagagaccctggcccggcttgccgacgcgagccaccggcaactgcgcccctgatcaccgcaccgctcaggcttgaagggcctgggcatggtgacgcaggtggtcttcgacaaagctgctgatgaagtagtagccatggtcgtagccggcgtggcgccgcagcgtcagcggctggccgacctgcgcgcaggcggcttcaaaggcttcggggtacagctgctcggcgaggaatttgtcggccaggccctggtcgatcaggatgccgccggggtacggcgccgccttctgcgcgcccatcaacaggctcgcatcgtgttcgacccaggtgctttcgtcttgcccgagatagccggtgaaagccttgtggccccacgggcactttgtgggtgcacagatcggcgcgaatgccgacaggctctggaacacacccgggtggcgcagcgccagcgtgagcgcaccgtggccgcccatggagtggccgaacagacccatgcgcccgctgttcagcttgaactctgccgtcacggctggcagcagctccttgagcaaatagctctccatgcaccagtggcccgaccagggcgactgcgtggcgtccaggtagaaaccggcgcccaccccgaagtcccagtggtggtcttcgctgtccacgcccgtgttgcgcgggctggtgtcgggcatcagcaaggccagcccaagctgcgccgccacacgctgcgcgccggccttcatggtgaaggtctcttcggtgcaggtgaggcccgcgaggaaggtgagcagcggcacggtttgcccggcgagcgcctgcggcggcaggaacagcgcaaagcgcatgggcaggccgatctcgctcgacgcgtgtttgtagaagcgctgcacgccgccgaagctgccgtgttcgctgagcagttcaaggcggtcgaaggccatggtcagaactcgaccaccgagcggatcgactcaccgctcttcatcagatcaaagcctttgttgatgtcttccaatttgagcttgtgcgtgatcaggtcgtcgatgttgatcttgccttccatgtaccagtccacgatcttcggcacgtcggtgcggccgcgggcgccgccaaaggccgagccttcccatttgcgaccggtcacaagctggaacgggcgcgtgctgatctcggcgccggcctcggccacgccgatgatgatgctgcggccccagcccttgtgcgtgcactccagcgcgtcgcgcatcaccttggtgttgccgatgcactcgaagctgtagtcggcaccgccgtcggtgagttgcacgatggcatcgaccacgttggcgtggtccttggggttgatgaagtgcgtcatgccgaacttgcgcgccatggcttcgcgcgccgggttcaggtcgacgccgatgatcttgtcggcacccaccatcttggcgccctggatcacgttgaggccgatgccgccgaggccaaacaccaccacgttggcgcccgcctccaccttggcggtgaagatcacggcgccaatgccggtggtgacgccgcagccgatgtagcagaccttgtcgaacggcgcgtcttcacggatcttggccagcgagatctcggcggcgaccgtgtagttgctgaaggtgctggtgcccatgtagtgaaagaggggctggccgtccatgctgaagcggctggtggcgtcgggcatcaggcccttgccctgggtgcctcggatcagttggcacaggttggtcttgcggctcaggcagaacttgcactggcggcattcgggcgtgtagagcgggatgacgtggtcgcccttcttgagcgaggtcacgccggggcccacgtccaccacgatgcccgcgccttcatggccgaggatggccgggaagatgccttccgggtcggcgcccgagagggtgtagtagtcggtgtggcagataccggtggccttgatctcgaccagcacttcgccgaacttcggaccttcaagatccacggtttcgatggtcaggggctggcctgctttccaggcgacggcggctttggttttcatggtgttgggctcggtgttgtgacggcggcaccgaggttaacgcagatcaaacacgcccgccgggccgggccttcactcggtttttccgccggccaggaaccactgcgcaaacagggcacgctctgcgtcggtcaggccggtggcgttgttcaggggcatggccttcataagcaccacctgctggtagatcatctgcgcgtgctgttggaccgcggcgggctggtccagccgcacccctttggactgcagggcctcgccgtggcacatcacacagcgctgctcgatcaccggcttgagctgtgcatagctcaccgtctcaggcatggccacattcgccaccggcgcgggcctgagccagacgatgagcgcgagcaacaccaccacgcccacggcggcgtaaggccaggggtgggcgttgcggccgagcttgaaaccatggcgcatgacgaagaactggcggatggcggcgccggcgaacatcatgctgatgaggatcagccagttctgcgggtgggtgtaggtgaagctgtagtggttgctcaacatggcgaagagcaccggcagcgtgaagtaggtgttgtgcacgctgcgctgcttgccgcgtttgccgtggatcggatcgatcgggcgcccggcctggatgtcggctaccacggtgcgctgcccggggatgatccagaagaacacgttggcgctcatggtcgtggcgagcatggcccccacgatcaggaaggcggcgcgcccggcgaacatctgcgtggccgcgtaggccgcaatgcacaccagcaccagcaccagcgcaccgaccttggcgtcgccgtttttgctttggcccagcgtgcggcagatcgcgtcgtagagcagccagaacaccaccagaaacgccagcgcggcggcaatggcgccggcgggtgaccattccatgatgcgcgggtcgatcaggtagacgctggggctccagaggtaggagatgaggaacagcgcgaagcccgagagccaggtggaatagctctcccagtagaaccagtgcaggtgctggggcagcttgggcggtgcgcccgagaacttgaccgggtggtagaagccgccaccgtgcagggcccagagttcaccgctgacgccgtcttttttgagctgttcgtcttcgggcggcgtgaggctgctgtcgagaaagacgaagtagaaggaagagccgatccaggcgatggcgacgatcacgtgcagccagcgcaccagcaggttggcccaatcgagcaggtaggtttccatggcacctcaacatgacggaactgccgtcagggtttgcaactcaccaccgcgggcgctctgagttcactgagggccgcgatggcgtgctttccaccagaaagacaccccagctccgctgcgacctgagctcaaagtgtatacactttttgaagacagaacagcccgtgaaatccccacccccgcgacgggctcaggccggggcggcggtgtcacgaactagcaacaactgcgccacgaccgccgcggcgatgacggccggggctttgtccacaatgcccggcagcccgatggggcaggtgatgcggtccagctcgcccgcggtgaagccgcgctccgacagccgccttcgaaacgtcgcccatttggtgcggctgccaatcaggcccacgaacggcaggtcgtcctgcgcgcgctggcgctgcaggcaggccgccacgatgtccaggtcttcggcgtgggagaagctcatgatcagcaccatcgagccgcccgggagctcgcgcaccgccgcctgcaccggatcggagtgttcgacctgaacacccatgggcggcggctccggaaacacgccgtcgcggctgtcgatccagtgcacggcaaacggcaaaggcgccagcgcctgcacaatcgcccgccccacgtgccccccgccaaacaacgccagcggggtcagtgtcggcgccagccgcttccgcagcgcatcggcctgcgtgggccccaccggctcgaaacgcagccgcagcgcgccgccgcagcattgccccaggctggggccgagcgtgac

SEQ ID NO: 11 - DNA, 31610 bp, Artificial Sequence
  Synthetic Oligonucleotide
  misc_feature (1)..(5376): n is a, c, g, or t
nnnnnnnnnnnnnnnnnnnnnnnnnnnnnnnnnnnnnnnnnnnnnnnnnnnnnnnnnnnnnnnnnnnnnnnnnnnnnnnnnnnnnnnnnnnnnnnnnnnnnnnnnnnnnnnnnnnnnnnnnnnnnnnnnnnnnnnnnnnnnnnnnnnnnnnnnnnnnnnnnnnnnnnnnnnnnnnnnnnnnnnnnnnnnnnnnnnnnnnnnnnnnnnnnnnnnnnnnnnnnnnnnnnnnnnnnnnnnnnnnnnnnnnnnnnnnnnnnnnnnnnnnnnnnnnnnnnnnnnnnnnnnnnnnnnnnnnnnnnnnnnnnnnnnnnnnnnnnnnnnnnnnnnnnnnnnnnnnnnnnnnnnnnnnnnnnnnnnnnnnnnnnnnnnnnnnnnnnnnnnnnnnnnnnnnnnnnnnnnnnnnnnnnnnnnnnnnnnnnnnnnnnnnnnnnnnnnnnnnnnnnnnnnnnnnnnnnnnnnnnnnnnnnnnnnnnnnnnnnnnnnnnnnnnnnnnnnnnnnnnnnnnnnnnnnnnnnnnnnnnnnnnnnnnnnnnnnnnnnnnnnnnnnnnnnnnnnnnnnnnnnnnnnnnnnnnnnnnnnnnnnnnnnnnnnnnnnnnnnnnnnnnnnnnnnnnnnnnnnnnnnnnnnnnnnnnnnnnnnnnnnnnnnnnnnnnnnnnnnnnnnnnnnnnnnnnnnnnnnnnnnnnnnnnnnnnnnnnnnnnnnnnnnnnnnnnnnnnnnnnnnnnnnnnnnnnnnnnnnnnnnnnnnnnnnnnnnnnnnnnnnnnnnnnnnnnnnnnnnnnnnnnnnnnnnnnnnnnnnnnnnnnnnnnnnnnnnnnnnnnnnnnnnnnnnnnnnnnnnnnnnnnnnnnnnnnnnnnnnnnnnnnnnnnnnnnnnnnnnnnnnnnnnnnnnnnnnnnnnnnnnnnnnnnnnnnnnnnnnnnnnnnnnnnnnnnnnnnnnnnnnnnnnnnnnnnnnnnnnnnnnnnnnnnnnnnnnnnnnnnnnnnnnnnnnnnnnnnnnnnnnnnnnnnnnnnnnnnnnnnnnnnnnnnnnnnnnnnnnnnnnnnnnnnnnnnnnnnnnnnnnnnnnnnnnnnnnnnnnnnnnnnnnnnnnnnnnnnnnnnnnnnnnnnnnnnnnnnnnnnnnnnnnnnnnnnnnnnnnnnnnnnnnnnnnnnnnnnnnnnnnnnnnnnnnnnnnnnnnnnnnnnnnnnnnnnnnnnnnnnnnnnnnnnnnnnnnnnnnnnnnnnnnnnnnnnnnnnnnnnnnnnnnnnnnnnnnnnnnnnnnnnnnnnnnnnnnnnnnnnnnnnnnnnnnnnnnnnnnnnnnnnnnnnnnnnnnnnnnnnnnnnnnnnnnnnnnnnnnnnnnnnnnnnnnnnnnnnnnnnnnnnnnnnnnnnnnnnnnnnnnnnnnnnnnnnnnnnnnnnnnnnnnnnnnnnnnnnnnnnnnnnnnnnnnnnnnnnnnnnnnnnnnnnnnnnnnnnnnnnnnnnnnnnnnnnnnnnnnnnnnnnnnnnnnnnnnnnnnnnnnnnnnnnnnnnnnnnnnnnnnnnnnnnnnnnnnnnnnnnnnnnnnnnnnnnnnnnnnnnnnnnnnnnnnnnnnnnnnnnnnnnnnnnnnnnnnnnnnnnnnnnnnnnnnnnnnnnnnnnnnnnnnnnnnnnnnnnnnnnnnnnnnnnnnnnnnnnnnnnnnnnnnnnnnnnnnnnnnnnnnnnnnnnnnnnnnnnnnnnnnnnnnnnnnnnnnnnnnnnnnnnnnnnnnnnnnnnnnnnnnnnnnnnnnnnnnnnnnnnnnnnnnnnnnnnnnnnnnnnnnnnnnnnnnnnnnnnnnnnnnnnnnnnnnnnnnnnnnnnnnnnnnnnnnnnnnnnnnnnnnnnnnnnnnnnnnnnnnnnnnnnnnnnnnnnnnnnnnnnnnnnnnnnnnnnnnnnnnnnnnnnnnnnnnnnnnnnnnnnnnnnnnnnnnnnnnnnnnnnnnnnnnnnnnnnnnnnnnnnnnnnnnnnnnnnnnnnnnnnnnnnnnnnnnnnnnnnnnnnnnnnnnnnnnnnnnnnnnnnnnnnnnnnnnnnnnnnnnnnnnnnnnnnnnnnnnnnnnnnnnnnnnnnnnnnnnnnnnnnnnnnnnnnnnnnnnnnnnnnnnnnnnnnnnnnnnnnnnnnnnnnnnnnnnnnnnnnnnnnnnnnnnnnnnnnnnnnnnnnnnnnnnnnnnnnnnnnnnnnnnnnnnnnnnnnnnnnnnnnnnnnnnnnnnnnnnnnnnnnnnnnnnnnnnnnnnnnnnnnnnnnnnnnnnnnnnnnnnnnnnnnnnnnnnnnnnnnnnnnnnnnnnnnnnnnnnnnnnnnnnnnnnnnnnnnnnnnnnnnnnnnnnnnnnnnnnnnnnnnnnnnnnnnnnnnnnnnnnnnnnnnnnnnnnnnnnnnnnnnnnnnnnnnnnnnnnnnnnnnnnnnnnnnnnnnnnnnnnnnnnnnnnnnnnnnnnnnnnnnnnnnnnnnnnnnnnnnnnnnnnnnnnnnnnnnnnnnnnnnnnnnnnnnnnnnnnnnnnnnnnnnnnnnnnnnnnnnnnnnnnnnnnnnnnnnnnnnnnnnnnnnnnnnnnnnnnnnnnnnnnnnnnnnnnnnnnnnnnnnnnnnnnnnnnnnnnnnnnnnnnnnnnnnnnnnnnnnnnnnnnnnnnnnnnnnnnnnnnnnnnnnnnnnnnnnnnnnnnnnnnnnnnnnnnnnnnnnnnnnnnnnnnnnnnnnnnnnnnnnnnnnnnnnnnnnnnnnnnnnnnnnnnnnnnnnnnnnnnnnnnnnnnnnnnnnnnnnnnnnnnnnnnnnnnnnnnnnnnnnnnnnnnnnnnnnnnnnnnnnnnnnnnnnnnnnnnnnnnnnnnnnnnnnnnnnnnnnnnnnnnnnnnnnnnnnnnnnnnnnnnnnnnnnnnnnnnnnnnnnnnnnnnnnnnnnnnnnnnnnnnnnnnnnnnnnnnnnnnnnnnnnnnnnnnnnnnnnnnnnnnnnnnnnnnnnnnnnnnnnnnnnnnnnnnnnnnnnnnnnnnnnnnnnnnnnnnnnnnnnnnnnnnnnnnnnnnnnnnnnnnnnnnnnnnnnnnnnnnnnnnnnnnnnnnnnnnnnnnnnnnnnnnnnnnnnnnnnnnnnnnnnnnnnnnnnnnnnnnnnnnnnnnnnnnnnnnnnnnnnnnnnnnnnnnnnnnnnnnnnnnnnnnnnnnnnnnnnnnnnnnnnnnnnnnnnnnnnnnnnnnnnnnnnnnnnnnnnnnnnnnnnnnnnnnnnnnnnnnnnnnnnnnnnnnnnnnnnnnnnnnnnnnnnnnnnnnnnnnnnnnnnnnnnnnnnnnnnnnnnnnnnnnnnnnnnnnnnnnnnnnnnnnnnnnnnnnnnnnnnnnnnnnnnnnnnnnnnnnnnnnnnnnnnnnnnnnnnnnnnnnnnnnnnnnnnnnnnnnnnnnnnnnnnnnnnnnnnnnnnnnnnnnnnnnnnnnnnnnnnnnnnnnnnnnnnnnnnnnnnnnnnnnnnnnnnnnnnnnnnnnnnnnnnnnnnnnnnnnnnnnnnnnnnnnnnnnnnnnnnnnnnnnnnnnnnnnnnnnnnnnnnnnnnnnnnnnnnnnnnnnnnnnnnnnnnnnnnnnnnnnnnnnnnnnnnnnnnnnnnnnnnnnnnnnnnnnnnnnnnnnnnnnnnnnnnnnnnnnnnnnnnnnnnnnnnnnnnnnnnnnnnnnnnnnnnnnnnnnnnnnnnnnnnnnnnnnnnnnnnnnnnnnnnnnnnnnnnnnnnnnnnnnnnnnnnnnnnnnnnnnnnnnnnnnnnnnnnnnnnnnnnnnnnnnnnnnnnnnnnnnnnnnnnnnnnnnnnnnnnnnnnnnnnnnnnnnnnnnnnnnnnnnnnnnnnnnnnnnnnnnnnnnnnnnnnnnnnnnnnnnnnnnnnnnnnnnnnnnnnnnnnnnnnnnnnnnnnnnnnnnnnnnnnnnnnnnnnnnnnnnnnnnnnnnnnnnnnnnnnnnnnnnnnnnnnnnnnnnnnnnnnnnnnnnnnnnnnnnnnnnnnnnnnnnnnnnnnnnnnnnnnnnnnnnnnnnnnnnnnnnnnnnnnnnnnnnnnnnnnnnnnnnnnnnnnnnnnnnnnnnnnnnnnnnnnnnnnnnnnnnnnnnnnnnnnnnnnnnnnnnnnnnnnnnnnnnnnnnnnnnnnnnnnnnnnnnnnnnnnnnnnnnnnnnnnnnnnnnnnnnnnnnnnnnnnnnnnnnnnnnnnnnnnnnnnnnnnnnnnnnnnnnnnnnnnnnnnnnnnnnnnnnnnnnnnnnnnnnnnnnnnnnnnnnnnnnnnnnnnnnnnnnnnnnnnnnnnnnnnnnnnnnnnnnnnnnnnnnnnnnnnnnnnnnnnnnnnnnnnnnnnnnnnnnnnnnnnnnnnnnnnnnnnnnnnnnnnnnnnnnnnnnnnnnnnnnnnnnnnnnnnnnnnnnnnnnnnnnnnnnnnnnnnnnnnnnnnnnnnnnnnnnnnnnnnnnnnnnnnnnnnnnnnnnnnnnnnnnnnnnnnnnnnnnnnnnnnnnnnnnnnnnnnnnnnnnnnnnnnnnnnnnnnnnnnnnnnnnnnnnnnnnnnnnnnnnnnnnnnnnnnnnnnnnnnnnnnnnnnnnnnnnnnnnnnnnnnnnnnnnnnnnnnnnnnnnnnnnnnnnnnnnnnnnnnnnnnnnnnnnnnnnnnnnnnnnnnnnnnnnnnnnnnnnnnnnnnnnnnnnnnnnnnnnnnnnnnnnnnnnnnnnnnnnnnnnnnnnnnnnnnnnnnnnnnnnnnnnnnnnnnnnnnnnnnnnnnnnnnnnnnnnnnnnnnnnnnnnnnnnnnnnnnnnnnnnnnnnnnnnnnnnnnnnnnnnnnnnnnnnnnnnnnnnnnnnnnnnnnnnnnnnnnnnnnnnnnnnnnnnnnnnnnnnnnnnnnnnnnnnnnnnnnnnnnnnnnnnnnnnnnnnnnnnnnnnnnnnnnnnnnnnnnnnnnnnnnnnnnnnnnnnnnnnnnnnnnnnnnnnnnnnnnnnnnnnnnnnnnnnnnnnnnnnnnnnnnnnnnnnnnnnnnnnnnnnnnnnnnnnnnnnnnnnnnnnnnnnnnnnnnnnnnnnnnnnnnnnnnnnnnnnnnnnnnnnnnnnnnnnnnnnnnnnnnnnnnnnnnnnnnnnnnnnnnnnnnnnnnnnnnnnnnnnnnnnnnnnnnnnnnnnnnnnnnnnnnnnnnnnnnnnnnnnnnnnnnnnnnnnnnnnnnnnnnnnnnnnnnnnnnnnnnnnnnnnnnnnnnnnnnnnnnnnnnnnnnnnnnnnnnnnnnnnnnnnnnnnnnnnnnnnnnnnnnnnnnnnnnnnnnnnnnnnnnnnnnnnnnnnnnnnnnnnnnnnnnnnnnnnnnnnnnnnnnnnnnnnnnnnnnnnnnnnnnnnnnnnnnnnnnnnnnnnnnnnnnnnnnnnnnnnnnnnnnnnnnnnnnnnnnnnnnnnnnnnngagagcctgaagccgctcgaccatgtcgccggcccggcgcgcgtgattgccgccgcccgactcggccgcacgcgcctgatcgacaatctggccgtttgaacggatttcggtcttccgtcctgggcagaccaaaccacctcaccctgaggaggttgcgcagtggccatctcgatcatgaggttggtgtttgtaaacgcgacactggtcgagcacgccatgacggtggagaaggcaggcaccgcgccatcggcctttgcgaagggcgcgcaaacgctggctgcaattcagacgtccgtcgctcgcttcatggcgggagcctagtctagaggccgccaaaagggccaaggcgaccctgctaatcgccaagctggaccggctcgcccgcaacgtggccttcgtcgcccaatcgattgcgagatattcacgcactcaacctccgccctcaagcagagcgaatatgggcagactttgctgaccctccatggttgtacttggtcaagattgagctatggtagtctgccctcggatggggagcgccgtgacggtggatcgaggccggcaaatcaagctgctgaacatgacggagagcgcgcacgacggggagtccctgaatgcgatccgggcgtccaacgcactcatgcggcagtcgaaggtgacatggaccgacttgatcgcggttgccccggcccggaggctcgccccggaaccaccgcctccgcggcccagcaaagctgccggctgatcgggaacacgcaaattagtagatggggtactgcatgcgccgcttccgggtaactgcccacatgaattcccccatcatcttcgggggcggttacgctactcttgacgggctacttggagccctgctttttgatcaactggacgatgtggatgcagcccatgcggcgatcccgctggccaacaccgacggccttttccatgcctcggcggcgttctacgaacccgtcgaggtcggcaagacgaccttcgttgccagcttgcgggcgcaacacgatctggatgccgacctgctcaggaaaaacaagacgggcaccgcgacgcatcgggccatcagcacgaagcgcgagcgcgacttcggcaatgtgttcaatacttatcgccgggtcaccacgccgaagatcgactggtatgccgagggcgaccaagccgccgtgctgcgcctactccaggacgcgcgcttcatcggcaagcgtcgggccagcggatttggcgaagtcgagaggtggaccatcgaagaggacgaactcgacggcattaccggccacctagatgagcccctgcggcccgtgccggtggagctattcaaaggcgaccagagcgcgatcaaggcggacgcggcctggcgacccgcgtactggaaccctgcacatcgggcgatctgtttcgtgccgggagacggccaatgaacgtctacgagttctttaacgcgggattgggacgtcacctcgtcgcccagaacggcgcgcctcatcgggcggctcagctcgcgctgtcgagcacacacaagctcgccaacggaggcgagaaccgcattacctcaggctgggcgattgtgcggccggatggtgcagtgatccagcagaagctggccgcgaccggcatcacatacgacgaccgcacgcgcatagaggcttttctcgacgagctgaaacgatgggacggcacgccgcggctgttcctcatgttcgacaagaagccaatccccatcgcgaaccttttcctgacagccgatctgagggcggtccggatttgttcgcccaaaggcgtcgagacattcaactttactgcaccgccgggccccgaggccggcgggatgcagaaggccattcacaggaggaaggcagatgcttgaccacgtcataccgaagcccgcccgcgttgccggctacatgctgcaccaactggcggaagccatgaccgacggtgcacggcccctgttcgtggaccgaggcgaccatctcgtcgtgcgtaccgacaaggcgatcacgccaaatccgacccccacgcgcgcagcgcaaaatggagaagtcatcgccttcgaactgcgtgcctgcgtggccaagaagaacaaggggcaccccatctattttcccctcggggattggcgcgcgcgtcacgaatggctcaatcgcaaggcaggacaaagcggcttcgaggtcctggcgcttcgctcaaccaccgcgatggcgaagatcgccaaggcaggccgcacttttaccatcgatcagacagacttcgtcggggtcctgcgcgtcaacgacgtggcgctgttcgagatcgcgatgaccaagggtgtcgggtcggtaggccgcgccttcggttttggcatgctccacatcaactagaggtgcgtcatgacgacaacgatcatcaacgcgacgatccacaccgtcggtcccttttcgattgcgatgcccgtcgcggaaggcggcaccgccaatgcctacaagaacttcccggtgatgacacggggggtggacgaggatggcaacaagaagctgaccggctacctgccagcaaccacccttcgtggcttcctgcgccgtgccgttgtcctgcgcgacatgaagaaggcggcggcggccagcctgccctacacgttacagcgcgcctataccgaactgatcgggcaggacgccgaaagcgagagggcggaagacgataggatcaacctcgttgaattgcgcaagacgagagaggcttctccggttctcgatcttttcggtagcggattgggcatcaagtcgcgcctgatggtctcgcacttcctgccgatgtccaatgtcttgcctgatgcgttcacgggcgtacgcaaggacttggaagataccgagggcgttctggatatggtcaaggcggacgaagtcgaggcgtacctcggacggtcggaggcgaacagccggcgcgctgccgccgagggcctgctgtcgcaaatgaagcgtaagctgaacgcaaccaaaaggaagggcgagcctaccgccgatctggaagcccaggtttccgtgcttgagacgaaagtcgagggcctgaaggctgagatgggcgatatgcggaacagttcgcgtaggccggttggccactttgcactgcctgccgggatcgatctcaagggacgattggtgatcaatagctcgaaggacatcgaccttgaaatgatcgagcacgccttgaacgaactctccttgaagccggtgttgggcgcgcaatcagcgcgcggttgtggagagataagcggcacgttcgacgtcgtggtggaaggcgtcttgaagaagaggcttgcaatcggcggctacgaacctgcccggagtatcgatttttcctcaacgccagaaggagaaaaggctgcttgatcagggagttcggtcaacatcaggtgaagccaccccggaattgggtggctactgaaacttctggaaggcgatcgagacgttgtcgaccggtgaagccaccccggaattgggtggctactgaaacctcgactactctgtccatgagttcgagtggggtgaagccaccccggaattgggtggctactgaaacaggaactgtgccggcgtgaccgtcacgcggggtgaagccaccccggaattgggtggctactgaaacagtagcgggccaggtgtctcgcagtcagcgggtgaagccaccccggaattgggtggctactgaaaccgtgacaggctgaattctcgcgcgctaggaggtgaagccaccccggaattgggtggctactgaaacctcgactactctgtccatgagttcgagtggggtgaagccaccccggaattgggtggctactgaaacaggaactgtgtctcacccatgctcccgtctggtgaagccaccccggaattgggtggctactgaaacctcgatgccgattacgaggccaagcgcgctggtgaagccaccccggaattgggtggctactgaaacccgccgccgcgctgcgatgattgccccgagggtgaagccaccccggaattgggtggctactgaaacagcatcatgcgttccccatggtcttgatgtggtgaagccaccccggaattgggtggctactgaaacttcgttgttagagagggaagaaccgggcgaggtgaagccaccccggaattgggtggctactgaaaccacgccaagatcgccatggagtcgatcgccggtgaagccaccccggaattgggtggctactgaaacagcacgcgctcgacgcggtcgtaatcggccggtaaagccacccccaaattgggtggctactgaaactcgggtgttcggaaaggatggcgtcgatcatggtgaagccacccccaaattgggtggctactgaaacatcaagtcttgcgcgaggcgcttgtgaaggtgaagccacctccgaattgggtggttactgaaacggcgcttgcgagtgatcccgcggcaccaggggtgaagccacccccaaactgggtggctactgaaacatcacgaggttgttttcgagttgcgccagaggtgaagccacccctcaattgggtggcaaatgaaacgacagatcgcaaagcatgtcgcgcgctctggtgaagccacccctgttttgggtggttactggaaggacgtctgatgttccgatcatccgaacagcaaaacttcgccgcgatggtcgccgcccacatctccaaggccgacggcccgttgctgctcgaaggtggcaccggcatcgggaagacgcgcgcctatctgtcggcgctcatcggctccggcaaacgggtcgcgattgtgttgccgacccaccagctcatcgagcagctgcttgcttccaccgatctcgcagaggccaatgccagaggcatcaccgtcgccgcttttcgaccggcgtcgaagttcgataccagggccgactacttggcgaaccgtgaagtcgcggccagtgcgcaactcatgttgtgcactgccgccagtgtcatcatcgaccgccgtctggacggcaaatacaacggcgcgaccgaacgggattatcttctcttcgatgaggctgaccagttgccggcgatggccgctcttcagtccgacatggaggttaccggcgaggccctcaagacgctggggatcgaaggcgaaacgacccgtaatctggccgacgccgtcgtcgcgtccaagaaggccgagccggaacagcgcgccgccgccaagatgatcctcgaagtcctgggcgagcccgcgtggtttcatgtggcaggcaaggccgacgatggtggcatccgcctctggcatcggctaccggggcggctactgcgcgagatcgccaaccaaccaaacgtcgcctttgtcagcgccaccctgactgtcggaggtctgtttaacgacttcaagtgtgcgctcggcatccagagtgaaagcgagctgtcgggtgtcgtcgaacctgagcgacacggcacggtcgagttccggaccgttgtgtcgcaagccgtggacgccgacggctggctcgaaaaggtggcggcgaccgtcaggcaggcagaggctcccgtgctggtcgtaacgccctcgttcgaccgtgctgagaagattggcgcgctggtggaaggcgcgacggtgcggcagcgcgaggaagccgttggcgacgccatggctcgaatgggcggctcccgaaccctgattggggcagccgcctgggccggcctcgacacgcccatccagtggcggtcaattgtcgtgcctgttgtgcctttcgagcgcctgacggagatcgaagggcaagtcgagagccactacatcgatgcgcgcaacacggccgtgcgacgcctgcgccaggtgatcggtcggggactgcggtcgcccgatgcccgctgcaccgtctacttcctcgatcctcgtgtcttgaagctaccggccttctggcccagccggttttcctcggcctgggtggcccgccctcgcgatccgggtgtcctcgaaggggcgcgaggcgaggtggtcctgtccaaagccgagcgcgacacgtctcttagaaagcgcgcccttgcccactacggtctgcattgtcgggcgtgtggtctggtacccaaggtcgccgcccagatcgaggtacatcacctcgaccccatctcggaaggcatccggcgcacgacgttagcggacctgtgccccctttgtcggaactgtcactcacttgcccactccacgagcccgcctatgccggtcgaggaggttgcgaagatcgtgggggcctagggtccgaatgcaattggacgtaacgcgttgccttcaagcttcggcaatccggcaggcagcactagtctaggccgcctgttcgagcgtcgaggcgacgtcgcgcgtggtcacgcggcgcaggtcgcgcaccttggtcgtgtcgaacggccgcgcacgatgcatggtgcagcgattgtcccagatcacgaggtcgcccttcgcccagcgatggacatgcacgaagcgcggctgggtcgcgtgctcgatcaggtcgaggatgatcaggcgcccgtcggccaccggcaggcccaggatgtgcgaggcgtgcgcggcgagatagagcgtcctgcgatgcgagccgggatgggttcgcaccacccgctgcggcaccggcggcagcgaggcgcgttcctcgtcggtgtactgcacgacgcccagctgctcgcgcgaccgccagatcgaatgttcggcgaccagcccttccagctccttcttcttcgtctccggcagcgcgtcgtacgccgcgcgcaagtcggcgaactcggtgtcgccgccttcctcgggaatgacgtgcgcgtagagcatcgagagaccgccgggcacggcgcggaacgaggcgtcggtgtgccagagccggttggccaggccgtcgagccggcgccgcgcgtcgggcttcatgacgttgccgtcgccgtcgaggttggagatgtcggcgacctggctcgatgcgatccggtgcttgatgtcgcgatgccgaagcttcagcgccgacgattcgatcgggccgaaattgctggcgaaggcgacctgccgctcgtcgtcgagcgtctgcccgcggaacaccacgaccgcgtagcggttgatggcgtcctcgatggcctgccggtcggtgggcttgagcggtcgtgccacgtcgacaccggcaatctcggccacgaattcaggatgagttggcgtaacggtgatgctcacgactgcctcccgcggctatagtgcatttgcaatcattctctcccaggaaacgccatgccgcaaaccatgaagctcgctttgctcgacgattaccagaaggttgccctgcgcatggccgactgggaccgcctcaggaagcgcggcgtcgagatcacggtgttccacgagcccttcgcctcggtcgaggatgcggcgcagaagctggcgccgttcgacatgctgggattgctgcgggagcgcacggcgttcccgcgcgccctgatagagaagctgcccaacctcaagttcatggtgctgaccggcgcccgtgccgccagcctcgacgacaaggccgcggccgagcgcggtatcccgatctcgacgacgcccggcggcacctcgaacgcgccgacggcggaactcggctgggcgctgctgatgatgtgcgcccgcgatctcgccaaggccgagcggctggcgcgccagggcaagtggcatgacggcatcgagcagatggtcgtgctcgagggcaagcggctgggcattctcggtctcggcaagctgggcagccgcgcggcccactacgccaaggccttcggcatggaggtcgtggcctggagccagaacctcacacccgagaaggcggaagcgggcggtgcaaagtacgtcaccaaggacgaactgctggcgacctcggatttcgtgtcgatccatcttgcgttgtcggatcgcacgcgcggcctgatcggtgcggccgagctggcgaagatgaagaagaccgcgatcctggtgaacacctcgcgcgggccgatcgtcgacgaagcggccctgatcgaggcgctgaagaaccgcaccatcctgcatgccggtctcgacgtctacgacagggagccgatgtcggccgaccatcccttcaccaggctcgacaacatcacgctcattcctcacctgggctacgtcgtcgaggagagctaccggcacttctacgagggcacgatcagggacatcgaggcctggctcgatggcagtccgatcaacgtcctcaatccggacgcgctcaagaagccctagcgtccttctgtcctctgttgacggacccacctcatcctgggagcgccgcccctcgagtacctcgggataaactccacggcgcgtctcgaaggatgggcaacggacggggtgcgcgtgcccacccttcgagacgctcactgcgttcgctcctcagggtgaggtcggtatgtggatgcccggctggattctttctcgtccggaaaggctcctgcaggctgctgaaaagtcggagctggggcgaataaacgaaacaaacgaaataaacgaaacaaatgaaacgaatgtcgccccccccctgaattcttggcggggtgaccgttggcgcaacaatgttgctcgctggtccttctgaaaacgctatttcaactgcctgtcaggcgtccgcgccctgaccacgatcagccagacggcgccggccaggatcacgccggcggccagccattcgtgggtcgagaggccgggcggcgagagccagcccaggcgcgcgaagatggcttcgagcgcgatggcgaagaacggcatcgcggtcagcgcgaccaggtaggtctgcacgcccgaacggttgatggtccagaagccgagccaggtgccgggcgcgcggaacagcagcccggccaggatggcgtagagccacagttcgaggcggccgaaggcgtcgccgccgccggcccacggcgaggccatggcgcccacgagaccggccagcgtccagaccaggatcagcgccagagaggccgccacgagaatctcgccggtgaagcggctgcgcgctgccggatcggcggcctggttgcgcgggtgataggcgatcatccacgacgccgcgaccgccacggcctcggaggcgatcagccaggcaacgccgcgccacgccgtctccgattccagaccggcggcgaaagccgttatgccgaccgccagaaggacgaggcccggccagtcgcgctttgccggcgcctgccgcgtcagcgcccagcccgtcgccgcgccgatcagcacgctcacggtcgaaatgagggtgctttgcgtgaccgccagccagacgatggcggcagcggtgcagccgttgatgatcacgcgcatgaaggcgtagcagaccgtccacggcaccagcaggtcggcccagcttcccggcgtgcgccggcccgcccacagcatgacaagtcccgcgctcagcagttgcaccagcgtgtaggcccaggcgtcgagctgggccccgctcacgacatgacgcgtcagcaggagatagaccgaccagaggagggagttgccgagcgcgatggccaggacgtgaccgctcattgcgggtctcgcaggctctgtctcaggtgcggaagcgcagcagcaggtgattgacgccgttcagcttgacgtagaggtcctcgaactgcgcgtaaaaatcctcccattgcggcaggatgccttgcgcgccgagcgaggtgtagatctcggcaacggtccggcggccatcgatctgcgcgatgatgcgcggcgccagcgacggaagctgcgcccgccacggaaagccatcgaggttggcgaccagcggcgagccgggctgcaggccggccgagagcttctgcgcatccatgtcccgcagcaccgggatggccgaggtgtcctcgggccgcgcgaccgtgtcgaagccggcgcgggtggcatagaagacatgggtccggacgttgccggccagacgctcggcgaaggccgcccgctcgagcagcggcagcgagctggcctggcgcgcgatcaccggatcgctcatgtaggtcgcgggctcgtagcgcaccggctcgaggaaggccacgatgcgcaggccggaggcggcggccatcctgccgatctggggcaccgtgaaggcgcggtcgcagctgtgcagcagcaggtcgtagaggccggcgtcgccgcccgtcacatggtcgttgagataggggttgcggcggaacaggttggtcgtcggcaggaagcggaccaggcgcttggccatcgccagccggtcctcgatcgccatcgacggcggcgcgatggtctgcagcaattcctgcaacggatagacgccgctgcggccatattcgccgtacagcatgacgcccatgccgccatcgccatgcagcacgctggccagcgcctgcatcccggccgcagggtcgggcaggtggtgcagcacgccggtgcagtcgatgtagtcgaactggccgatgttcatcgtcggcaggtcgagcagcgagccggtcaggaactggatgttgcgcaggccgcgggccttggcgcgggcctcgcagatctgtcgcgacgccgaggagaggtcgagatagacgacctcgccggggcagcggcgatcgaccagctgctgcgccagcatgatgcaggcatcgcccgtgccgccgccggcgaccagcgcccggaagggacggatgaagttcagccggccggagaagagatagtgattgatctcgaggacgtggctcggcgtgcccgtgatcaggcggatcgcctcgtcgcgcgggtctcgggccggatagggcaaggcctcgtactgggcgcgaacgctgtccaacggcgaggaaacggtcatcagggccttgtttgacggcgggcggggcgctacccggagggggcagcccctgcacttcattactgcaacaaatcgaagggccatgaaaggctatttcggcatcggtatcgagggtccgagcaagtcgatgaacgtcggcaccttgttccggaccgcccacgcgttcggcgcctcgttcgtcttcaccctgcgcgcccagtacgacgtgcgcgccggcgcgctcgccgatacgtcggacacgccgctgtcggtgccgacctaccggttcgccgacctcgaagcgttccgcctgccgctgggctgccgcctggtcggcatcgagatcaccgacgatgcgatcgacctgccgagcttccggcatccgcgccagtgcgcctatatcctgggctccgagcgggaaggcctgtcgcccggcattcagtcggtctgcgactatgtcgtgaagattccgacccgcttctcggtcaatctcggcaccgccggcgccctggtcatgtacgaccggctgatcagcctcggccgccacgcgccgcggccggttgccgagggagcgcccaccgaggtgctggacgagccggtgtttggcgagccgatgtacaagcgccgcgagcgcatgcggaaaaaagcccagtcgaaacaatagtttgaccgggcatggttgcgccgggagggtgcggcgactatctcacggcctcgatgaccatcctgcccaccgaacccctgcagattctggaacccggcgcccccgcgcacgggcgcaacgatctgcgccgcaatctggtcggcctgtcgcgcgacgggctgaagacggcgctggtcgaggccgggctggagccgttccgcgccgcccagatctggcagtggatctactggcacggggtcaccgacttcggccgcatgaccaacatcgccaagaaggcgcgcgacaagctggccgatcagttcgtcgtcgagcggccctcgatcgtgaccgaacaacgctcggtcgacggcacgcgcaagtggctgctgcgcttcgccgacggcaacgaggccgagacggtcaacattcccgagaccgatcgcggctcggtctgcgtgtccagccaggtcggctgcacgctcacctgctccttctgccacaccggcacccagccgctggtgcgcaacctcacgccggccgagatcgtgggccagttcatggtggcgcgcgacagctacggcgaatggccgacgccgaccgccgatgcccagcgcatgctcagcaacatcgtcatgatgggcatgggcgagccgctctacaatttcgacaacgtggtgacggcgctcaagatcgtcatggacgaccagggcatcgcgctcagccgccgccgcatcaccctctcgacctcgggcgtcgtgccgatgatcgcgaaggtgggcgaggcgctcgacgtcaacctcgcggtgtcgctgcacgccgtcagcgacgaggtccgcgacacgctggtgccgatcaacaggaagtggccgatcgccgaactgctgagggcctgcgccgactatcccggcgcccgcaacagccggcgcatcaccttcgaatacgccatgctgaagggcatcaacgacagcgacgccgatgcccgagagctggtgcgcctcctgacgccgatccacgccaaggtgaacctgatcccgttcaatccctggccgggcgcgccctacgagtgcagctcgaacaaccgcatccaccgcttcgccgagatcgtgaacgatggcggcctcagcgctccggtgcgcacgccgcgcggccgcgacatcttcgccgcctgcggccagctcaagagcgcgagcctgcgccaacgcggcgagaaggtcgcgctgtaaggctaaccgcaccacctcatcctgaggagcgcgcagcgcgcgtctcgaaggatgggtaacgaacgtggtgcgttgcccatccttcgagacggctgcggagtttaccccgaggtactcgaggggcagcctccttagcatgaggttggtgtgtttttacttcgtgaaggccacaaccttggacaggaaggcgttctcggtcgagaccggtcgcagcccggcggcggcgcacaactcttccatgctgccgccgacatactccgcgtagtacggctcgtggaaatagtgcgggaacaggtcgagcaggccatcccagtcgggtcggtcgcccttctgcagcgaatcgacgattacgatcaggccgccgggcttcagcacgcgcgccatctcggcgatcgccttggcgcggatctccttcggcagttcgtgcagcaggaacgaggagacgacgaggtcgaggctcgcctcgtcgaacggcaacgcttcggtggcgccctcgatcagcttgacccgtgccgtgcggccgatcaggcggcgcgcttcgtcgagatagggtcggctgagatcgatcccggtgagcttcaggccgggccaggcgccatgcaggaaggcgagcaggcggccggtgccgcagccgacgtcgaggccgcgaatgtcgcgctggttgcggtccgcgagccaggtcgcgaccggcgacagcgcgcggcggcgcatcacgtcggcggcgccggtgaacaggacctcgacctgggtgtcgtacagcgcggccgaatgctcgctgagccagccgtcgctctggaaatggaagttctgccggtaatagtcgggcaggccgtcggcctgggtgccgggcggcatctcgtcgtcgagctggccgtggcggcgggcgtcgacctgcggcaggtcacggaaatagcgcaggctgcggcgcaggacttcgcccggctcggcgtccagcgcacgcggcgccggaaacaggccgtcggcgatgtcgcgccattcgcgcgcgaacactgcgcgcatcccggcggtcagctcggcccggccgggcgtcggtccgatggcaaaatcgggcttgggcatgggcttcagcaggcggcggccggcggcatagtggccggcataccaggccacccgtgcggtctggcgggcggcgtaggagaggcgatcgaggggggaaaccatgggatgctattctcacctcgattatagcgtctttgcggcgcccttgccccgcaggggtcggccgctatattcgcgcgccttcaccgaacggacacgaaagcggccagcatgagcgtttcttataccgggccctacaagaagggcgacatcaagaaggtcgtgctcgcctattccggcggcctcgacacctcggtcatcctgaagtggctgcagacggcctatggctgcgaggtcgtgaccttcaccgccgatctcggccagggcgaggagctgtcgccggcccgcaagaaggccgagctgctgggcatcaagcccgagaacatctacatcgacgacgtgcgcgaagagttcgtgaaggacttcgtcttcccgatgttccgcgccaacgccctgtacgagggccagtatctgctcggcacctcgatcgcgcggccgctgatcgccaagcaccagatcgaactggcccgcaagaccggcgccgacgccgtctgtcacggcgccaccggcaagggcaacgaccaggtccgcttcgagctcgcttattatgcgctgaagcccgacatcaaggtgatcgcgccatggcgcgagtgggaactgacctcgcgcaccaggctgctcgagttcgccgaggagcatcagatcccgatcgccaaggacaagcgcggcgaggcgccgttctcggtcgacgccaacctcctgcactcctccagcgagggcaagatcctcgaggatccgtgggaagaggccgacgagagcgtctaccagcgcaccatctcgcccgaggaagcgcccgacaaggcgacctacatcgagatcgacttcgagaggggcgacgccacagccatcgacggcgagaagatgtcgcccgcgaccctgctcaccaggctgaacgaactgggcaaggccaatggcatcggccgcctcgatctggtcgagaaccgcttcgtcggcatgaagagccgcggcatctacgagacaccgggcggcacgatcctctacgtggcccatcgcggcatcgaatcgatcacgctcgaccgcggcgccggccatctcaaggacgagctgatgccgaaatacgccgagctgatctacaacgggttctggttctcgccggagcgcgagatgctgcaggcgctgatcgacaagagccaggagaacgtcaccggcacggtgcggctcaagctctacaagggcaacacgacggtggtcggccgcaagtcgccggcatcgctctattcgatgcagcacgtgaccttcgaggacgaccagggcacctacaatcagcgcgacgccgaaggcttcatcaagctcaacgcgctcaggctgcggctgcgcgccctggggcagggcggcccgaagacctgaacggtcctgaacgggcctgacccgaccggagaggcgcatgccttttgacgacgacaaccagcgccgccttcccggcgggcgcggaacgggcgaacgggccatcaacctgccgcccgccgtgctgtggctgatcggcatcaacgtcgccgtccatctgctgcgccagcttctcggcgagcaggccgaccaggagatcatcctgcagttcggcctggtgccggccgcctacacgaccgacagcggccaggatctcttctcgctgatcgtggcaccggtcacctaccagttcctgcatggcggctggatgcatctcggcatcaacatgctgacgctcgcggcgttcggcgcgccggtcgagcggctgctgggcgtacgtcggttcgtgctgttctatctcgtatgcggcgtcgtcgccggcctcgtgcatatcctcgtctatcccgattcgctcgatccggtggtcggcgcgtcgggcgccatcagcggcgtcttcggcgccgtgctgatgctgatgcgttacgtcggcagcctgacgtcgctgctgccggtcgccggcatctggatcgccctcaacgtcttcttcgggatcttcggcggcacgccgggagcagggggcgaatcggtcgcctgggtggcgcacatcgcgggcttcctgttcgggctcggggccatacgcttcttcgcaccacggatgagttaagtcgctatagtcggcgcatggccgacaacgcgattcccctccggcgcacagtcgtcgccaatgccgtggcgctggcgccgtcgtggggcgcgctggccatcctgttcggcctcggcgaactgtcgggcaggaccacgctgatcgcgatggccgggatcgccgcggtcacgacattcctcgttcaacgctatctcagctcgctggcgagcttcgcccgattcgtcggcgagctttccgacgagcgccagccggtgatgccgcggctctccttcgcgcccgccaccgaggaactcgcggccgcggccgcaacgctgtcgatcggctggcgtcgccagcgggcgtcgatcgacgatctggcggcctcggcgcaggccatcgtcgacggattgcccgacgcgctggtctcggtcgaccgccagcgccgcatcgtgcgcaccaacctcgccgccgcgctcctgctcggcagtcccggcggccccgagcgtgatgtctcgacggtgctgcgccagccgcagctcctcgccgccatcgacgcgctgctggagaccgggccggacggcaatttcgtgcgacccgaccagggcgtcgtcgagctggtgctggcgggaccgcccgagctcgacgtcgtggcccatctgcgccgcctgccgcgcgcggcggcggacggctcgctggcgctgatcgtgctgcacgacacgacggcgctgcgccgcgccgagcgcatgcgggccgatttcgtggccaacgccagccacgaactcaagacgccgatcgcgggcctggccggcttcatcgaaaccctgcgtggcccggcgcgcgaggatacggcggcgcgcgaacgcttcctcggcatcatggccgaacaggccgaccgcatgcgacgcctggtcgacgacctgctgatgctgtcgcgcatcgagcagcacgagcatgcaaggcccgctgccgccatcgatctcagcgctgtgttgcgctcggtcctcgacctgctgcagctcaaggcctcttcgcgcaaggtccggatcgagctcgacctgccggccgatctgccgcgcgccatcggcgatcacgacgaactcatcatcgtgttccagaacctgatcgacaacgcggtcaagtacgcacgccccgccacttccgtgcgggtcgaggcgcgtcggtcgggccaggatcgcgtggccgtcgtggtcaaggacgagggcgacgggattccggccgcgcacctgccgcgactcaccgaacgattctaccgcgtcgacaccgcccgttcgcgccagctcggcggcaccgggctgggcctcgccatcgtcaagcacgtggtcaaccgccaccggggccggctcgacatccagagcacacccggcaagggctcgaccttcacggtcaccctgccggcggcggcggggacctgacgacttctcgcgacctcgtggagaaacggcgcgaaagcgccccgtaagctttccccgtcatagtcatggtttgaagttcgtgagtctgctcccatgacgtcgaaagccattgcacccagcgagatcgtcgtgaccgcccaaatgatccgggccggtctcgacgtcgtgaagtcgtggccctcgctcaccgacggcgaggcgctggccaccgcctgtcgcgcgatggcggccgcggcgccgcccgacagtctgtcgatgcgcaccctcacaccgaccatgctgcaggccctccggctgctcggccacaaatagacgaggcctttgggtccgaacgacccgcaaagcctgtgcgatccacaggcgatgagcctcatcgaggccttcggcgggaggttcccgtgatctgtccgcgccgggcaacgccgttcaggaccgcgggttcaggcgcttctccaccgtctgtctcttgtctgtaacccaaccgtagcgcggccgaagcctgcggccggtaccgagtcttccgtgggatttgggaggcgggatgctgcgactggaaggcgttaccaagagcttcggcggcaagaacgccgtggatggcgtgtcgctcgccgtgccgacgggccagctggtgggcgtgatcggccggtccggtgccggcaaatcgaccctcctgcgcatgatcaaccgtctgggtgatccgacctcgggccgcatcctgttcggcgataccgatgtcacggcactgcgcggccgtccgctgcgcgcctggcgcgcccgctgtgccatgatcttccagcagttcaacctcgccggccggctcgacgtcctgacaaacgtcatgatgggccggctcagctatgtcggcacgttgccggcccttctcaatctctggagcgagcacgaccgcgccattgcgctctccagtcttgatcagttcgacatggccggcctggcggctcagcgagccgaaaccctgtcgggcggccagcagcagcgtgtcgccatcgcgcgggcgctcgtgcaggagcccgacatgatcctggcggacgagcccatcgcgtcgctcgatccgcgcaataccaagatggtcatggatgcgctgcagcgcatcaacaagcaattcggaatcacggtgatctgcaacctgcactcgctcgatacggcgcgtagctactgcgatcggctgatcggtatggctcagggtcgcgtggtgttcgacgacgtgccgcaagctctcaccgacgaggtcgcccgcggactttatggactggacgccggggagatcatggacaccgcgggcacggctttgcccgccccggccgccacgtatcggccctcattcgctgtcgcctgaagcaggacactgcgccaaatcacgctatccagacggagtaccctcatgatcaagcgtcgttcaattctcgcctcgacggcgggcctgcttctcgctgtgcccttcgctgccaacgcgcaggactggaaagccaaatatcccgagatcgtcatggccatcgttcccgccgagaatgcgggcggcgtcgtcgaccggttcgggccgttcgtcaagtatctggagaaggaactcggtaccaaggtcacgctgcgtgtcgccaacgactataccgcggtgatcgaaggtcagaagaaccgccagattcacatcggcttctatgggcccggttcctatgcccgtgcctatgccgtctcgggcggcaacacggtcgctttcggaaccacgcagaaccaggacggctcgatcggctactactcggtcgtctatgtgaaggccgatagcccttacaagaatctcgatgacctgaagggcaagaagctcgggctggtcgatgtggaatcgacgtccggctacaaggcgcccgtctttttcatgaatcgagagggcaaggcacccgacaagttcttctcggtggctcaggtgaccggcagccacgagaacgcggtgctggccatgacgcaaggcacggtcgatgcagccaccaactggtggaattccgacaccgactccaacctgacacgcatgatcaccaagggcatgctcaagaagcccgacggttcgccgatgaagtacgaggacttccgcgtcgtctggaagtcgccgctgcttgcgggatcgcccttcgcctatctcaatgacatgcccgacgacctcaagaaggcaattgcggacgccttctacaacgccaacaagaaggacaaggctgctttcgacaagctgtccgacggcaaggacctcgccttcgttccggtcggccataaggactatctggagttcatcgagctcaacaaatacctcgaggaacttcgccgcaagaagggctgaccgttcgccgacacaggtgtgacgcttcagatggcgaagactttggcaatattgccgccggcgcaacttgcgccgctggccgatggctatcgtgccgcgatggcggtcaagcggcgctggaccatcggcggtctcgtgctgctggcggtgttcgcattgctgtcggcctgggccggccaggtcgatctcgccaaattctggacggggttgccgcggttcgccagctacttccacgacatcctgccgcgtctgcggatcgagacgttcgccgccgacatggccgagtggttctggaacttcgacggatggctcgcgctgctgtgggatacgctgctcgtcgcctatgtcggcacgctggccggggcaatggtggggttcgtcctttgcttcctggcctccgcaaacctgacgaagtcgaccccgttgcggttcttcgcgcggcgctcgctcgagttctgccggactttccccgaaatcgtcttcgccctgatgttcgtctacgccttcggcttcggaccgatgccgggggtcctcgccatcgccatccacaccgccggcgctctcggcaagcaattctcggaggtcgtcgagaatgtcgacatgcacccggtggaaggcctgacggcgagtggtgcgaactatgtcgaagccatccgcttcggcgtggtgccgcaggtgctgtcgaacttcgtcagctattcgctgctgcggttcgagatcaacgtgcgcggtgcgaccgtgctcgggttcgtcggcgccggggggatcggcaaggaattgatctcgtccatccgtcaattctactacgccgatgtgagtgcaattctcgtcatcatcgtcggcacggtcttcctgatcgactggctgacggagatgctgcgtcatcggctgctcggaatcgaaggagacgcccggtgagcgagcctgcaagaacgattcgcggcctcggagaagccgacaggtccgagctgaagcgccgttacccgcaggcgttccaggcgccggtcgccgaacggtggttctcgctggcgatcgtcgtcggcggagcggctcttgcgatctacacgctgtggcgcttcggcttttcgccggcgaagttcgtcgacgggttggacaagctcggcatcgtcgtggtgttgatgatgcccccggatcccggcagtcagctctggcactacgcctcggcgctcgccgaaactctggccatcgcctttctcggcacgctgggcgcggcaattctcgcccttcccatgggcatgctcgccgcgaagaacgtcgtcgccaatcgtatccttcacttcgcgagccggcggttcctcgacacgatacgcggcgtcgatacgctgatctgggccctcatctggatcaatgtcgtcggtctcggacccttcgccggcatcctggccatcatgacttcggacttcggctcgttcggcaagctgttctcggaagcgatcgaggcgtcggatcgcaagccggtcgacggcgtgctgtccgccggcgggtcggacctgcacagcttccgcttcggcattctgccgcaggtgatgcccgtgctcatgagccaggtcctctactacttcgaaagtaacacgcgctccgccaccatcatcggaatcgtgggtgcgggcggcatcggtctctatcttgccaacgagatcgctcaggccgagtggcaaagagtggctttcatcattctgatgatcctggttacagtctctgtcatcgactgggtctcgagcaggctccgtctcgccatgatcggtcgtcgtgcgggagcaaccgcttgagcgaatgcatggacgagacgcaggcgctgccccgctacgcgctctattacgcgccgcgggtggaggaggcgctggccgtggccgccggccgatggctcggccggaatgcggacacgggcgaggcccgcgatctcgtcccggtgagcggcgttccccatgagcgtctgttggcaatcgttgccgagccgcggctctatggcttccatggcacgctgaagccgccgatcgccctggtcgagggtgccacggagcgtgatttcctcgacgccgtcggcacgctcaccgcgaccgaacgccagatcgatgtgccggccctggaactgggcgcgctgcaggacttcctggcgctggtgccggcgggccggtgcgcgccgctgcaggatttctccgaccgctgtgtcgtggagttcgacgagttccgccgtcccgccggcgaagccgaactcacgcgccggcgcgccgcgggtcttacccagaggcaggaggatctgctgctgcgctggggctatccctacgttctcgagcagggacgcttccacctgaccctcaccgggagggtgaaggagccgcgcgaacgcgccgcgatcctcgacgagctgcgtcggcgcttcatgggcttcgtcgaccggccgctggccgtacgcgacctgtgcgtcttccgtcaggcggcgccgggccggccctttacagtgctggcgcggttcaggctcggcggagggcggcgcctgaccactcacgtctggagagcagcctgacgaaggccgcggcggcctcgtcgattgtgccatcgttgacgatcgtgaccagacgcgggtcgtcgacctcgtaggcatcggcacgctgaagccgctccgccgcctcgatcgaggtttcgcggccgcggccggcgaggcgctgcttcaggcgttctgcgggcgcggtgatcaggacggggcgggcctgcgaatcgaggccgccggtcctcacgaaatgatcgcgcgagccgctcaccaccacggtcatgccggcggcccgccagtcgtggatctcccggccgacgccgtagtcgttgccatgggcgttccagtgataggcaaacagcccgtaggcgcgacgcgtggcgaattcctcgcgcgtcaccgcgacatggttctcgccgccgctatcggccggccgggtgatgtaacggtgcgcgaacaccacgggcgccccgagcggcaacagggcccgtgcgcgcccgaggacggagtccttgccggcgccggaaggacccatgacgtagaccagcgaaccttccatgacctttgcccggctttcagaccacgcgttcgccctcgcgccaaacggcgcgcacgacggccgcgccgtcgacggtgcgcacgcgcaccaggtcggcgcggcgttcgagagcgatctcaccccggtccccgagtccaacggcgcgcgccggattgagcgtcgccagccgcacggcctggggcagcgatatgccgatgccggacgacggcagcctgaacacgctctccatcaggctcgccggcacgtagtccgacgacaggatgtcgacatggccggcgcgcagcaggtcgagggcggcaatgttgccggaatgcgaaccgcccagcaccagattgggggcgccgaccaggaccgcgagacctgcatcgcgcgaggcctgggcagcttcgcgggttgtcgggaattcggcgatggtcatgccgttggcgacagcctcccggacgtggccgtgggtcgcgtcgtcgtggctggcgagcggcagggcgcgcgcctgggcgcggctgacgatctcgctgcgatgccttgcagcgttgcggtggtgaagctcggtgacgcgggccgagaactcctcgaactgtgcgtcggtcatcgcatacttgcccttgtagtactgcttcagtttctccggatcgagaaactgacgctgccccggcgtgtgatcgttgatcgacaccaggccgaccagcggcagatcgatccacttgtcgacggcttcgacggcatcgtcggccgtgatctcgcacctgagatggatacggtgctccgcccgcgtcatgcgccgatcggtggcgaagcacaccgcttcgatcatgcgttcgcgattgctcacccggtccgacgtgccgtggacatcgcccagcgccagcgagtcgaacaccgtcgtgatgccggcggcgctgatctgggtatcgtgcgccatcaccgccgacacgctcggccatttcacgcccggccgcggagcgaagtgcttctccatgttgtcggtgtgcagctcgaccaggccgggcacgagatagtcgccctcgaggtcgatcgcgccggcggcgtgagagcgctcggtggtgacctcggcgatgcggccatcgcgcaccacgaccgtgccgtcgaattcggcgtcggcggtgaccacgcgggcgttggtcaggatggtctcgaggctcatggggaaactccggccgtcggggcaggggggacgacttcgtggacgcgggtggcgaccgcatcgcgcacgtcggtgtcgtggaagatgccgacgatggcggcgccggcgtcgcggcgctggcagatgagttcgaccacgccgtcgcggttggcggcgtcgagcgaggctgtcggctcgtcgagcagcaggatcggatagtcgacgctcagcgagcgggcgatgttgaccctctgctgttcgccgccggagaaagtcgcgggcggcaatgtccacaaccgggcgggaatgccgagcatgccgagcaggaactcggcccgccggcgcgcttcggccggatcggtgccgcgccgccgcagcggctcggccacgacgtcgacggcggagactcgcgggatcacgcgcaggaactggctgacgaagcccatggtgcgatgacgcacgtcgagcacggtgcgcggctcggcgccgaccagctcggtccaggtctcgtcctggcgcacgcgtatggagccgctgtcggcgcgatagttgccgtagagcgagcgcagcagcgtgctcttgccggcgcccgacgggccgaccagcgccaggcattcgccgggcgagaccgccagcgacacgtcgcgcagcacgggaagcgccaggctgccctgggcatggacgatgaacgacttggcgaggccggagacgcggagcgcgggctgggaggagggcatgttcgtcagaccggcaggatcgaggcgacgagcatctgggtgtaggcatgctgcggatcgtcgagcacctggtcggtcaggccctgttccacgaccgtgccgccctgcatcaccatcagccggtgcgtcagcagccgcgcgacgccgagatcgtgcgtcaccagcacggccgacaggtgaagtccttcgacgaggccgcgcagcaggtcgaggatgcgggcctgcaccgagacgtcgaggccgccggtcggctcgtccatgaagaccagccgcggattgctcaccaggttgcgggcgatctgcaggcgctggcgcatgccgccggaaaagctggtcggccggtcgtcgaggcggtcggcgtcgatctcgacccgtgccatccagtcggcggcctggccgcggatctcgccatagtggcgcgcgcccactgccatcagccgctcgccgatattggcgccggcgctgacgcccatgcgcaagccttcgcgggcgtcctggttcacgaagccccattcggtccgcgccagcagccggcgtcgcgcttccgagaggcgatggacatccacggtgcccgccgacttcgtctcgtaggcgacggagccgccgtcgggcaggaggcggccggccaggcaattgagcagcgtcgtcttgccggagcccgattcgcccacgatgcccagcacctcgccgggccacaggtcgaagctcacgtcgcggcaggcgatgcggccgccgaagcgcctggtgacgtcgcgggcagagagcagcggcgcgctcatcgccggctctcgcaatagtcggtgtcggagcagacgaacaggcgcttgccggcgtcgtcgacgatcatctcgtcgaggaagctttccgtcgagccgcacagcgcgcagcattcggtccaggtctcgatctcgaagggatggtcgtcgaagtcgaggctcttcaccgacgtgtgcggcggcaccgcatagatgcgcttctcgcggcctgcgccatagagctgcagcgcggcgctgcggtcgagcttgggattgtcgaacttcgggatcggcgaggggctcatgatgtagcgcccgttgaccatcaccggatagttgtaggtcttggcgatgcggccgtggcgggcgatgctctcgtagaggctgacctgcatgacgccgtactccgacagcgcatgcaaagtccgcgtctcggtctcgcgtggctcgagcatgcgcagcggctcgggaatcggcacctggaagaccagaatctggccgtcggtcagaggcgtctcgggcacgcggtgccgcgtctggatgatggtggcttcttcggtgtgcgtggtcgtggcgacctgggccaccgtggcaaagaagcggcggatcgagacggcgttggtcgtgtcgtcggcgccctggtcgatcaccttcagcgtgtcttcgcggccgatgatggcggcggtcacctggatgccgccggttccccagccatagggcagcggcatctcgcgaccgccgaacggcacctgatagcccggcaccgccaccgccttcaggatggcgcgacggatcatccgcttggtctgctcgtcgagataggcgtagttgtaggcgccgtcttgcgaagtgctatcagtcgggttgatgtcgggccgcgg

SEQ ID NO: 12 - DNA, 31604 bp, Artificial Sequence; identical to SEQ ID NO: 1
  Synthetic Oligonucleotide

SEQ ID NO: 13 - DNA, 31547 bp, Artificial Sequence
  Synthetic Oligonucleotide
cgcgtcgttgaagcgcgcaggcgacaggtaatcgacttccacccgccgcaccacgaataccgcgccgtgcgtatcgcgcagcgcatcctgctcgaagcccagcgcccgcagccattccgagcgtgcgcgttccatgaacttgagatagttggcgtaatacaccacgccgccggcatcagtgtacccgcgtgatgtacgactatggacattgaacgaatggcccatcaatactgggtttaccgcagactgcgcaatgtccatgaggaagtcacttttttcttccgttcggttcattgatgtccataggtcgcgggctactttttggtttgctctccgagagttggatcgtaaccgctttcatctgtagataattaatgcgcgcctctgcatcaatcaatctcctcgtcaagatcacaatctgggcgtttgcctctaccaggatcccattggcggcgtcacgttgcttctcgaggtcagctatcgtcttgcgcgccgagcgattgcgctgacgttgtttaaggagcctctggcgttctgattcaggacgctctccaccgtgggcggtgacgtagttctgaatctcggcaaccaaagacgggaatcgggacttgcgcagcgcagacggatcgcatcctgcctcctttgcgacgttgttctggctcacctgagcgccagccggaaggaccttcgatgaaccgatcttcaggcgctcgaacgcctgcctgaaattggcttccgccgtcttaggacgcgcggatgtcatagtacttccttatggctcgtttctctgcctgcaagcggttatgtcgagggctgtcaggatgcaccaccttcaattgatcgtcgatcaccgcttcatacgcccgaatttccgtctctttcgtggtgtcgatcaacaactccgggcagcccgcaccgttgtcaccgccgaggcaatgagcgatggcctcgtgaccgccatacggacacgaacgattcttcacgcagaaccctgcgcgtatgcgccgtgcgccgatcttgccctgtcgcgccgccttgtccaagtcgacggcctcggtctccttgataaaaacgacaacatccgactttcgttgggacccgagtggactgacaaactggggggactgtaagttgcgcagttcccggccgaactcctggtacatggccttgagaaacagggttcgggtttcttggctcagattgagtcgcgagtggttgcggccgtagtagagcgtcatcacacgggactggtgcttcaacaagagctgcaaggatggttcatccaccatacccgaggaaagcatgttaacggccccagtgcgacggagcatgtgccacgcaagcttccacttctccccaatcttgaattcgtcctggttcaagttaggcgtgatcaagcgtgcgattcgcaggtcttcctcagtgatggtgagttcccttgcatcgaacagcagcgaaaaagcatccgtcagctgcgaataattccacatcctcggacgcacacggtatgacttgctctttccgccgccccacggttcatattgaaacgcgatcagatacgggttcaactcatcatcctgcttcaggccgataccgtcgcgctccttggcgcaacgcatgcgcaatccagcaatatgtgacaccgcgtcgatcgccagcttggcgctttcgctcgtaggccatctggcgtcggaatctgggtctgtcttggtcgtctctccgcgaagcatatagatgtcaccaaacttctcatcatgctccaccacgaggcagtccgatctcaggttccaaccctctccggcacgcatcagcgaaaagttaagcaggtacgcgaggccggccttggataccaggtccaaatattgcgaaaacaccgtgatttgcttctcgcccttctctccggtgaatggcccaacccattgctcgatcagtccggtcacaccgtaacggtcagcggtctgcttgaacagaccctggtacacacaacctttgatcttattcgtagtgcgattctgaaaaggcgaccttgaaccgtccgactttgaattgacagcctgcttcagcgacccgtgattcgtcgcataggcatcaaggcagaactggaaacaggcctcgacttgctcccgatgtgccagatagtcagtcaagcactcgcgcaaacgtgagacttggtaggaccagattctcggcgggatgtagggagtctgttcagcctcgtgatccggctggagcgttgccaaccgcgccagtccttccttgtcgaacaggcagaagccaaggtcgtcgcgctcgtccagcaattcgtgcaggatggtgatggcgttgtagaagctggacggcgctagcgcctgcgccaccttgtcgatcactttcgggaagcgcatgaggtcagttgccacgatgcgctcttcggagcacaccacgaagatgggtttgatcgtggcgatcttgtttgccagacttgatgcattgcggcaccctctggggccataaagaaaccacgccgcacactgacgcagcaggtcagcatttggctggtccgtgcgcccagcagaccgccgcgtcttgccatcaccaaagttcaacttcaaaggcttgttcgaccagacttcgagcggccagaccgaatcactgtagacgcattgcgccaccccattggcatccaaaatgggcggccagtcagggggaggcggccagatcggcggccgaaagttcctgaccgcgggatgcaccagcggcgaatcgatctgcaagcccagttgctcaagcttcatggtgcccgctcggtgtccgacccgcttcgatcatccccgcccagtcctggtggtagcgtccttcctcaatgcgcattagcgcctctgtgacccacgcctcgcgcttggcgccggttgaccggatgtaagccagcttggccgtcaagcggttaatggcatgctcggcgggatgggcggacggcgtcttttttgactcgggttgccggtgggcggccagttcgtacgacttgagcagccgatagctcaccagcgaccaaatgtgatcgaagctgtcgatgtcccgctgattggcgcagaacaggcacccggccggcgtctggcagtccggtttcgtggctgtcggtggaatatctgggaatggcttgggccccttgccgatgcatgaccccgggccggctgccacctgtgccgggtcgtgcttggcccagaagcacttgatctggaccatcgcccgctgctggctcggcttctcgtagataccgatcaacgtcttggtggcatgctgcttctcttcggccgtcaggtcgggatcgcccgtgcgtcgcagcatccaattgacgttggtgttgcgcagcatacttggcgatatgtacttgataccagcacggttgcatcgctttctgagcgtctcaaagcctggcggtttctcgctgtgccgcccattagttatcagcgggaacaggagcccgtcgggatcatccgggaagagcgccttgcgccactcgaggtaggctccgaagactttgcggtattcggagtagatttcaaaaaccacggggccccatctccggtgcttgtaagtgcgcacctcatagccattggtggagggcttgaacttccattgatccatgcggagttgatgcacttgggccagattaacggccggctgccccatgagcatgtgcatctcggtgacgacccgaaggttcaccaatgggtaacgggttcgcagcgtgcgatcttcttcgtaccccgcgcgtctttttgccgttagtttcgcatcgcgttgcgcttgccgtggatactttggattcggcggtttacgggtctcgggtcgtttcattcccgaccattcctcgaggaccatgccgttccgcaatgggatgagcaccggcagcgggccccagatcgcgtccgggctcagcccatctgcgatatcgagtagcaggtggccgaaggcaaaggtatctgacagattctgcttgtccgcctccacgccaaccgctcgtgcgccgcgtcgcgcttttcgcaggcggctcgtcttgacgatgggcttgccccgtccaagcacgcggtccagcacccagccgacctccgagccatacgagtaggctgcaccctcactcaacccttccccgacccgaacacgatggaggagcgcatccgtccagtgcagatagccgctcacaaccgacttgaggtcgagagggttcccggtctcatcagcccaacgaacgaacgcccgtagtcttccaatctgcccgactgccgtcttccgtcggccgccccgccccagaaagttggcgatcacctcatgcatctgccgtaccagctcgatgcgttcaaccagcggctgtcccagttccccggcgtcgatcatcacggctaccttcctagcattcgcacccgcgccgcccttgtagaggaggcaccgtaagtcccacggcgtctctttcgcgcccatggtgacgtcgggaaaggtcaggtcgggcagatacaggtcaagcacggtcgttccctaggcgcgtgctcagcccaagaaacgcttccgtaaattcgttggcgacctcgatcttgatcttggtttcctgaacgaacttgatgtacgccaacgtctgctcgatgtccttgtgcagcatggcgtcgctgacaaacgtgagcacggccttttggtcgtagcccatctccagaagggtcgccgtcagccacgtaccgaatgtcgcccgggtcatgtgaaagtgaaagttcttcatgaacttcaggcccgccagcgtcgccgcccggcgcagatcgaccattgcccgatctaccgcggtgccggatgcggattccctttccacgtaacggcggccgaatcgtgtgaggaagatcagatccttgttctcctgtggcgccttggcctcgcgtgcgagtcgacgcggatcggtcacataggtgcccaggtcatcaaatagcccgtctggaaccaggatacggccttgcacattgaatttggtcgccacgtgaggtttgtgaccggggccaacggcaatgtagaccaggccaggaacaacaggatcagccacagcattgtcgaacgaccccttcttcaaatccgcaatggtctcaatgcgcgcgcccgtaaaaaacccgagttgcagcatccggtgcagctcggggctaacattgccttttgtgaaatcaagcagttcatgcatctgctccttggtaataggcatcagcccaccttcaagccgaagaccatgacgcggccgattgggtatcgccaaatcggtactggagagcagcatcgtgcgctcgaatccaacggaatcgtggtaccgatggatcacctgccgttcttgccacatcggcgcgtcgcgcccaatgaagccattgactcgggcataccggtaaaagtggatcgtcgcgttcatccgctgggtggcggtcgatggcgcgagcagcccgaatttgtcgcgctcttccatcagcttcttgcgccatcggatcagtacccggtcgcgttcaagcatgggaaagtgccgccaatccaaaccgccatcgccctcaccaccatcggccttgttggccacctccagccattcggcgaatttgtggaggtgccccatattggactgaacggtcttgatgtctgtctttccggaagtcgcccgctcgtgcgcccaaagatttgcctccacccagggcgttccatctgcccagaacaattgcggcaggtgctcgatcaggcgacaggcgatgtcccgctcccacactaccgtgccgtcatcggcaacgctgtgccgatgcggcacgtatttaattagttccagcgtagccatctgaccaatctccattctctcttgcgtgatccggacctaagccattcaggactgactcccaacgctctagcgactgacacaaaaaccttctgactgccgcccgcgctcttgggccaatgtcgcctgcagcaatcaggatgaggaacgcgagttcttgatggaaatcggtcggccccgtctcgagatggacgtcggacagtacgtgaatgcgtggcggcctgtggcgcccgactaccttccagtcctgcatcgttttctcccacttcagcaaaactctactatccacccggagaggagaaaaatacagacattccttaaaaatcaatgatttatgcaactatagttacacctaatatcgaatttcggcctgtttgactcgcggcgttccgaaaaccatcacgcttcatacgggaacagatctccggcatgcaactgccactagctgctcccttggcgcttggtctggatggataccgatcctccctgcaagctgagatcggtttaatggaatgttcgctgcaagttccatggtggcttgagtaccggtccgaaaaccgatgccgggaaggagcaagcacgaatcaatggtagaaagggtggacggccgaggaaaaaactgcaaaacccaacctcaaatcccccgatcccgttacgctaccgtcacgcaaccgcgcctctccatgatgaccgctacgcgaatctgagagctgcgggcgacccgtttgaatgcgatttatagaagtgccctgttactgcacccaagcgacgaccgataggaggcctcgtgaaaccgtttgtaattcgcgccaatttgcgcaccccggtaatctttaatggctacatgacgctagacgccctgctgatggcggaacttcagcgcggcgatgtcagcgacctgatcaattgcgttgagggcctgtacttcgcgagtgccgcagtactggaaggcgaagcgggaaagatcaaggcatcgttcgccgccagcatgaggccagaacgcacgccggaatggctggacgtcatcgcacccaacagcaacaaaaacacggacgtcgcgatgggtgactcgcgttatcgtgaggccggtaacgtgatcaatggctatgacgcaagggttgcctcatccgtcgtgtggtacgccaccggcgacaagaatgccgtgctggaggtgctgcgcgaagtgaagttcatcggcaaacggcgcgcttctggctacggcgaagttatccattgggaagtcgaagacggcgaactcgacggactggtcggctatctcaacgatcccctccgtcccattcccgcccaccgctggacagaaggcggtgaccagatcgccatcgatacggcatggaagccaccctattgggcaatcgagaatcgagccaagtgcttcgcaccggaggtcacttgaacagtgctgagttctttatgaggtactgcggcgaaaagttgcttccggtcgaattgagatcaagcaatgacgtcaaggacgccgcaaccgtactggcgatgagtcatccgctccataccggcaaggcgctccgcctatccagttgctggatggtcatcacgtcgactggggtgaccacaagtttcaaggcgcttgctgcaaccggatttgatacaagcgggaaggtcgaacgcaaggacgccatcgttgctgcgctcaagcaaggggactgcatgctgctcgccttgaacaagcggtcaatgacaccggcagacctgttcattacctacgacccacgggcggcacggttatgcagtcccggcgaggtcaatacttttgatgcgaccaaggggaagacatggacaccgtaattgacaagccagcgcggattcgtggctacgcactgcatcgtatcgtcgagcagcatcagcagggcgtgccggccctgtggtcagatgaagggagtcagctacgcatccggccaaggacggcaaatgcgccggtctatgaggcggggaagttgcttggattcacagtgaccgcgtgtgtctcgttcaagtgcaacggcaagcaccgctatctgccgctggatgattggcgtggccgcaaggtgtggctggagaagaaagccgaaaagcacggttttcagattgtcggcgtgcatgttgaacccaagatgcagaaggtcgaatcgcacgacgggcgcaagttccggctggacgcgaccgatttcaccggcctcctgcgggtgaccgatcccgtgaagttcagcaaggcattgactgatggcatcggcgtggtcggcaaggcattcggactcaacctattaatcgtgcagtaaatctttgaaccggagaacaagcgtgagcaagaacattttcggcaacatcaccatcactaccgttgatcccgtgtcattcagtcaccacagtcaggaaggtctgccgatgatgactcgcggcgttgatggcgagggcaggcacctcaaaacagtattcctgccggcggcaggcttgcgtgggcgcatccgccatgaggtcgcaatgtcagtgcttgagcgcgaaggcaaagccaagctggggcgcgcctacatgctggcgttggggcagtcgaccgatggccgcgtcgaggatgaaggcgacgtgcaatacaaaattggggagcaacttgccctgcgcgagaaggagcctgtgatcgatctgtttggcacttggaagatcaatagccgcttgcaggtcagtcacctgatgcctgctgtgaatgtccagccggataccttcagcttcattcggcgtgatctggacagcaacgaagagatgttcgcgttgtttgatgcaagtgcgcaggacgccttctatgatcgacagactacgatgtcgcaggcgtccaaggcaggcgacatgatcaaggtggcgaccagcgcactgatgaaggcgaagaaagccaaggcaccgcaggaagagatcgatgcgctggaagccaaggttgccgaactgaaggcagtcaagaccgctcacaaggacgaggcaggtggcgacggcaacaacagcaagcatttgctggaagtcgaggcaatccctgcgggtatcgatctgctgggcagcattgtcgtgaagaatgccaaatcacgcgaccttgaaatgctgatcgaagcgtttgatcgcatcagtcaaaagcccaaggttggtgcgcatacggcacgggggtgcggcgaagtgacgggtaacgccaccttcacgaacggcgacggcgaggtgctggcagttgtgcattttggtggatacaagaaagccgctgtcgagtggacaaaaaccggaaaggactacattgcagcgtgatgatcttgacgactttttgggtgccgtttgaacctgaaatcgtcaaggaatcatggtgatttggttgatcagatggagagcccccttgtggggttactagaactaggcaaaccagttctgcccggcgaacatcgatggagagccccgttggggttactagaaccttgcggcggtcccgctcgattaacttgttgatggagagcccccttgtttgtgggattactagaaccgcttcagcgcggtcgctgttgaccgccgtgatggagagccctcttgtttgtggggttactagaacatgcccggcgcgcggcgataaaccgcgtccgatggagagccccctcgtatgtggggttactagaacgcgtggatgatctgcgtgagctgcgcctgcgatggagagcccccttggttgtggggttatttggacacgatgccgtccagcggctcgttacacttggatggagagccccttgtttgtggggttactagaatcagtagccgcacacggcgatgcccatactggatggagagcccctttttgtggggttactagaacgaaggcatgctgatcgagttccaggaagccgatggagagcccccttgtttgtggggttactagaactcgatggtgacagtgccgccggtgaagaacgatagagagccccctagtttgtggggttactagaacaggaacttcttttgctgcatggtgttgtccgatggagagcccccttgttgtggggttactagaacaagcagtgcgatgctgaagcgaagatgaaggatggagagagcccccttgtttgtggggttactagaacgttgagcgcgcgctgatgctctactgtgcggatgagagcccctttttgtggggttattttaggattgtcggcatgtacagaagcaaagaacaagcgcagtacgcgaagctgattaccgatgcaatcggtgtcggtgcgcttctgctcgcgggtgccgccgctggtctgggtaagacacacgggtacacgatcccgctggtgaccagtggcaagcgtgtggcgatcagcatgtcaacacgccagttgatcgagcagtacacgcagtccgatgcgctcaagtcggcgctggaactatcacccaccacggtcgccgtcctgcgttcgcgccgtgagttcgacggcagcaaggactaccgcgaacacagggaacaggcacttgcggcacaggtgctggtggtgacgcacgccgccgccctgatcgatagcttcaatcctgactatgccgatctgcggagccgtgatgtcgtcctgttcgatgaggccgatctgctcgccgacgccgccgacctgcgctcgactttcgccatcgacgggcaaggcaataccgaccgcgatgccgtgctgcgtagggcagagcggtctgatgatccagaggaacgtgcggcagcaagagccatccgctacgccattgagcatccagcgttctacaaggtggttgggtttggcgatgatggcacgctgatgctcaagcaccggatgcccgggcggatgctcaagccattggtgcaggactgcaaacggatcatcttcaccagcggcacgctgcaagtgagtggtcgattcgactacttcattcgcgccattggactgaccgctattgatccgtccagccgacacattgaccccgttcagcatggcagtctgaccgtcgagatcacatctgacgacctgaccgccgagcagaaggcgcaatcgatcatggcggcacaacgtccctgtcttgtgctgaccaccagtcatgccgatacagaggcgttaggcagactggtatccggcgcggtggtgcgcggaaaaggtgagccgctggcagatgcagtggcacgatgcccagcagatgccatcctgattgctgcaggcgcatggagcggtctggacgagccgagcttgcgctggaagaccgtggtgatacccaaggctccatatggcgcgccgaccgagatcgacggccagcagatcacgcactacatcgacagcaaggtgacggcgaccaggcgcatcaaccaaggtttgcaccgtggtctgcggacacagggggcggtctgcaaattgatgttgctcgatccgcgttgcaaccgtccagaattactcgcggcgataccggcgcggtttagcgtgcagtcattcagcgaggggcagcgcgttgagttggtactgagcaaggccgagcgcgatccgctgctgagaaaggcggcattaaagatacatggcgcggtgtgtgccgactgcggcgacatcaccctgcatcgccttgatgtccatcacctgaaccctgtcagcgagggtcagcgcaggacgacggtcaaggatgtggtggtggtctgcaagaattgccatgcagatcggcatcatgcgatgtgtgccaaccttggcgaactcgccccggtatctctgttgaattgaacagacatacgccagagcgaagcgggtaaatccatcggccaatggtctttcggtgagatttcctggcctatgtccggtaacgactccatagcagagcggcagcttaggccgaggatgcggcggtcgactatccagctacgaccggcaggtcatcggccaaacctgccgttgacgtgctggtcgccggcggccagcggtctaagttgctggattatttcgttattcgtgcgtcgtatacccatttccgcactacttttgcggtgatcttcgcagcatctgtgtgttccgggttgatgagaatattgcgctcttccggtacgacgattgaaggaacttcaattacggcgctgcgcttggacgtcagccatttatctccgaagtcgaggctgatgatacctgcaggcaatgcatcccagccaaccggtgcggttgtcgctgtgagtgtctcgcgcgcgtcgaagacttttttggggatccctatctggacgaggtagcgattgagtggcaacgcatcggccgccagatgcacgaccgtttcaagcgcggccagcgcgcgggtagaggcgcagtagagcaccggaagccccgggcggttccagcgacctcctgttttctttgcacctgcgcctgcgaggtcgtccgcgccgtagtccggcgtaatggtcgcgatccgccagaccacgaccgtcaagcgtatgctccggactgcatctgggaaagcaactgagctatgagttcttgcccttctttctggtgcatgtaatctgccggcaagcggccacccagtgctgagttcggcgtttcaagccaggttgccaaccacttggccgcattgaacccctcgggcgctcccgattccttgaccatcacttcaacctgtccgatcatctggcgcaagcctagaacgagcgaaccttcgtcacgattgaggacatgttgcgatgcagacttcttgatcctcaacatcgagcttcgaggaagcttaagcacctgaaaaacccgctcctgcgggatgccaagatcgttaatcgtcgagaacaggacatttgccggtaacccctcactgagcaacgcgaagcgctcgccgtgggttgcgcgaaagacctcgccgtagctgacgagtggccgggtatgcccttcgataggtacagttggaagagttgcttccgcttttgttactttggaccgtgctttcggctctgtttctggcgctttgcggttgaaggtgactgtcatgataatctccattgagattacagcatatctcaaacgagacaaaaagaaaggggaagttcctttgcagcgccccatccagccaagaattccaaccaacagtaccggcaccgacagtaccgagcgtggtcgcagcatgtgggcgcgggtacggtcgacaacacggccgtggcaggcaggtaatcggccaaagctgcctgtgaagacttgagtcggctacttccgctatggattcgttaccggacgtagggtaggcaatctcaccgacctgcagctcgacgaaaatggccaggaaatgaaacgaggatgacagaaatgcgaagggacaaagcggattcgatgaagcgccaataaccaggaaattaccgggcggttaaacggggggaaaattcggtacgcaggaagtcggaaaggtgctgcgggcaggcagacgggacaccagtggcgtcgtaaaattattaaagagcgggtgaatttttatgaggtgctcgtgaagacattcgggtaaaacactggtcgatcacttgggaagtcaccaggaaatacctcacaaatcatttgccgtgatagcaatcccgtcagcaagtcggtgatacccatatcgtattgtttccactttggttctctcgccgcgttgatgatgactttccagccagcaggattactcgcagcttgccaaaacagaacgtcaccattatcagttacgccaaatggtaaaagaccatttggcttcgggaataacgggaaaggaatcgcctctccaaaggtctcgctaagatcactcaacgcgctaatttttattagtacctgatccaacaaatttagatttttattagccgagaatggattaaaaatccacacaaaaccgtcaatgcttcctgtcccatacatctctataaaacgcttatagtcatctggtagtttgccaagctttttctcgacggcagaccaaccatcagccacaggacggtcaacagggtcaattggcggctccagtattttttctaactgctcgatactcatgtcaatcagtatttatctgttaagaagcgggttaaggatcgtaacgtcaagtgtaaatccttgggaaccagtgccattgatggtgataccgcgtggcgcaagttccgatccgttatagattggcgtggccgaatacctcacaacttggccttgctctaccgctgagcgaacttgattctcatagcctcgcataaccggagagttagcgggattctgctgaatggttacaaggttacgagcatcgcttccagaaccaccaagctgattgcccaataaatgtcccctagcttgacctgaggcacctccctcaaagcctggtggaataattgatctgcttgcagggctaccagttccaagcatatcgcgcgttatatttgcgctcactccagtgggccttccaaaaacatcaagagcaccatacgacactgctctttcgaccccacttccaaccgcctttattccgccagcgatcagtccgcccagcgaaaccgcacccttgaggacaccggaacccagcaaatcatctggcgagaacatcggagcctgtatcgcattggcctgcacgtcaaacgcgttgggcacgttagagtgcatcgggacactggttagcctttgactccccggcgtaaagctccccatgccaccgcgcgaatctgtcatggttgcgccgtaatagctcaggtcattcgccgccagcatattgagcagcgggcttgacgcttccagtccaagcgggtcgatcaggttgatcgggttattgccgacatatgcataaggcgacaccgcgtccaccatccccatcggatcacgcgatacaaaccgccccagccccggatgctgataacgcgcccggtagaacgtcagccccgtcgcatccggctcgcgtccggtgtaaccgtactgcgggatcgtgccgcttgaggttatcttgttgccccaggcgtcaaacctctgattcgccgtcagcgtgccgcttatgttggcggtgccgatcacgcttccgaggccgtcctgcatgtaagccgcctgcgtcgcactcgggccgttggtcgcaccggtgagtctcaagagcggctcatcaatccccgcaccctgcacatacaccgccgccggattgccactgacgctgccgttccactcggcatggatgttatcgccgtcatacagatagctggtggtgatggcgccgctgaccttttgtatgcgacgaccctggtcatcgtaggcgtagctctcggcgactgcgttcaacccggtgcgggtggcggtgttgagatgatcgagcgcgttccacaccagagccagggtggtggcgccggtacccgtggctgtgcagtcggtagcggtcttggtcacagtgccgctttcgcacagcttcgtcatatgcccgtcggcgtcatgtaccgccgcaccagtcagcgtgccggtgtcggagccgtcgtggatttcggtaagttgctgcgcgctgtcgtacagatacgccgtggtcgtgcttcccttggtcttgctcctgcggttgccgaagatgtcgtagctgtacgtctcggcggtgccgtcgctggcgctgatcaagcggtcgaggttgtcgtacaggtagctccagctcttgctggtaacgccgatcttttctgattgagtggcgcgccggccctggttgtcgagggtatagaggtggctactcagaaccgtgctgttgaaaaggttctgcttttgcttcaagccgccgtcctcgaaccagctttgcgtcgtgcgctgcccggagttgaggcgcgtctcgaccagccgcccgcctgcatcgtaagtgaaggcgatggtctcgccgttgggagcggcgacgctggcgaggcggccggtggggtcgtaggagaggctggcctggtggccgtcgctgtcttcgaccacggccaggcgtcctccgggcgtccagatatagctgagttgcttgttacctcttgagtcggtcacgctttgcaagcgcttggcaggatcgtaggcgtaggtgtaggcgacgagggtttggttgctgccgttccgggtttcggctttggtcaccaggccgagcacgtcgcgagtgtagacggcagtctggccgttcgttccgggaacgcttctctgtttgagctggccctgggtttcgccgatcagtccttttgtgccgtagctgtaggtggtgctctgcccggcggcgatctgcaagggggtctggctggctatcagctggttgtgcaggttccacgtccacttccaggtcttgccgttagggtcggtttcgctcagcttgcgaccgaagtcgtcgtaggtgcgggtaagttgccgcttcaccgccacgccgtcgagggtgcatgtcttgctggtggtgtcggtggtgctgccggcccagatttccttgacgtcactgagcgtggtgtagacggtgcaggtgacgggacggctagtgtcgatggtgctgacctgcgggccaacgctgcgggtcagtcggccgagttcgtcatagaaacggtagctgtcgcggatggtgccgtcggcggcaagggcgttgatctgggtagggcggccggcgccgtcgtaactggcgacttcgactgctttgctctgggtttgcccggtcactttgggcagggtggtcttcttgaggcgcccgtcgccgctggcgtggtagtactcgtagttcgtagtcaggttgttggggtcggtactgctcctcggtttgccatcggcatccagaacgaaattgacgcggtggccttcctgattataggcgccggtgacgcgtcccatcgggtcgcgatcgatgccgatgctgtaaccgtcagcttcggtgacctgggtgacctgaccgagcgggttgtagttggtgagggtggcattgccggcgtagtcgacgcggcgctcaatgcggtcgaggtcgtcccaggcggcgtagtagccatcaaggtagctgccgtttacggtgaggccgacggtgagcgggttgccgttggcgtcgtagacggtgtcccactggtggccgcggccgtcgggggtcttgattgggcggtcgaggctgtcgtattcgctgtcggcggcataccacttggcatcggggccacgcgtcatgcgtccgaggctatcgtgggtaaagttggtgtaggtgttggtctccagcgtgctcggcgtgccatcaatatcgccgcgccgagtgaggctgatcggattgagtttgttggtgtcgtacgcggtttcgaggctggggccggtgccagtggcggcgtcgcccagtaccgctgatgtccaatcgcgcaggctgcggactttgatcgaattaccggcgctgtcggactgtacctgggtccaggtgagaatgtcggtgttgccgggtttggtgtcggcgacgagggtgacgtcggttttgacgcggatgacgtcggtgagattgcctgtggtatcgaagcgattcaacgtccagttgccgttggcgtccttgacacgcctgggctgtccctgggtggtgtggtcgcggtactgcagggttctggcgctaggcagggtgacgtcgctgaggttgcccaggctgtcgtaatcgtaactcgtcttcatgccctgcggatcggtcttgctgagacgcaggtgggtgcggccggcggtggaatcgtaggtgtagctggtctcggcgccggcctcgtcggtgatggataaggggttgccgttggcgtcgaacaggaagcggcgttcgttgcccagcgcgtcgatctgtttggcttcgcggcggaactcggtccaggcgaaggtggtggcggaatcggttttgaggctgctggttgtatcgaacggggtgtggcggaagacccgtccgttggcgtagtactcgaacttcatgccgttgccgcgcggaagctggtattgcttcattgcgtgggcgagcttggcgccgtcgaggctgctgtagtactggtaggcgacggcgttctggctgccgaccaccgcgagcgggtttttgaagctgatgaggtcgccattgccgtcgtaggagtattgccactgccgcccggtccaatcggcaatctggctgatgcgggtgccgttgtaggtgaaggtcagcgcacggctgaggctgtcgttgatcttgcagacataagcgccggtacaaccggtggcggcagtgtatgacagggccaaggtgttgctgttcttatcggtgatgctttgcaggcgcgatttctggctggtgtcggtggcagtggcggtgatgctctcgaacacgtacttcatcccggagcgttcggtgatgcggtaggtgccgccggtcaggcgctcgagggtggcgtagatgccggcgctaccgctgaaagcggcgcccacattgatgttgccgcttgtgtggttgggagtagagaagaagcgttcaccgccggtgccgtcggtccacgcgactttggctacaccgccttcgacgccatagaagcgcaacgtatggttgaagctgtgggtccagccgtagccaagggggccatcattggcacccttgctgttgtaccagcgctcaaacaccagtggcaggccaccacggcccttgatggcgatgtcgcgctcgctgtggatgaggtttccggtgaccatgttgacggggtcaccggaaacgctggtgccggtgccatagccgttggcggtctggtagccgttggtgccgaagttctggagagacagcggggcatagggatcggccttaatgccggttcccaatgatgggttgtagagactgccccacggattgccaactgggtaaccacccgaggcggagacgtcaggggtggtgccgctttcaccggttgaatccgtggcaatgctcgccggttcgatggtgacgccaccggaatagccattgatgggaaagccggcgcacgcagttttgcatttcggatcgttggcattcgaggtaaggcgctcggcataataggtcgcacccagccagccgctggcgtcggggtacttaatcagccggcgcggaatcgtgagcttgtagccatagttgatgtaatcggtctggatctgggtgacagtcgtggggttgtagctggtacctgccgggttgcagtcggcggtgatcgtcgccgagcaggtttgcgtgagcttgtacttgaggttgttccagtcggtggtggtgttgatttgcaggatatcgatgctctgctctttcgcgaactgcaaaccacgtgtggtggaaatggcatcgagattagcgacttcgttccagatataggcttcgtaggctgagctagcgaaaccggccagcttgaaggcacgcatgtccgtgctgctgggcgtgtccaggcgcgagccggtgtactggccgcccggccagtcaatgaggaagcccttgcggaacaaaccataaggcaggtcgaaaaggtaattaaccttgacctgggcagaagtcaaaccaaggctcacgccgacggtgccagattcgccgtacagttcgcccgcgcggtggctggcatcggcaacatagcggctgtatttactagcggcgatgttaaggaattcgccctcaatgccgtcacggtcggcattggggttgctgccgttggcgcgcacattggccagcaattgttccgaacgcttggcgagataggtgtcagaagtgtgccaggcgtaagcatgcagggcgtgcagattggcggcgcctatgttggggtaggtaacatcggttcgcgtcgcgttagagcccagttcagccaagctgaccgtcagagttagcttgttgttcgttgaacatagcagcgtgttgccgctgcccgcctcgctagtctgctcgatgccttcgagcttgatcgacggcaccatgttggcggtggccgcgcaggtcggggctgctgcgggatcgatggcgttgaaccaagcgtcgaacgcggtttgatcggtgggggtcgcgcccttgaacgagagcgtcagccgtttgctggccaattcgacgagattgaggttcctttgcgccagcaagctgttggccgaggtcttgactgcaaccatcagccggtacttgtggcggtcgggcagcacggcggtttctgcggagtcaccgtccacgccgctccaactggtgtatttcaaaacctcgtacggcggcacgataggcaggatatcgaaacgttggcgtttaatttccgatttgtaggggacgtctgctagcgtgttattggcgtagttgggcgccttggtcttggcgtgggtggccacttcgtcctcgaaggcttcctgcggcaggctgtaattgccctgcgcatctaggcggctggccagccaagtgctgtagttgaagttgaacgtgccgtcaacattgaccccggcctggtaacgctgatccttgtacgagggatccagcggaacccagcggtggccggagtcgtcgagcgcggtgccgcgataggcggcataggggaggcaagcttcgatccagacgtgcgccaagctgatggaattggtgccagaagcggcggccgggttaccgttgctcgccagaatctgtgctgcagccgtgtagctcttggcgccaacccagcgcggaccgcgcccattcgctcccagtgccgtcgcatcaagcaccgagatgttgccgcgcacatagcgcaccggaatgttggaggcgcgcagcaaggccgcgagcaggctagcctggtctgtggcgccgcccgatctgctccacagtgcgccgaggccgcccttcatagagccgtaataaggctcgaacttaatgttctgattgacccactcaaacatactcaccgggttgtaatcgagctgcttggccaaagcgacgatgtctggatgcgcctttggcgcttcagcggtatcgtataggtcggcggcagtgtagccgcaggcggtagcctcggtcggagtggaacgcagcgccacctggacgaaaccgtcacggctggcaacgcgctgttccattaaccaatacgcatctgagacaaagttcggcacgaacttggcgggcggcagtttaaccggcgccatgggttcggcgtggcgccaattgggcggtggcagctgctcgaccggacgcgcggccaaccagcccttgatgcgactagcgacccgtttggcgcggacatcgagattggttttgtcggccttcgagaggtcgtccaggtctcgggtgatggcatcgaagcgtgtggccagcttctgcttgaactttgtggcctgcgacgcctcttcagattttccctgcgttgtcagcgccaccacttcacgatcaagccgacctaacgcctcctctttcaatgtgagcagttcctggcgcttggcggctgcttccgcgcgacggccggcgagggcttcttgagtctcggtgtccttcagagccttcttgccgatccgtgaggcatcgcgttcacttcggtcagcaacctccaagccttcgccgagatgccgctcaagcgaggcgccaagtggatcagggcgtccatgctgacctcccctcacagcctgaacaacttccgctgcaagaggggcaacgtccttgtgggacgcggcttgagttgcgagcgccgttaagcaggtgaacagactcaaagcagaggcagcaaggcgcttcatggtgacgctccatctagtggcgttgttgtgtttttgggcgaacagcttcatttgtgttatgtgtacgcggctgacatgcttcaattgaaatattcgataaccgtatcaaatccggatagtggattgcctatggcgtcatatgccttgaggctaaccaaattgagggtcgtcaccgagcctgtcacatagaacttaaagtctttaagaaggcttaggggctcacccttgactggtgtgagcatgacttttagttctgtaccgttgtccgaccacatgaggtttttgagatcgcctctcccgtgtgtgacccaaggatctccaatagcgcccagtgtcctggagaacaccgcctcaatcgagttgggtatcgtccctacaggaccggtaaacttcacgacgaaatgagacgctcgttcagctccggtatagggcgcgctggtcggggaagtgccgttgaaatactggaacggctgggtggatgccaccggacccggaagcacttgaatcgtgatgggcttattagcgttcagattgacactgccagaagtaaactgaagcgacgctacaccttctccgatatccgttgggagatcgaacagcacaaaggtttcggaccagtcgttatcccctccggtcagatttcgtacaccattaccccatgcatcaaggatgtaatctggaaattgggttccgtaaaccgtatgtgccctgtcggcaacgacgagcttggaaacagggtcgggataggcttggaaaaccgtccgtattctggtatcacttggactgtatgtgtaggctgagccgaccgcgggagtaatgtttatggtgatattgtcgcggttgagcttctgccgatagccaattgctactgcgatcgtctcaccggggcgcgcgcctgttgtgaaagtattgacgcccgtacaccctatcaggaatccggtcagacagaccaaacacttcttaaacacgctgacatagcaattcatatattcccccactcattaggcatattcatcacatcgatcaattggtacccaataccctgcggatcatctcgttcagatcggccacattgagcactccgtcctgcaccaagtccgccaaaatcttctgacttggcgtgagcgtgatcaagccaagcacgtcccgctgcagaagggccacgtcagccacgtcgacgatgccgtcgccattgaggtcgccaggtgtaccaggcaacacgatttcgatgagaccgatgagcagggtctgggcgccgccggcatccgtcgccttgtagccgaatgagaagctgccaagagtggtcggcacgcctgagatcgtgccgttccccgccaacgtgaggccgggtgggagggccccgttcgtcagagtgtaggtatatgttccgctgccacctgccgcagggatgaggttgtagctgaaggcctggttgaccgcgccacttgcgctgaagagggtggtggtaacgcctggcactgaattggccccgttgctgatttgtccttgggcatcggcaacgaggggctgggtgcccagtttttgctcaattgcatcgggcaggccgtccaggtcgctatccacgacttgggcgccggatgccgcgggcaaggcagccaaaacgcgggcaacaacaaagcgggagtcctgccagcctccgtcaacgccctgctggccaacaagccaacctcgggcattgtccacggcagtagtggcggcagcgtctccctccgcggcgaacagcgctagggtgcgaatcgccatggccgtcgctaacggtgtggacgcctcaaggttaccggtctgggggttgcgctcggcgaagccgccgttaccgttggcttgggcaatgagccaggttttggcgctggtcatggcggtgtcgattgcgctgggagacgtcttgttgcaaacactgccggacagaaaacgcccagccagtcgctgcttcttgaattcgtaaagcatgatcgcagtggccaccatcgagccggtcgcggtatgcgatggctggccgttttggggcagcgcattcggccaggcaccattccagggtgggctggcaagctgagccggcagaataaagcacaaggcggtggtcgtcaggttattggtatcgttcgtgtatgtcacactcgcactgcgaagcgcaccgtagcccagcgctgtgtcgatggtgctcgcgccatagcctggataggcaccccaggtcgcccctccgctcgtcggcaaactgccggattgcaccacataaatattgcgctcatcgcggatcgcgcctgcgatagtcttggcatcgcgccccgcggcagcaagtgcggtagcttgccacgcacgcgaatccaagctaccacccggcgcgttggtcagccaagccagcgcgcgagcgtactgcggcgaaagctgcatccctgcagctcccatcgcttccacggcggcagcggtggcttgttcctccagacctttggcgccagcaaatgcaccatcgcctcgctggtgtttcaccagccatgcaagtcctttggcacgagcatcgtccatctcggcgggcgtggcggcctgtgcacctgttgctgcgaacaggcagaccaataccaataccttgctgcggatcatggataaaccctcctcaggttcaagcgttgatggcccattcggccggtcattgtgatttgaattaaatgcagaatttcaggacgcaaatagtttcactaagcttagaaaccggtggctgggattgcatcagcacattccaaattgcattgctgcatcagttgagatttctcggtcaacgttgctgaccgaccggcacggctttccatgcggtcatttaatttgaaatacatatttccccctgtttattagtcccgggtgttttccacaccggtgttaagactttgtcttagtgttaccacgccctgcgcctacgtaatccactcacccaaaaactcaaatgcgcgaaatgctggcgtggatgtcgagcaaagaggcctacggctaagcgctttctacttgttattttcttaaaagcgcagaggaagcggccaatgaaatattcatggcgtatagctcacgttaggaaggacattcggcacaggatttcccgaagcgtcataggccacaacattggcgacagccagggaacccgcaaagggaatgccgcttgcgacataaaacttgaaatgcttcatgtccgtcagcggcgcaccatggctggtgctaagaatgaccctgagatttgtcgcgccatcatcgcgccaggacacatttttaagatcgccgcgcgtattcaccacccaagggatagctgtgcctgcaggacgagtcaaatcgacctgaatagaatcagggatcgtggaaccagcgaaagtcacggtgtaatagtttcgtctttgtagcaaacccaaagagccactggcagtcccattgccttggacgttaaaattatttgaagtcccagtaccagcaagaatatttacttttattggacccgacgttaacgctccattgggtccggacaaggaaatattggttattccggttgccagacttgttggcaaatcgagatagacgacagtctggttccaatcggcatcgtaatttgtgtatccagaatcgatatatgagcctatcgtgggtccatgcccaagagctaccccatttgactggccggtagcatactcaaccatgagcttggaaatcggatcagggtagagttgcaccaccgtgcgaatgcctggattaccaaggccatacgtcactacagccccgtttgcatcggtaaattgggcagtaatattggtcttattaaccggttggttccagcctgtggccaacgctacggtatcacccgatcgggcagcagtactaaaggtgtgtgtcgcagcgcatccttgtaagatggccaagaccaatattaaccaaggaaatgattttgtaattctcattgctcctcctgttcgatgtttgacatatcaccctgcaatgtccttactagctagccacccccacccacacaccagggaaccctgagcaagtcccaacttcaattcctgtcggctcaaattactatcccgcctcccggtttgctattcggggcaccagaaacgccggtttgccttggaattgccccgtttccgagcggtgttccatcccccggatggacttatccgaagccagcaactctcacctcccctaatacagagccctcaacgcaaaactgcgtgacgagtcgcaccgtgttcatatctaatccacgacaccaaaaagaatttattaatattgttgcgtggttcggattaaacaaatttattgatttttcttttgagcaataagcaggccaactttatctttatactttaatatcaataagatacgtttcttaaatagtttattcgctcacaaaaagggtctgaaatcgcatcatgtgtaaagaattccgacaaacatcaaccgtcacgccgaaataggtcgtcccctgttgcataggaaatcagaaagctaccgttcagtggattttctggcttctgtccggtaacgaatccatagcggaagtagccgactcacgtcttcagaggcagctttggccgaggacccgtcagtgggatgggcggggcagatgtcgcttcttcggcctaagctgccggtggcgttcagagaaagccaggtccgctatgtgctgtacaccagtcgttgattagcaattcaagctgaaatggctgcttccagaaacggcaaattcacccccccgcccttgtcagacattcacacattaaccccaccaaagaaaacgggagccaaagcccccgttgtaatcgtgcaaaattgaccattcagactttggctagtttcctgcgccgtgttgcgactccaatcaggcctagtcctgccagcatcatcatccacgtatccgcctcggggatagcagcgacatcaccgtcgcgtaccgcccaagcctgtagttcaaaatccttattaagtgaatactgattgccagtagtcatgtagaacatccaggcgcttggtatctcggaggatggttgagggtcgcctgaagatatgatgacgcccgatccgcctagatcagcgggaggtggtgcgtattcggttcccgaccagtatccgtatagctcgatatttacaaattgaccggtgttatctaggcaagtatccgcagggtatgaaatgtagcagccgcttatcgctcccgtcggcgtgtaatagcttgaattaccaaggttaacgtggaacatatatcccatttcgctgtttggactggtgatgttgtagctcgtatcagtagtgccatcgaatgtatagtcggagttgaagtcgacgccattaacaggtttaacagtgggcaggcgccagtcgtcaaagccaccatagacgagttggttggcccacgtcatagcttgggtccaagtcatcctaccgtcggcgtcgtacccgctagtttcggcgtagttggcatcctgtagccaggttacgttcagcacgtcatcatagatcaagcccccaccgcggtcatgcagcgcagcctgtgctgcgccagacatcccagcggccagtactaacgcagtcatactcattttccttgcaatcatgtttccccctccctttgttatgtagttttaagcagcttcgagaataatcgaggttggattaagcgggaaccatgccaagattttcgatctgtttctattcaatcagttgacgaccaatgaatagaagcggcgcgagattgtgtaaaaaatatcgactgattgttcgattgtcattatggccggtagtgacggttgatttaatgtccccaaagcagccgctggaaaacgatgcttgccatccaatgactgcaatgcgcaacatagcccaataggtgctcccggccaagagcagacgtttgcagtgcttaatgcggaagtccggtagccgatctaagcagccgctcaacgttggagttgaggggctggacgccgcaggcggccagccccagtgagcgaagcgaacgactcgaacgaattgttagggctttgcatatgttggagcatattccgggtatgcatgatcgacacaaatttccatgccttttaatgcgtggttatgacaaccagcccacctgcattgttttcccccttcaccaccgtgaaagtgaacaaagaattcacgtcgaaagggtttgtcgtcaaaatctggccaccctttagagtcgggcaccttaattgcaaaatcagagcggtcgtcgacgtccaactgccagtatgtgttgcagtgtcggcaccggtagagccgaagccacggttgctctgcgacaaattcaaaccaacggacgaattcttcttcggactctccatagttaacgcagctagaaagctcagcacagcggcaattcatggaagccctaacgtttgaattcaccggcggtgcgtggctttatcgcgcagcgtccggtggaatgatgggttgggcgtggagctaccaacgccaacggtatctgcgtttgttttcatgatggcgggcaatgtcgatccctaagccagaacgtcgttcatggccaaagatggccacacttatacagaatccggaagccaggagcaggaataacgctgcgccaaggcgataaagcaaactgagttcggccgctctcggaaagagggcgagcccaatcatgattgatgaaaagagaaagaagattgcgcccacaaagccaacgaggcgcctaacaaatagccaggcattcgcggcgagcgtttcgacagtggatggcgggtcagatcgatgcgagtaaaagtaccctgagatgccgatcattactgcgacgaatgcaaacacaaacgcggctttggcattcaggccttcggcttttacaactgcgacgacggctaagaaaaccagcagtattaaagcaacgcgaccgttcattgtgacgcccaacagttaatcaagagacccatgggtccggacatttattaatatagagacggctgtcatggcggattatcttgatgatttttaaagttcttctcagttcccggtctctatattacgttatgaagatggaggccggtgactgatggattatgcacctgcttaagacgctcaaatatcggcgagaagtttgagatgcgattttgaataggccgctttccctgcattaacggtcgttcgatgagcagccccgaccgtctcttcagggtcgatagcacgcggtcgcggagatagaaagcggccgttcgcgttccccagcggtccaatggctggtaacgaatccatagcagaagtcgttggtttaaatcccaggggccgcttaggccgactacctgcctgactgcctggattgtcgaccgtcgcatcctcggccaaagcggtcttacgactagcaaagcaggtgtgtccgctcacggcacttgagcggtcggatgccagtcagtcacgctgaatgtctgcttcctcgtacggcgaacgcgtactaccgacccagaagagacggtcggggcttgctcatcgaatgaccgttgatgcagcgaaagctgtctattcacaatctcgctcccgacatttagcagaaaaacctgataaaaaaacactagtgctacacacttgacacttattatcactagtgtttaactgtcgttgccccatcacaccacacaggagaccgagatgccgcaattcaccgttgacgaagacctcgctgcactagtggaacgacttgcaaaaccgaagccgttcgagaacctttcgtttaatgccgcactaaggcgtgtccttcagcagcacatcaagccgaagaaggcagacgacgaactggaaaagttgttagccgaatctatggctttggcgaagagagcgccaaagaaagctccctcacccagtcccggacaatgggctgcgagtgtccccgatctaaaaggcaagaagagtctgattacctggcaagcgatttgcgatctgctcaagatcgaaactgcaggtgactcagcgagaagaaagttgagaaattgggtcaaggcaaatcgccctacttggccgtcggttcccgaacttagcggggactgacaatgcccaacccatcatttgagctgacctcgcgcataaatccgcgcgaggccgctcaattcaaacgttaagcgtctcaagaaaccctatgccctacgagagtgagaatcactttgagtcacgcatcagagaaataattgccgagcacgtcacacagcgtcaaccgagcatctatgcgctgcgaaacaaaaaggcagtggacattctcatctgcaaggatggtccgtcaccacaactgttcttcattgaggttaagtaccacaaggcaaaccacggtcgccttgggtttggtagcggcaaaggtgggggctttcaaccggagattctcagcaatcaacctcagtactttgagtcaaatctcagatgggcgttggcaagtgaaatgcatcatcccgagaagctactattcttatcatccgcgacaatgcgtcagtatctttcaggcggtgtgatcggcgagaaattcaataacattcaggaacgcatctttcgtgagcaaccttggcttactgaacaagaattcataaatgaattgcagcactggcttggcggtggcgacacctacccatgacgattgatcttcgtactgtctccccctttgatcattggacgcatgctggccagtaacgggctttcgatatttatgactgagggtcggcttctcggcctgaggcgccggtggcgttctgagcaaaccaagtctgctatgcgctacacgcctgtcgttgattagaaattcaagctgaatgactgctgtccaaaacggcgaattcacactccagactgatttcagccgatcattttctgcagcgaagcggaagtgagtgggtcgactgaagcatcttgttgggcttgcttagagagggaatgcccgtcaaaagtcctcgccaaaacaggacttgacgactaatttctaagcattgccttcgcctcttcttgaagtattcccgtgcaaacgctcacagcggcatccaaagcgcgggccctttcaatttcttgtggtgagcttgacgatgtagggtacggttgttcgttggccttgctgatgaacgaaaaacacgcgtcacgaaggtaactctggttgatgtctttaacgattccccgaacttctttcgccaaggctttggtattcgcggcattcgctcgggcgaattctcccaattgcccggttgtggaaacgcccgcagcggttcttccgcgctctgcctccaataacttggcctttgcgtatgccaattcgtcctccgcagacttagccctccgctgtttgtccttgaggacgttctcggacgtcttggctgtatcctgggccgtttgtaacgacgtggtcagcgaatcgatgacggtctgctcgggtttgtcagccgtagcagcttcggacagcttcttgttagcgtcctcgaccgccttcagattcttctggtgctcggtcgccgccgagtcgacctccgcttgggtcttgagaaggttctctttggctgtggctactgcggtctgagccgccgttacgtcacccgacgagccacccgtcccagcattggccgatgcatacagtgcggcttggccagcgactactggacccgtaagctgctcgatcgcgatcagtcccatcatcgtactttggccgcgacgcagcagggccgaggcttcggcactgtcgattgcaccgttagagtaggcctcgcaaatccgatagttaaggtcgcgcagcagttgtattgactgcgtacgaagaccgatggaagctgcggattctgcgaatcctccggaagcagatcccccggagcccgaaacattactgccggacagggcgccgctggcacccagaaccgccaaggcgtccgggctgggctcagcacagatggtgaggctatcttctaccgtcgtattgccgctggtggtcaccttgcgcgtgttcttgcgcgaatagatgacacgctgcttggcgtcgatcgccactgagctattttcgagatctatgggcttgttgtaagtcgtccagtacgcacagcctgacagatctactgcggtcaccgccaaaacaactatcattgaaacacgcatcatcccctcccccgagtcgatgtaatacttcgacgcct

SEQ ID NO: 14 - DNA, 31505 bp, Artificial Sequence
  Synthetic Oligonucleotide
tgcacaacgccacaatgctgctgcggtgagcggacgttacacgcgtctttaaacgtgatccaagggtgtccggtttcgaacaacatggtcaacatcttgcgccacaggtccttcgcaggcaggcgacggtagtgcgtaatttctccgctatccgctttggcttcataggccacgtacgcggtctcaaaggctgacccaaataggtcgtgcaggtcttccacgtcggcgggtgagaacagcgtccagtcgccgccctccattacgcggcgcataaataagtcgggaatccagttggcggtgttcatgtcgtgcgtacggcgacggtcatcacccgtgtttttacgcaactctaggaattcttccacgtctaagtgccaagactcgaggtacgtacaaaccgcacctttgcgcttgccgccttggttaacagcgacggcggtatcgttcacgaccttgaggaacggaacaacaccctgagactcgccgttggtgcccttgatgtgtgagcccagcgcacgcacgcgcgtccagtcattacccaagccaccagcgaactttgacagcagcgcattttctttgatcgactcgtaaatgccgtccaaatgatcaggcacggtggtcaagtagcacgatgacaactggctacgcaaggtaccgctattaaatagtgtcggtgtgctggacatgaagtcaaagctggacagaatttcgtagaactcaattgcgcgggcttcgcggtcaatctcctcgagtgccagacccatggcgacccgcatgaagaaagcttgcggcaactcaatgcgctgcttccgcacgtgcaagaagtagcggtcatatagcgtttgcaagcccaagtagtcaaactgcagatcacgctcaggcttcaaggcggcgcctaagcgctccaagtcgtactgcgcgaggcgctcgtctaacaagtctgcggcaacgcccttgtgaataaaggtagggaagtactcggggtagcttgctgtgagctcttcagggctaacgaagcgtccgagaacctctttaccaatggtttgcagtaacaaacgcgcggtcgcgtaggtgtagtcaggctctttttcaatcagggtgcgcgccgccaagatggacgccttttgaacttcgtcaaatggcacgccgtcatataggttacgaatggtttcgttcaggatgggctcagcgcggacatcggcattgaggccagagcaggctgactcgatggcgtggcgcagcgtggccatatcgagtggaatacgttcgccgttgtcaatcaccgtcaatgttggctcggagctgacgggggcttcggtgtggctcgccttgcgttcctgcgagcgacgctcacggtacagcacgtaggcacgcgccacttcgtggtgactgccgcgcatcaggccgagctcaacttggtcttggatgtcttcaatatggaaggtgccgccacccgggcgtgagcgcaccagcgcgcgaacgacgccttgtgtcaactcgtcaaccgtttcgcgcacactcgcagacgccgccccttgcgtgccgtgaacggccaagaaggctttcatcattgcgacggcaactttgttgggtgtgaacggcacgaccgcaccgttacgacgaatgatttgatactgactgtaggcctgagcgtccgagaatggcgcgggggcttggggcgtcgcggaggcttggcgtggggcatccgacacggcagcggctgtttgcataaagggctttcagttattgttttgcagggtatccgaacgcgcggaacggcggttcagggctgaaattagtggcgctactgcgcatattgcgaatctcagcagacactatacctagtgtttggccctgcatcaacacactaggggtagtgttttcactatattttaaggtgatcaaaaatactttgtatttttttgaaaaccaatggcttagtgtgggcgatggaatgtgatcaaatcaatttttatcgacaaaaaacgcccaatcaaaaccgacgccggggtcgaattttctgccgggtgccacgtcttcgtgacccaccatgtcggtgagcgtcgggtaggccagcctgagcgcgcccaacaggctttgtaagcagtcgtactgcggttgctcaaagcgcccaccttccaagccctctagctcgatcccaatggtgtagtcgttgcagttgctacgaccttgccagctagacgcccctgcgtgccacgcgcgttggtcggcactaacgaattgaatgaggctaccgtcacgctgaataaaaaaatgcgccgatacctccgcccctctaatagtttgaaagtaggggtgggcatcccagtcgagccggttggtaaataagtcgaccacgaacggggtgccgaactcgcccggtggcaagctaattgagtggatcaccaccaagtcaatggccatgcccgcagggcgcgggccacagttgggtgacggtatggccgtggcctgcgaccaccaaccgtcttgccacgtggcatcgtgacgcgacagcgcagcggaggcgtggggtaacttcacgctagtctaggggcttatccccgtgcacgttgcaatgggctttgctgcagtagcgaccgagtcggccttgtacggtttctgccagatcgaggtgggtaccgcagtgcaagcacggaatgatggggcgcggcaggttggtgacggttgccgacgttgccttgggtttctttgcggccttgacggcctcatctcggccctcttggcggccacgcttccaaagccaaatgccgaacaaaatggccagaagaacaacaaaaatcttaatcatgagagtggggtagttaaacgcgggccacgggcactaggcgggggcgacgagcacgacctcaaggacaaaacgggcgccaacgtaagccatgagaagcagacccgctgatatatatagtaggcggcctgcacgcttgccgcgccagccatagcgccaacgggcaatgagcaacgacgccaaagacaaccaggccaatacagagaaaacgcttttgtgatcccaacgccaccccgagtcatacagcacctcggtaaagccgacacctgcgatcagcgtagcactcaaaaacacaaagccagcgccaataaactgaaacatcaggcgctcttgcgtcagtaccgggcggtgcccctcatcgggcaaggcgtggcgaatggcggtatcggcgcggcgcaacaaaatggcgtgaaaaaccgcggcgccaatcaggccgtaagacgcgatacccagtgcccagtgcacgggcagccaaacggacggcaactgcgggtgaacaataccggggaaaagcacgttgagtgccacagcggcaatgccaagccccgcaagcggccagcgcgcccgcaacggcaacttgagtcgggtttcgataccgtatatggtggataccatccagacagtgactgacagcgcggccgcgaacccaaagcgccccgggctctctatccagtaagctagcagcgaggcaccatgaaacgccaaggtcagcgcaaatagcgcttgcaggcttttgacgcctaaggcacggtgggccaaggcgatcgcaaggtagccaaccgccgttgcaaaggcgcagccgagaaacagagggctggtcgttagaatcatggctacagtttaacgctgagtgaggccttgaggggtcaccacctagaaagcagccacaacaaattttcaccttagaggtgacccgtttttttagattgagagtgccatggcttccgccttatcagaacgcctatccagaatcgttaagaccatgcgtggtcaggcgcgtatcaccgaaagcaacgtggcggacatgttgcgtgaggtgcgtatggccttgctggaagccgacgtggccttgcccgtggtgcgcgcattcatcgccgaggtaaaagaaaaggccttgggcgaaagtgttgtcggctcccttacgccagggcaggcgttggtgggcgtggtcaaccgtgagttggtcgagctgatgtctggtggcgacgggggcggctcctccgagctaaacctagccgcccagccaccagccgtagtactcatggcgggtttgcaaggggcgggtaagaccaccacaaccgctaagttggccaagtggttggtggcgcgcaaaaagaaagtactaacagtcagcggtgacgtttaccgtcctgccgctattgagcagctcaaaaccgttactgcgcaagcgggcgccgattggtttccgagtacggcggaccaaaagcccgtagatatcgccaaagccgcgttggactacgcacgtaaacattactttgatgtcttgttggttgataccgccggtcgcttggctattgacgaagccttgatggctgaaatcaaggcactgcatgaggccgtacgaccggttgagacgctcttcgtggtggatgccatgcagggtcaagacgccatcaacaccgcacgggcatttaaagaggcgctgcccctaaccggtattgtgttgaccaaaaccgatggcgactcgcgcggtggtgcggcgttatcggttcgtcacgtgactggtgtgcccattaagtttgcgggcgtcagtgaaaaaattgacggcctcgaagcgtttgacgccgagcgccatgcctcccgcgtgctgggcatgggcgatatcttggccttggttgagcaagttagcgcgggcgttgacatggccgcggcacaaaaactagccgccaaagtcaaaagcggtagtggctttgacctcaatgacttcttagatcagctacggcaaatgcgcagcatgggtggcctgtcgcagttggtcgacaaactgcccgcacaaatggcggccaaagcaggtgagatggacatggacaaaaccgagcgcgacatgcggcgcaaagaaggcattgtgtgcagcatgaccttgcatgagcgtaccaagcccgagttgattaaggccacacgcaagcgccgtattgcggcgggcgctggcgttcaggtgcaagaagtgaatcgtctgctcaaagagtttgaacaaatgcagggcatgatgaaaaagatgaagggcggcggcctcatgaaaatgatgaagcgcatgggcggcatgaaaggcatgggtggctttcccggtatgggataagccaccgcagcatgtgcaacgcctggccagagcgggctttacgccaccaccacctcgccgcgcaaagagtgcggcaacgcctgcgtaatacgaatatcgagcatctgacccttcaggcgctcggggttggggccgccagcgaagttcacgatgcggttgcattcggttcggcccatgtactcggtggcatcctttttggacggcccctcaaccaacacccgttgcaccgtgtgctcgcgacgggcgctgatggtgcgcacgttgtcttcgatcacgctttgcaaatgctgtagacgcttgagcttgaccgcgtgcggtgtctcgtcatgtagcgttgcggcaggcgtgccggggcgggggctaaaaatgaagctaaagctggtgtcaaagccaacatcggtaatgagcttcatcatttttgcaaagtcatcttccgtctcgcccgggaagcccacaatgaagtcagagctcatagaaatatctggcctgatcgcgcgcaacttgcgcaccgtgctcttgaactccaaggcggtgtaaccgcgcttcatggccatcaagatacggtcactaccgtgttgcacaggcaagtgcaagtgattgaccagttggggcacgcgcgcatagacatcaatgaggcgctgtgtaaattctttcgggtggctggtggtgaagcgtatgcgctccacgccgggcaatgcggctacatactcaatgagcagggcgaagtcagcaatctcagccgttccgcccatcacaccgcggtaggcgttcacgttttgacccaacaacgtgatctccttgaccccttgctcggtcaaccccgcgacctctgccaacacgtcgtcaaacgggcggcttacttcttcgccgcgtgtgtagggcacgacgcagtagctacagtactttgagcagccttccataatggagacgaaggcgctggcgccatcgacgcgcgctggcggcaggtgatcaaacttctcaatctcagggaagctgatatcaacctgcggcttctgagcgcgttcgcgctcattcaacagatcgggcaagcggtgcagggtttgagggccaaacaccacatcgacaaacggggcacgcgcaataattgccgcgccctcttggcttgccacacaaccgcccacaccaatgagcacgccttttttcttgaggtgcttcacacggcctaagtcactaaacaccttctcttgcgccttttcgcgcacagagcaggtgttgaacaaaatcagatcggcctcatccacatcttgggtgggctcatagccttgtgccgcttgcaagacgtcagacatcttgtctgagtcgtacacattcatttggcagccgaaggtcttgataaaaacttttttgctcatgtcgcgttgcttgggttaggccaacccatgcacgccacgcaccagcgcgagccgcgggtgcgaaagagagcgagggccggcgttgcatggtgtagatccagtggccggcgtgcagacgcgctgcacacaaaacatgattgtaatacttgggcaggcaataaaaaaacccggaaaatttgcaccatccagacagaaggcaaacacttcttccggagtacggccgtgcatgcgtaccgttttttctagcacggccatcacatcacctcatccaatttgtttattgctgccgcaccgaacggtgccgcgtagcgcgcccagtgagttggggctagggctctatcgaaactgcgcagataagagactacatcaaaagtattaattcctatagactgataaatcaagtccctgcttagctgtttttcacaacgaggtgccagtccatggatcacacaatcacaaaaccagcgcgcgtcgaaggctacgccgtccaccgtatggtcgccgctttggtagacgacgcacccgcgctgcatctcgatgccggcgacaccctaaccattcgcaccgatgcgcccctgcccagtgggcatattgtgggcttctcgttgcgtgcctgtgtctctgtcaagaacaaggggcggcaccgctatttccccagtgctgactggcgctctcgccacagttggctcgagcgaaaaggcgtacagcatggcttcgaagtcatcaccgtgcattgctctgccaaacacttggtcatcgaaaaacaatctggccaattcagtgttgatgacaccttgtttacgggtgtcctcaaagttgtcgattacgacaagtacaacgccgcgctgctatcgggcatcggcaacacggcacgcgccttcgggttcggcatgttagttatttaatcttcaccaagggaaaccatgccaaagcaaaccatcgttatcgacaccgttatcaccacacaaggcccgctgtctatcgccatgcccgtcgcacagggcacacgggcaaacgactacaacaactttccattgatggcccgtgggcaggatgaactgggcgccgtattgcaaacagcctacctgcccgctagtacggtgcgtgggttccttcgccgtgcggctggcattgccgcgatggaaaagcgcggcgtaggcaacaccacattgcagcaagcgtattccgatattttggggcagtctaaagacgccaaagaaacggtggacttggtccagctgtctgccatacgcgaggcagaccccatactcgacctctttggttcgtggtctatcaagtcgcgcttactggtgagtaacttcttgcccacaaccaacgtgttgccacaggccatcacgggtgtcagaaaagacttagaagacaccgaaggcgtgttgaccctcttgagtgagaccgaccaacaggcctattacaaccgcagtgacatcaacagccagcgcgcagccgctgacgcagtcgtcaagggcctcactcgtgacatcagaaaagccaaaaaagacggcaacgcactcactgacctagaggcggcgcttgtgatcgccgacgcgaaggccgtggccttaaaaacggatatgggcgagatggcgaactcatcacgcaccatcaccgagttttttgccttgcccgctaacatggccttgcacggacgcatcgtggttgagcaagccaaggagcgtgaccttgcattgatcgtggaggcgctagacaccctgtctattcgccccatgttgggcgcccaagtagcgcgcggctgtggcgaggtggcggggcagttcaccatcaaggtggatggcatcgtggtcaagacagtcaccacgggcggctgggtgcctgcgcaggtcgaagacttctcgtctgatgcgcctgcaccagccgctgtctaattgcacgtggaccagttacgaatcaccgcccacctcagcggcccccttgtgacggggggcggctacctcacctttgatgcgttgctcgcctctgccacttacagcttgacgcaagacattgagcaggcccacaaccagctgccacttaaacaagttgccggcctgtaccacgccagcgccgccatttatgaacccgttgccatcggggcattggctattgtgcaagccatgcgtcccgacgacctgtggcttgaccaccagtggttaaagaagaacaagcgcggcgctgtgcacaccaagttcgacaacctatccgacaacatactgaccacctacaagaccatagcggcaccgaccatgacctggtactgcgaaggtgatgcagaccgcattcgtgtcttactagcgcatctacccctcattggtaaaaagcgggtttgctccgtgacccagtggaccgttgaggcgggcgagcttgacggtctgcatggctatgccgatgagccactgcggcctgtacccgttgagctgtgggatggtgacaagagcagccccatcgtggacgcggcatggcgtcccgcttattgggatgcgactgggcgcaccgcttgttttgtgaactgagggcacaccatgacgacgcttgaatttttaatcagtacttcggtcgccacctcgttgcgcaaaccggtgatgcgcaggccgatgcaacgcgcacgctgtcgtctggccacaaaatggccaagggtggcacagcacaacgcattgcatcgggttgggcggtgatctcagaagatgtcagcacgcttcaattcaagctggcggccaccggcttaagttacggcggacagacgcgttacgaggcttggctagatgcgcttgaggcatttagcggcaagcccatcatgcttattgagtttgataagaagcctgtaccagttaccaacctgtttcgtacgcatgatttacgagcggtacaggtgtgttcgcccggcggggcggcgctatttgactttacgcaagaacccaccgctgagagtggtaaagcgcacaaagtgctgtggaaattaaaactagaaaggctaaaaagcgctgttgaatcaagcgcttgagccacatgagatcaagccaccctctaaatgggtggttactagaactcaccggtcagccactcgtttgttttgcggatcaagccaccgtctaaatgggtggttactagaacatgtcgctagttgcgctttacgaaggcaaagatcaagccaccctctaaatgggtggttactagaacgacgtgcttggtgacatacaacgcgtgcgcagatcaagccaccctctaaatgggtggttactagaactatgccgtccagcccgttcgtttcaagccttgatcaagccaccctctaaatgggtggttactagaactatgccgtccagcccgttcgtttcaagccttgatcaagccaccctctaaatgggtggttattagaaccaatcaaatatctacgcctaccgtaaaaatgatcaagccaccctctaaatgggtggttacttatttacagacataccatgggccgccgtgcccttattaggagttcaccgatgtttcgttcctcagagcagcagcatttctgcaatgtgcttattaagcatttgaaacgcgtcgatgcgcccatattgctggaaggcggggtgggtcttgggaagacgcgtgcctacctggccgcactggcaactacgacgcaaacggttgccattgtgttacccacacaccaactgattgaccagttgctggctagcgctgacttgtcagccgttgccttgccattggccgtgttcaggccagccagtcggtttgacacacgggaggcgtaccaagcgcagcgagaggcggcccgtgctgcgcgtgtcatgctctgcaccgctgcaagcgtgattattgaccaacgccttgcgggggcttacaacggcgcaacacagcgtgatgtggtgttatttgatgaagccgaccagttacccgatatggcggcattgcagagcgactttgtgattgaggcggcgctactgcagggccagccgctgcacgcggccttagagcgcataagcaccacccgttcacagtcggttgaggccgagcaaaaggctgctgcgcgggtcatgcttgagatattggccgaaccggtgggctacgcatccgtcgggcttgatgatgatggcaatgcgcggctacaccacgccctgccaggtcgcttattaaagaaaattagcaatcgcggtagcacggtgtttctttctgcaacgctgacccacaacgataagtttgatgacttcaagatcgccatgggcctagacgcggtgagtagcctgtcaacaagcattgagccagaacagcatggcacgctcgacttcaccgtacacgcgcacgaggtggacacgcctgactggtttgcggccaccgttcagtgcatacaaagcgcgcagcgccccacgttggtggtcacacctagccatgacctcacagagcggctacaaaccgccgtgggtgagcaagcagacttgcttatacgtgcgggtgcatgggcgggtcttgacacgccaacgcgctggcgtaccgtggttattccgcgcgtgccatttggcgcaccagtcattgttgacggggtggcggtcacgtcttacttggccgccaaggtgacggccagtcggcggatgcgccaagcaattggccgtgggcttagaacacctgaggcggtgtgcacggttgtggttttggatgcgcgggcacacaacttaggtcgctttgtgccagagcgttttgcggcagattggtcgtctcggcaagtgtttgaggagggtgcccgccatgcggtggtgctgtccaaagcggagcgcgaccccgctttggccaaagccgcgctcagacactacggcgctcaatgccaacaagcgggttgttccgtgacagaggcgtgtcagctggacgtgcaccaccttgaccccgtaagcgaaggcgtgcgccgcacaaccttgaaggatgtgaccgtgctgtgtgcaaaccaccaccgacaggcccaccacgacatgaaaatggggctgaacgtgtcgtagcgcaacaaaaaacccgccatacctttgggtacgcgggttttgggagttctggcaaggcctgaaacctaaatgtggtggtgataggtggacttgaaccaccgaccccagcattatgaatgctgtgctctaaccaactgagctatatcaccgagcctgaaattatagccaaaattctcagggctttggcttgccgccaaaagtttttgttagccattttgtcgcgcccgtacgacgcgccaagcccttggttattggtgtttgaaggcgggtttgcgcttgtttatgaacgcatccatgccctctttttggtcttcggttgcaaacagcgcgtggaacagacggcgctcaaaacgcacgccttcgctgaggctgccttcaaacgcttggttcaccgcttcctttgccgccatgacactggggagggagtagttgcaaatcatcagggctgcgcccaaggcctcggtcatgagttggtcatcggcgaccacgcggctcaccagtccgccgcgctcggcttctgcagcgtccatcatgcggcctgtgagggccatgtccatggccttggctttgccaacggcgcgtggcaggcgctgcgtgccacctgcgccagggataacgcccaacttgatttcgggttggccaaatttggcgctctcgctggcaatgatgacgtcgcacatcatggccaattcacagccgccgccgagggcaaagccgctgacggcggcaataacgggcttgcgaacgctgcgaatggtttcccagttgcgcgtgatgtagtctgacttgtagacgtcagcaaaggtgtaggtcgccatagcgccaatgtcggcacccgcggcaaaggctttttcactgcctgtgagcacaatgcagccaatgtccgggtcggcgtcgaatgcggttagcgccgcgccaagctcgtccattagcgcactgttgagggcattgagttgtttggggcggtttagggtgagtatgcccacgcggccttcgatgcggattaaaaccagttgctcactcatgtctgtgttctccaatgtggtgcgaaaagttgcttagaaaaagttgtttcgaaagttgcttcgacgtaagcggttgatcatagccaagcggtgagcttgctagggtctttcaccaccagttcggcgatctggttggcgtgggtcgatggccagatgagggggcacgacaacatgcggccatcgcgcgcgacaccggcaaccaatgggtgctgggctacgtcggcgtggcgtctcgcaatgttctccacatcgctcagtgactttacccgccattgatcggtgccatcaaatagtgtcacccattcgtcacccgccgccatgcccgcttgttcgcctgcaccgcctcttgccacgtgggtgatgcggatgccgtctcgctcaacgacacgcatgcccaagcgctgggcgagggtgccgctcttggccgccacggcgacaccgtaatgactaagcagtgcgtgtaccggcaggtcttcggtgctgtgtacccagtgcgcgagctgtgtggcgacgttggcgtgcccttgctggttgagcagggcgtagatgtcggcctcactgatggtgccgcctttgcttttgacccataggccgcgcatgagggtgtcgagatcgccgccttgttggcgcagcatgaggtcggtgcacagcgctattagcgcccctttggtgtagtagctaacggtggcgttgggcgtgttttcgccaatgcggtagtacttgacccacgcgtcatagctagactgggcaacgctttgcagatgccgccctggggtggccgcaacgtggttaatggatttggccagcagcgtgagataggtgggcgtatcaatgagtttggcgcgttgcagaaacaggtcatcgtagtagctggtaaagccttcaaagaaccacagcagctcggtgtagttctcttggttgaagtcgatgcttgcaaactcggatgggcgcaggcgcttgacgttccatgtgtgaaagtactcatggctaatgaggccaagtaattggttgtagccagcgccttgtgcatgggggggcgctgcctcgccagcgacggccgttaggggcaagtcggcacgctggcaaatgagtgcggtgctggcgatgtgctctagcccgccgtagccgttttcagtggcgtgaagcatgaagacgtagcggtcaaagggtagttggcgttgcggttgtttgccgtgccaaaacgtgatctctgtttcgcaaattcggcgggtgtcggcaactaattttttgacatcaaacccgggcgcggtgtggttgccaatgcccgtgacaacgagttcatgcggtacgccagagaccttaaaccggctgacgtaaaaatcacccaaggtaaagggactgtcggcgagctcgccgcagttgcgggcggtgtagcgcccgaagccacgcgcgtcgatttgccgcgcgggcaatgcggtagacagccgccacgcattgaacgcgggcgcggtggggcgctcgacggagatggtttgtatctcgtcttcgcccccgaccacttgcaaacacaggctggtggggttaaagaagccgcgggtgttgtccaaaaaggcggttcgcaccgaggcgtcaaaggcgtagatttggtaattgagctccagcgggcgtttgccgtcggattccactagccactcatttttactgcactgcgtgatttggcaaggcgtgcggccttgcttggctgtgagcgcttgcaggtgttgcgaaaattcacgcaccaaataactacccgcaatccaaacgggtagacgcaggcgctgttgcttttttgggcttgagatgcgcagatgcacaccgaacaggtgcgcttccgcgctgtcaacgcgaatgttgtgatcgatgcgcatggtgttacttgatggcggccagacgcttctcaacttcggcggcagaaatggcgccggggacacgtgtgccgtctgagaagaaaagggcaggcgtgcccgagatacggtgcttttgaccaaacgcgatgttgcggtcaagcgcgctggtgtcgcagctgatggcggcggcgctggtggttagagggacttcattcaccatccagtcttcaaaggctacgccggggtttttgtcgcaccaaatggccttggacttgagcgttgaatccgcgccgagtatggggtacaaaaagatatgcagggtgatgttgtcgacattcatcatgtcacgttcaaagcgcttgcagaagccacagttggggtcttcaaaaaccgcgagttgacgcttgccgttaccgcgtttgatggtgaaggcatctttaaagggcagggcctcaaagggtattgcgctcaatttatcgaggcgctcctgcgtcaggttgcgtttgcccttgaggtcaacgagtacgccttgcagcaaaaattcaccgttggcatcggtgtacaaaatttcggtttcaccaaagcgaacttcgtagaggccggccatgggggtcttggtgacgctgttgatagcgggtaagttgggtagttgcttgggtagcatctcgcgaatcttggcttcctgtgcccagcccatgcttgccatgagagtgaatgcgatgcccacggccaagccgcgcaataaagagcgtgtgggggtgggtgcgagaggtgacgtgtggtgaagcatggtgtggttcgctaggtaggcgttgtttgggggtaagagggtgggtgggttggttcgtgggagggggctgttgggtagcggatgctcgctgttggagcaccatcgtggcaatcagttccccatgccaacacgctgtacccacgacttgagtgggcccatggcattaaagcccgacatgcctgcattgcgtagccaactggcggcggggttgcggcccaaggggttgttgaacaagtgaaagagtccgtgcgtgacccattgcatgggttcggtggcggcgcgtcgacgccgttggtagcgctgaagcacgcgtgaggcacccggagactcacctcgggcgcgtgccgcaacgcagtcactgagcgtttgtacgtcggccaagccaaggttgagaccttgccctgcgagggggtggatggtgtgcgccgcatcgccggctaacgcggtctgctgggcaacccattgcgtggttaagccgacgctcaaggggaaggcaacaggcccgctggtaagggagaggtgccctagcgcgccctgactggcttgggtgagttggtcttctagggcggcggtttgggcggtggtctccatgtccagccacgtctggtgcgcagcgtctggtagcgaccagacaacggccaggtcgtgcccgtcagcgccgcccatgggcagcagggccaaaatatgtgtgccgttaaaccactggtgggcgacgccgccgtggctgtgctcggcgcgcatgcgcaacgccaaggcacggtgggggtagtgcttacttaccatgtcaatacccaaggcggtgcgcgcgataccgctcttgccttcgcaaatgatggtcaatgcgctaggcggtgtctgggctgatggtgacgcgtggtcgtcaaattgcacgcgtgcatggcgtgtgacggcttcggcaagatggtcctctaggacaggcacatcgaccatccacgccaagggctgcgcttgctgtgggggtgcgtcgaattgcagcgcgcctgacgcatcgccaaacacccgcatatgggtcatgggggtcagccacgcggcctgatcgtcttgaggccagacaccgcatgctttgagggtgtctctcgaggtgtggttgatggcgtaggcgcgaatgtcgcgggtgtgcggtggcgcttggggcgcgggcaggctgacggaaaagccttgctctgccaataacaatgccgccgcgtgcgcggtgatgccagcgcctaaaacggtgatgtgccctgattgagtcatggcgttattctattgggacacccacttggggggccagcgatgaccctgccccggaagtgccttaaactctgggtcttgctttttgaggattgtcatgagtttgaaatgcggcatcgttggtctgcccaacgtcggtaaatctaccctgtttaacgcgcttaccaaggctggtatcgccgctgagaactaccctttttgcaccatcgagcccaacgttggcgtggtggaggtgcccgacacccgcctagcgcagctcagcgatatcgtgacgcctgagcgcattgttcctgcgattgttgaatttgtggatatagccggcttggtggcgggtgccagtacgggcgagggcttgggtaacaagtttttggcccatatccgcgaaaccgatgccacggttaacgttgtgcgttgttttgaagatgacaacgtggtgcacgtcgcgggcaaggtggatccgatttctgacattgaggtgattcaaacggagttgtgccttgccgacttaggcgcagtagagaaagccctgcaccgggtctccaagaccgcgcgttctggcgacaaagagtcggtgcgcttggtgtcgattttggagcgctgtcaggcggccttaaacgagggcaagcctgttcgcacgctagatttcagcaaagaagaagcgccgctgcttaagcagtttttcttgattacggccaagccagcgatgttcgttgcgaacgtgtctgaggatggctttgagaacaaccccctgcttgaccgcttgaccgcctttgccaacgagcagaacgcgcctgtggtggcgatctgcgccaagctagaggccgagatgagcgagatgagcgacgaggaccgcgatatgttcctggaagagctggggcagtccgagccgggcttaaaccgtctgatccgtgccgcctacagtttgttgggtttgcagacctacttcactgcgggtgtaaaagaggtgcgcgcttggactatccacgttggggatacggggccgcaggcggccggtgtgatccacactgatttcgaaaagggctacattcgcgcccaaaccattgcctttgatgacttcattgcattcaagggcgagcagggcgctaaggacgcgggcaagatgcgcgcagaaggcaaggagtatgtcgtgaaagacggcgatgtactcaacttcttgttcagctcataagccactgcgcactcgcggcaatggcaaggtagcgggcgaacttgccaatggccatgtacaccgcgcaggccagccagggcattcttagccagcctgcgagggtgcacaccacatcgccgaccacgggtagccaagccagcaaacacgccttgggtccgagtttttccagttgagccaaagcccacgcggcgagcctgccagccgttggggtggcctgagcatccgcgcgtcggtgcgggtgcgcacggttttggtaggcgcggtgcgctgattgcaggccaacgcccatcagccaactcaccatgccacccaaggtgttgcctaccgtcgctagtaacaaggcgggccaaaatagatggggtgagatggcgatgagacccattaatgccgcctccgaccccatgggaagccacgtcgcggagacgaatgccgtgacaaaaacggtagtcaacccccattcgggcagactgaaccagtgaagtaagctcgcaaaaaaggcatccattggcttgagtataggtacaatcatgcttaaattttcagcaagcaccgacgcgtcaatcggtgcttttttgtctctaactgccgtccaacgtgcatatcggtccctaccacctccgcaataacctgttcgtcgcgcctatggctggcgtgacagaccgcccgtttcgccagttgtgtaagcaactgggcgcgggctatgccgtgagcgaaatggtgacatcgcggcgcgatttgtgggactcgcttaaaacctcacgccgtgcaaatcacgccggtgagagcgggcccattgcggttcaaattgcggggaccgacgcccagatgatggccgatgccgcggtgtacaacattgaccgtggcgcacaaattattgatatcaacatggggtgccccgcaaaaaaggtgtgcaacaagtgggccggttctgcgttgatgcaagacgagaccttggcgatcgccattgtcgaagcggtggtgaacgcctgcgcctctaaggatgtcccggtgacattaaagatgcggacgggttgggcggcgcatgcgaagaatgccacgcggttggcgctggcggcggagcaagtgggggtgcagatgttgacgattcacggtcgcacgcgcgagcaaggctataagggttttgcagagcatgagacggtggcggacattaagtcgcgggtgcgtattcccgtggtggccaatggggatattgcatcgcccgaggcggcgcaacgtgtgttgcaagccacgggggccgatgcggtgatggtgggacgcgccgcgcaagggcgcccatggatatttagtgagatcgctcattttttagccaccggacgccacgcgccagcgcccagcgctgtggatatgcgggcgtggatggtggagcacctgcacgcgcactacgcgctttacggcgaatttacaggcgttcggtctgcgcgcaagcaccttggttggtatgcccaacacttgcccatgggtgagcttttgcgtcagcgcatcaatgccttaaccgattgcgcggagcagttggctgcagtcgaggcgtatttcgcagcgtgggacagtgatgatctggccgcgcttggtcgggcatggcaaccgacacagataccgggcagcgcgcagagccagtctgtgcgagagatgcctgtcgacatgacattggccccccttcattgagcgttatatgagccgtaaagacattgaaaagggcgtgcgtgaaagcatgcaaacctacttccaagacctcgccggtagcgagccacatggcctgtacgacatgatggttgatgttgtggagaagcccttgctggaggtggtgatggcgcaagcaggcaataaccagtctcgcgcggcgcagtggcttggtctcaatcgcaacaccttgcgcaaaaaattacttcaccacaagttactcagttaacgctgcaaacgcggcggcctaactcgtcatttccccctttatttttcacgactaccaagcaccatgaacgcactcttatctgtatccgacaaaaccggcattgtggcccttgcgcgcgcgctccacgcccaaggcattggcctgctgtctactggcggcacggccaagctgttggcggaagagggcctgcccgttaccgaggtggccgatatgaccggctttccagaaatgctcgatggtcgcgtcaaaaccttgcaccccaaggtgcacggcggcttgttggctagacgtgacgtgccagcgcacatggcggcgttggccgctcacgggatcgataccattgacgtgttggttgtgaacctgtacccctttgaggcgacggtggccaaagcgggttgcaccttggaagaggccattgagaacatcgatattggcggccccgcgatggtgcgtagtgctgccaaaaactggaaggacgtcgcggttttaacggatgccagccaatacgagaccgtcattgccgagctcgccgctaacggcgcggtgtctaccccgacgaagtttgcgctgtccgtggcggcgtttaaccgcatcagcaattacgatgcggcgatcagcgactacctgtcggcgtatcagttggagagcgataccttacaagcgttccctgcacaggcgaacggacgttttgtgaagttgcaagacctgcgttacggcgagaatccgcaccaatcagcagcgttttaccgtgacctacaccccgcgcccggctcgctggtaacggcgaaacagttgcaaggtaaggagctgtcctataacaacatcgccgatgcggatgcggcatgggagtgcgtgaaaagctttgacgtgcccgcctgtgtgatcgtgaagcacgccaacccctgcggtgtggcgttggccgaggatgcgttgggcgcctataccaaggcgtttcaaaccgaccccacatcggcctttggcggcatcatcgcgctcaacgttgtggtggatgaagcggctgccaaggccattagccagcagtttgtcgaggtgctgatggcgcccgcttataccgagggtgccttggcggtatttcaagccaaagccaatgtgcgcgttttgcaaattacgctgcctgcggcgggtggacagacggcgtgggagcgtgggcgcaacgtgcaagacataaagcgcgtggggtctggtttgttgattcaaacggcagacaaccatgacctgagtttggccgacctcaaagtggtgtccaaagtgcagccgaccgaggcgcagttgcaagacctcttgtttgcgtggaaggtggccacgtatgtgaagtcgaacgcgattgttttctgtaaagaccgcatgaccgtcggcgttggtgcggggcaaatgagccgtttagattcagcgcgaatcgcgcgtatcaaggccgaccatgccggtttgtcattggcgcagtcggtggtcgctagtgatgcgttcttccctttccgagacggtctcgatgtggtggtggaggcgggcgcgactgcggttattcatcccggtggttccatgcgtgatcaagaggtgattgatgcggcggatgagcatggcgtcgcgatggtgtttacgggcgtgcgccacttccgtcactaagccgttgcgggtgttgcttgcgtggccatgttgacctggttggatatctcgcagacggcgagcgatgacgactgggtgaccttagaggtctgcgcgtctgtgacccgtgctgaccagcatcgcgtcgatgctgccgtctgtgagttgcttggttatttgtacgcgcgctgtggccgtcccagcgaagaccccgacgtgccgcccggcccacagtcgtggctgatcgatgtgcaggcgtatgccgagtcggcagccaaagcgccgctggccgtcgccttggattggcgcgacgacgccacggtgtctctgcaatgggtcacagcgggagccgctgacgcgaccacggaagacacccggcgaacccttctcattagtttgggcttgtcacccgcgttagcgttcgcttgcgatgaggcattcgaactggggctctagctgacgccccctaacgcggtgtatgccccgctcgtgggactacagggttgcaaatgtccgctttgccgcggcgatggtgtcgtcaatgtcttgcgcggtgtgcgcggcgctcacaaagccagcctcaaatagcgcgggcgcaaagtaaacaccttggtccaacatgccgtggaagaagcggttaaacaccgcgccgtctgtggtcatgaccttggcgtagttttgtggcaactcagggaagaagaagaagccaaacatgcccccttcgctgtcgccacaaaacgggatacccgcttccttggctgcggcggtcatgccgctgacgagttgttgggtgtgttgattcagttgggtgaaaaagccgtccttttgaatctcttttaaggttgccaaaccgcaggcggtggcgacggggttccctgacaaggtgcccgcttggtagaccgcgccaagtggtgcgaggtgggacatgacttcgcgcttaccgccgaacgcggctaacggcatgccgccgccaatgactttgcccatcacggtcatgtcaggctcaaagcccggaatttctttggcgtacaagctctgagcgcttcccagtgccacgcggaaaccacacatcacttcatcaaatgcgagtagcgctccgtgggcagtgcagagttcgcgacagcgttttacaaatggcacgctggcccgcacgaagttcatgttgccagcaatgggctccatcatcaaacaggcgacttcatcgccgtgttccttaaaggcggcctctagcgcttccacgtcattgaagggcagtactaaagtgtgttgcacaacctctggcgggacgcctgcgctggtggggttaccaaacgtggcgaggccagagccggccttaaccaacagggcatcggcgtggccgtggtagcagccttcaaacttaatgattttgctgcgtcccgtggcgccccgagccagtcgaatggcgctcatgccggcctcggtgcctgagctgaccagtctcaccatttcaatggatggaaccagcttgatgatttcttcggccagttctatttcgcgttcagtcggtgcaccaaatgacagcccttgctctgcagcgctcagcaccgcggcgtgtacggcggggtggcggtgccccaagatcatcgggccccaagagccaatgtagtcaatgtagcgctgatcttctgcgtcccaaaaataggcgccatcgccccgcgtgatgaagcggggtgttccgccgacggctttgaaggcgcgtacgggtgagttaaccccacccggaatggctagcttggcgcgtgtaaataattggtcgtttttgttcatgatgtgtttccggttacgttgcacggttcagtgtttggtgtcgtctagcgggaagtcgcctaacgtgtggtgaccgacatccagcgtcggtgtgtcgggggcgtcggtatcctcggtatcgtctatgccgtcatcttcgccgcgtccccaaaacaagcggtcgggtaaggcgtgtcccatgccgggtgcaaagcctgcatccagactctggtcgagataggtcagcgcttctgcgcaggcggactgcaagtcttcgcctgcacccagcagggccgtgagggcggctgacagggtttccccagccccggtgaaggtggtgtcaaaccgctcgaagcgtgcggtggccaacacggtctcaggggacgctaggtggttttctaagaattgttcaggtgcatttaacccggtgaccaaggtgtaactcactccgtgtagctgcgcggcgcgagctacgtcgcgcggtgtggggggcttttcgctcgcccagtcgggtaataaccagcgacacaaggtgctgtagttgcccacgagaacggcggtttgcgggagcattaactcggtaaatgcgtctaagtaggcatctagagcgatatcgtccatccacgtcaaactgggcatataggcaacgacgggggtgtccgcgtagtcgttggcaatttgcgccactgcgctgatgttttccggactgcccaaaaagccgactttgatactggtcacggggatgtcttcgagcaccatgcgggcttggtcgttgatggcatcagcgtccagcgagacgtggtcttggacggcggtggtgtctcggatgagcaccgcggtgaccacgggcaacatgtgtacagaggcggaacccatggcgccgatgtcagcggccaaaccgccagcacccgttgggtcactggcattgaacgacagcacgcacggcagcgttagctggtgcgcggtcgtgctcgtgtcccgtttgctgggctgcttgggcggcgaatctaaagcatcggtcatgggtttgctcgttgaggggctgtctcagttccttcgggggtatgcttctgcaccgatacaatgtgatcattctatgacacggttttaaaaaaatgagcgactcaacgacttggatgtgcctgatctgcggctggatgtacaacgaagccgagggcgcgccagcggacggcattgccgcaggcaccaaatgggcagatgtccccatgaactggacctgtcccgagtgcggcgcgcgcaaggaagattttgaaatggttcaaatctaattctcgcgcatggcgcccttcagggcttgggcttcttcacgacggcgtagcgagccaacgttcgctcgcgggcggcggcatggtcgacgatgggtttagggtagttctcccctaaggtaacgccggcggtgatcaggtcgaaggggtcagctagccaaggggcgtgtatgcgtttgtccgacagctcagcgagaaccggtaagtagcggcgaataaacttgccctgcgcgtcaaacttctcgctctgtgtcgtgggattaaaaatccgaaagtacggttgcgcatcacacccgctagaactggcccattgccatcccccgttgttggcagacaggtcaaagtcgatgagcttttccgcgaagtagtcagccccccagcgccagtctatgcctaagtctttggtgaggaagctggcaacgaccatgcgtaagcggttgtgcatgtaaccggtttggttgagttggtgcatcgcagcatccaccagtgggtagcccgttgcgccttggcaccacgcgtgaaagagggccttggcgctggcgccgtgttcccacttgatggcgtcgtattcaggcttgaatgcgcgatcgacgatgcgtgggtggtggtgcatcacctgcatataaaaatcacgccaaattaactcccctagccaggtgctggcacccacatggccttggctatgaccggcgaaggcatgttgggcgagggtgcgaatagacacggttccaaagcgcaggtgaacgcttaggtagctggggcccttgacggcagggaagtcacgcgtgtccttgtagcgggccatgcggggcaagaagtcggccaacaaggccgcagcgccagacgcgcccggcgtgatattttgtgccacgaggtcgacaggcgtaaaccccatactggttagtgagggcatgtcgcccagtgccttgaggtctgagggcagggcatcggtttgggccagggcggttgcgtaacgctcggtggggtaggcctttaggtagtagggctctagcttcttgagccaggcgtttttgtagggcgtgaagacgccaaaggggcgcgattgttgcgtgaggacctcgctacgctcgaaaatgcattggtctttgtaggtgttgagcaggatgccgttgtgcgcaaggtgcccaaaaatagcggcgtctctcgccagtgcctgtggctcatcgtcgtggttggcaaataccgcatccacgcccaaggctttcgccgtgcgcggtatcgctcgctcgctctggtcgtggaggcatagcacgggctgggcattggcgccggctaccgcgcgtagctgggtgttgaggtccaccaagctgctgtggataaaggcgacgcgccgatcggttgtgggcaaggtgtccaaaatggccttgtcgaatacaaagatacaaaaaacggtgtcgcactgcttgagcgcgtgataaagcgcggcattgtccgtcaagcgcaggtcccgcctgaaccacatcaggccttttgtgtacttctttttcatcgtgtagattgctcgattgggtcgtgagagggtgcggattgtcggcagcgcccgcaccccttaaaataacatcatgcctactgattctgccgcgattgacctcacccatcatttcctcattgctatgcccgggttggaggacgaccttttcgctcgcagcgtggtttatgtgtgcgagcacagtgcgcggggcgcgctgggcctgattatcaacaagccgagtgatctgccgctggccggtctctttgagaagatcgcgttgcgactgcatcgtgacgacttaaccgatgcgcctgtgttccggggtggccccattcaaaccgaacggggttttgtgttgcatgcgcccatggggcagggcggtgagtcggtttactcttccactttggtgattcctggcgacggctctggcctgaagggtgtggactggccaaactctgaaattcatgttgcgcttagcgtggaggccgatgacgatgcagcgccgtccgcgccgcctgaagccccaaaatatgggcctgcgcgcctagaaatgaccacctctaaagacgtgctggaggcaatggctgaaggcgcaggccctgctcgggtgttggtcacgttgggctatgccacttggggcaagggccaactcgaatcggagttggctgagaatgcctggctgaccgtgcccgcggacgagtcgattatttttgacacaccgcctgagcttcgctacagccaagccatgggtttattgggtttggatgcaggcatgctgcacggtgaggcaggacacgcctgatgtccatgcggccactaccgccagtgatcgcctccgatgtgcagttgttcctagcttttgattatggggagaagcgcaccggtgtcgccagcggtaaccgcctgacccgcagcgccacccccttgggcacgatcgccgcgcaaggggacgcgaagtggcctcagattgcccaatacctgaaagactggtcgccacaggccgtcgtgattggggtgccacggcacccagacggcgccgaccacgagaacacgcttgcggcgcaaaagtttggcagacaaatcgcgggtcgttttgccgtgactgtattcgaaaccgatgagcgctacaccaccaccgaagcgcatagcctcgctgcaaaggatgcagacgccgtggccgcttgtattattcttgagcaatttcttcggagcctaccgtgaccagccagtttgataacaccgtgcaggcagatgccttggacgcagagggtctctatcagcaactattgacggcgattcgccccttgacggcgacggctgacaagcccgtgcgtttagttggtatcgcctccggcggcgtgtggcttgcccaacgcctgcagaaggacttgggcttggcgggggagtcgggcgtgatttccagcagcctgcaccgcgatgacttttccaagcgtggcctcagctctatgggggtacaaacgaaattgccttttgacgtgaacggcgccaccgtgtggcttatcgacgatgtgctgtacaccgggcgcacgatacgcgccgtgctgaacgagttatttgactacggtcgcccagccgatgtgaggttggccgttttggtcgatcgcggtcagcgggagttgcccgttcaggccgatctggtggtggctcgttgctcggtgccgagcacgcagtcactggagctgtcgcaaacggacggcggtcgtctaacctttaggattgaaactgcgggttgaacgccacagaatcactttgcaccgccacactttattgccctagcgcccctatgcgaacacaacgtaacccccaactgaacgccaacggcgagctcatacacctgctctcaaccgaaggcctgtccaaagagatgttgacccacatcttggacacagccaccaatttcgtgagtgtcagcgaccgcgaggtcaagaaggtgcctttgctgcgcgggaaaagtgttttcaatctgttttttgaaaactccacccgtacacggaccacattcgatatcgctgccacccggttgagcgccgacgtggttaacctagatatcgcgcgctcctctgccagcaagggcgagagcctgttggacaccattgacaacctttcggcgatggccgcggacatttttgttgtccgccacaacgagtctggcgccccctacctcattgcgcaacacgtggggcctcatgtgcacgtggtgaacgcgggcgatgggcgacacgcccatccgacccaagccctgctggacatgtacacgattcgccacttcaagggggacttttccaatttgagtgtggcgattgttggtgacgtggcgcactcgcgtgttgcgcgctcaaacattcacgccttgacgaccttgggctgccctgacctgcgtgtggtgggccccaagaccttggtgccgaatgacatggcacaaatgggcgttcgggtctgtaacgatttgcgctctggcatcgacggtgtcgatgtggtgattaccttgcgtctgcaaaacgaacgcatgagtggcgccttgttgccgtccgcgcaggagtttttcaagagttacggcctgacgcccgagcgcctgcagtgggctaagcccgatgccattgtgatgcacccggggcctatcaatcgaggggttgagattgcatcgtcggtcgttgacgggccacaagcggtgattttgtcgcaggtaaccttcggtatcgcggttcgtatggccgtgatgtctattgttgccagccacgagggctaatgactggccatggcgagtgcaccccaacaaccgacccctttaacccagtacgtgttttaaatcgcctgagcaccatatcgatatgaagattctgattcaatccggacgtgtcatcgaccccactagcgggctagaggccgttcaagaccttgccattgccgctggtcgcattgtggcgatgggcgcgcaggtcaaagacttttcgcccgagcgtgtgatcgatgccaccgactgtgtggtggcgcccggcttggttgatctgtgcacgcgcttacgcgagccggggttcgagcatgagtcaatgttggagtctgagatgtccgccgccgttgcgggcggcattacctccttggtctgtccgccagatactgacccggtcttagatgagccgggcttggttgacatgctcaagtttcgaaccaaaaagctgcgtcaagcacgcgtcttcccgttgggggctttgacccgtggcttggagggggaggtgctgaccgaaatggccgagctcaccgagtcaggttgcgtgggttttgggcaagcggatgcgccgatacagaacacgcaggtactgcaacgcacgtttcaatacgcggcctcgtttggttacagcgtctggttgcgtccgcaagattactggctgggtcagggtgtcgctgccagtggtccgttagccacgcgcatgggcttgtctggcgtgcctgtgtctgctgaggtgattgcgctagaaactatttttgagctgatgcgaggcaccccagcgcgggtgcacctctgtcgtattagcagtgcccgcggggtggacttggtgcgcgccgcgaaggccgaaggcttgtccgtgacctgcgatgtcagcgtgcacaatttgcatctcattgacgtggatatgggctattacgatgcgcgcttgcgtttgcaaccacccgttcggcaacagcgtgaccgcgacgccctgcgtgcggggttggcggatggcactattgacgccttggttagcgaccacaaccccgtcgaagcggatgccaaaaacctgccttttgcgcaagcagaaccgggcgccactgcggtggagttgttgctgagtttggctcttaaatggggacgtgaagaccaggtgccgttgcagcgcgtgatcgcggttttgacgcaagggcctgtcaaagttctgggtcaaagtctgggaagtttgcaagccagcttaggccaaatcacccttggtggtgtggcggatatttgtgtttacaagccggatgccgcgtgggtggtgggcgcagacacattgcgaagccaaggaaagcacaccccctttgcgggttatgaattgcccgcaaaagtagccaccaccattgccggtggctatattgcctttgacgcagtctgagcgcgatgcgagcaatccctgcggcttggcgcatgatattgggcgtgaatcacgttctgcgcggtctacgaaccattaacaaatactttgccacggcaacgcaaaccgagcgtgacgcgatggtgcaggcgtggtctctcgccttgcttgagctgctaaatgttgaattggtcactgatggtgctgagcctgtacccggcttggtggttgcaaaccacgtctcgtggttggatatcttggtgatgaatgccgcacaccccgttcggtttttatcgaaatcagatgtcaagaagtggcccttactcggccgcctgattgcggggtctggcacgttatttatagaacgtgcaaagcgccgcgatgcgctacgtgtggtgcagcaaattacgacgtatttacgtgatggtcaccgcgtggcgatctttcccgagggcacgaccaacgatggtattcatgtgctgccgtttcatggcaacttgattcaatccgctatcgacgccgaggcggcagtgtgcccggtcgggatacgctacatggacaaggccagtggccaacgcagcttggcgcccgcctatattgatgacgacacgctggtgggctccatttggcggacgctgcgcagcggtcgcatggtggcgcgggtgcgcttgggtgagccacaactaaccgtgggacgtgaccggcgcgcatgggcgagcgaccttcaacgcgcggtcgtcaccctgaccgctgagtaaatgcgaggccgtgcgacgtgcggctaaacctcggggcgtcagccttggctggcttggcggcgggccaccatcttttctgcgctgactttgcggtcggcattgacctgagtaaccgttgcacgcgttgacaggtgtcgcaggtactctttgacgggaagttccgatagaaaatcttggccgtaaataattttggtggccgtggagatgagcggcaggtgggcaactgccgtgcagtcagcgaggctgaaggtatcgcccccaataaacggtgtgaagcgtgccagcgatgcgaaggctgcaatgtttttcttcagttgcgtcgccgtcttttcctttaagttgtcacttaccttgccgccaaaaaacgcctctttgtataggtttcgcgcgaccaactcaaggtgtaggtcaatgtaggtggcgagctcacgcaccttggcggcttgaaaggggtctgccggcaccagcgggtgcgcggggtactgttgctctatgtagtcgagcatcacagtggactcgcataaagcgcccgacggcgtcagtaggtaaggcaccttgcctagcggtgaggcatgggtgtcaacctccgaggtccacacctccgactcttgaaacggaacacctttctcgagcaatgccaatttgactttgttgtaatagttgcttgctgaaaagccgcataaagtgatcatgtgatgcccgttggttgagatggctggttaggaagagtgcgtgtaaacgatgcgataattttgccacggaagcgggctctgtcagccccctctgtgttgcccccgctttgcgtcacgtaatggcgtatcaatttttttgaggttttcatgcgccaacgatggtctactttctcgctagccgcagcggtcttttctgcactgctcacggcggctcccataacggtaaatg

SEQ ID NO: 15 - DNA, 31505 bp, Artificial Sequence
  Synthetic Oligonucleotide
  misc_feature (1)..(2353): n is a, c, g, or t
nnnnnnnnnnnnnnnnnnnnnnnnnnnnnnnnnnnnnnnnnnnnnnnnnnnnnnnnnnnnnnnnnnnnnnnnnnnnnnnnnnnnnnnnnnnnnnnnnnnnnnnnnnnnnnnnnnnnnnnnnnnnnnnnnnnnnnnnnnnnnnnnnnnnnnnnnnnnnnnnnnnnnnnnnnnnnnnnnnnnnnnnnnnnnnnnnnnnnnnnnnnnnnnnnnnnnnnnnnnnnnnnnnnnnnnnnnnnnnnnnnnnnnnnnnnnnnnnnnnnnnnnnnnnnnnnnnnnnnnnnnnnnnnnnnnnnnnnnnnnnnnnnnnnnnnnnnnnnnnnnnnnnnnnnnnnnnnnnnnnnnnnnnnnnnnnnnnnnnnnnnnnnnnnnnnnnnnnnnnnnnnnnnnnnnnnnnnnnnnnnnnnnnnnnnnnnnnnnnnnnnnnnnnnnnnnnnnnnnnnnnnnnnnnnnnnnnnnnnnnnnnnnnnnnnnnnnnnnnnnnnnnnnnnnnnnnnnnnnnnnnnnnnnnnnnnnnnnnnnnnnnnnnnnnnnnnnnnnnnnnnnnnnnnnnnnnnnnnnnnnnnnnnnnnnnnnnnnnnnnnnnnnnnnnnnnnnnnnnnnnnnnnnnnnnnnnnnnnnnnnnnnnnnnnnnnnnnnnnnnnnnnnnnnnnnnnnnnnnnnnnnnnnnnnnnnnnnnnnnnnnnnnnnnnnnnnnnnnnnnnnnnnnnnnnnnnnnnnnnnnnnnnnnnnnnnnnnnnnnnnnnnnnnnnnnnnnnnnnnnnnnnnnnnnnnnnnnnnnnnnnnnnnnnnnnnnnnnnnnnnnnnnnnnnnnnnnnnnnnnnnnnnnnnnnnnnnnnnnnnnnnnnnnnnnnnnnnnnnnnnnnnnnnnnnnnnnnnnnnnnnnnnnnnnnnnnnnnnnnnnnnnnnnnnnnnnnnnnnnnnnnnnnnnnnnnnnnnnnnnnnnnnnnnnnnnnnnnnnnnnnnnnnnnnnnnnnnnnnnnnnnnnnnnnnnnnnnnnnnnnnnnnnnnnnnnnnnnnnnnnnnnnnnnnnnnnnnnnnnnnnnnnnnnnnnnnnnnnnnnnnnnnnnnnnnnnnnnnnnnnnnnnnnnnnnnnnnnnnnnnnnnnnnnnnnnnnnnnnnnnnnnnnnnnnnnnnnnnnnnnnnnnnnnnnnnnnnnnnnnnnnnnnnnnnnnnnnnnnnnnnnnnnnnnnnnnnnnnnnnnnnnnnnnnnnnnnnnnnnnnnnnnnnnnnnnnnnnnnnnnnnnnnnnnnnnnnnnnnnnnnnnnnnnnnnnnnnnnnnnnnnnnnnnnnnnnnnnnnnnnnnnnnnnnnnnnnnnnnnnnnnnnnnnnnnnnnnnnnnnnnnnnnnnnnnnnnnnnnnnnnnnnnnnnnnnnnnnnnnnnnnnnnnnnnnnnnnnnnnnnnnnnnnnnnnnnnnnnnnnnnnnnnnnnnnnnnnnnnnnnnnnnnnnnnnnnnnnnnnnnnnnnnnnnnnnnnnnnnnnnnnnnnnnnnnnnnnnnnnnnnnnnnnnnnnnnnnnnnnnnnnnnnnnnnnnnnnnnnnnnnnnnnnnnnnnnnnnnnnnnnnnnnnnnnnnnnnnnnnnnnnnnnnnnnnnnnnnnnnnnnnnnnnnnnnnnnnnnnnnnnnnnnnnnnnnnnnnnnnnnnnnnnnnnnnnnnnnnnnnnnnnnnnnnnnnnnnnnnnnnnnnnnnnnnnnnnnnnnnnnnnnnnnnnnnnnnnnnnnnnnnnnnnnnnnnnnnnnnnnnnnnnnnnnnnnnnnnnnnnnnnnnnnnnnnnnnnnnnnnnnnnnnnnnnnnnnnnnnnnnnnnnnnnnnnnnnnnnnnnnnnnnnnnnnnnnnnnnnnnnnnnnnnnnnnnnnnnnnnnnnnnnnnnnnnnnnnnnnnnnnnnnnnnnnnnnnnnnnnnnnnnnnnnnnnnnnnnnnnnnnnnnnnnnnnnnnnnnnnnnnnnnnnnnnnnnnnnnnnnnnnnnnnnnnnnnnnnnnnnnnnnnnnnnnnnnnnnnnnnnnnnnnnnnnnnnnnnnnnnnnnnnnnnnnnnnnnnnnnnnnnnnnnnnnnnnnnnnnnnnnnnnnnnnnnnnnnnnnnnnnnnnnnnnnnnnnnnnnnnnnnnnnnnnnnnnnnnnnnnnnnnnnnnnnnnnnnnnnnnnnnnnnnnnnnnnnnnnnnnnnnnnnnnnnnnnnnnnnnnnnnnnnnnnnnnnnnnnnnnnnnnnnnnnnnnnnnnnnnnnnnnnnnnnnnnnnnnnnnnnnnnnnnnnnnnnnnnnnnnnnnnnnnnnnnnnnnnnnnnnnnnnnnnnnnnnnnnnnnnnnnnnnnnnnnnnnnnnnnnnnnnnnnnnnnnnnnnnnnnnnnnnnnnnnnnnctccgcccctctaatagtttgaaagtaggggtgggcatcccagtcgagccggttggtaaataagtcgaccacgaacggggtgccgaactcgcccggtggcaagctaattgagtggatcaccactaagtcaatggccatgcccgcagggcgcgggccacagttgggtgacggtatggccgtggcctgcgaccaccaaccgtcttgccacgtggcatcgtgacgcgacagcgcagcggaggcgtggggtaacttcacgctagtctaggggcttatccccgtgcacgttgcaatgggctttgctgcagtagcgaccgagtcggccttgtacggtttctgccagatcgaggtgggtaccgcagtgcaagcacggaatgatggggcgcggcaggttggtgacggttgccgacgttgccttgggtttctttgcggccttgacggcctcatctcggccctcttggcggccacgcttccaaagccaaatgccgaacaaaatggccagaagaacaacaaaaatcttaatcatgagagtggggtagttaaacgcgggccacgggcactaggcgggggcgacgagcacgacctcaaggacaaaacgggcgccaacgtaagccatgagaagcagacccgctgatatatatagtaggcggcctgcacgcttgccgcgccagccatagcgccaacgggcaatgagcaacgacgccaaagacaaccaggccaatacagagaaaacgcttttgtgatcccaacgccaccccgagtcatacagcacctcggtaaagccgacacctgcgatcagcgtagcactcaaaaacacaaagccagcgccaataaactgaaacatcaggcgctcttgcgtcagtaccgggcggtgcccctcatcgggcaaggcgtggcgaatggcggtatcggcgcggcgcaacaaaatggcgtgaaaaaccgcggcgccaatcaggccgtaagacgcgatacccagtgcccagtgcacgggcagccaaacggacggcaactgcgggtgaacaataccggggaaaagcacgttgagtgccacagcggcaatgccaagccccgcaagcggccagcgcgcccgcaacggcaacttgagtcgggtttcgataccgtatatggtggataccatccagacagtgactgacagcgcggccgcgaacccaaagcgccccgggctctctatccagtaagctagcagcgaggcaccatgaaacgccaaggtcagcgcaaatagcgcttgcaggcttttgacgcctaaggcacggtgggccaaggcgatcgcaaggtagccaaccgccgttgcaaaggcgcagccgagaaacagagggctggtcgttagaatcatggctacagtttaacgctgagtgaggccttgaggggtcaccacctagaaagcagccacaacaaattttcaccttagaggtgacccgtttttttagattgagagtgccatggcttccgccttatcagaacgcctatccagaatcgttaagaccatgcgtggtcaggcgcgtatcaccgaaagcaacgtggcggacatgttgcgtgaggtgcgtatggccttgctggaagccgacgtggccttgcccgtggtgcgcgcattcatcgccgaggtaaaagaaaaggccttgggcgaaagtgttgtcggctcccttacgccagggcaggcgttggtgggcgtggtcaaccgtgagttggtcgagctgatgtctggtggcgacgggggcggctcctccgagctaaacctagccgcccagccaccagccgtagtactcatggcgggtttgcaaggggcgggtaagaccaccacaaccgctaagttggccaagtggttggtggcgcgcaaaaagaaagtactaacagtcagcggtgacgtttaccgtcctgccgctattgagcagctcaaaaccgttactgcgcaagcgggcgccgattggtttccgagtacggcggaccaaaagcccgtagatatcgccaaagccgcgttggactacgcacgtaaacattactttgatgtcttgttggttgataccgccggtcgcttggctattgacgaagccttgatggctgaaatcaaggcactgcatgaggccgtacgaccggttgagacgctcttcgtggtggatgccatgcagggtcaagacgccatcaacaccgcacgggcatttaaagaggcgctgcccctaaccggtattgtgttgaccaaaaccgatggcgactcgcgcggtggtgcggcgttgtcggttcgtcacgtgactggtgtgcccattaagtttgcgggtgtcagtgaaaaaattgacggcctcgaagcgtttgacgccgagcgccatgcctcccgcgtgctgggcatgggcgatatcttggccttggttgagcaagttagcgcgggcgttgacatggcggcggcacaaaaactagccgccaaagtaaaaagcggtagtggctttgacctcaatgacttcttagatcagctacggcaaatgcgcagcatgggtggcctgtcgcagttggtcgacaaactgcccgcacaaatggcggccaaagcaggtgagatggacatggacaaaaccgagcgcgacatgcggcgcaaagaaggcattgtgtgcagcatgaccttgcatgagcgtaccaagcccgagttgattaaggccacacgcaagcgccgtattgcggcgggcgctggcgttcaggtgcaagaagtgaatcgtctgctcaaagagtttgaacaaatgcagggcatgatgaaaaagatgaagggcggcggcctcatgaaaatgatgaagcgcatgggcggcatgaaaggcatgggtggctttcccggtatgggataagccaccgcagcatgtgcaacgcctggccagagcgggctttacgccaccaccacctcgccgcgcaaagagtgcggcaacgcctgcgtaatacgaatatcgagcatctgacccttcaggcgctcggggttggggccgccagcgaagttcacgatgcggttgcattcggttcggcccatgtactcggtggcatcctttttggacggcccctcaaccaacacccgttgcaccgtgtgctcgcgacgggcgctgatggtgcgcacgttgtcttcgatcacgctttgcaaatgctgtagacgcttgagcttgaccgcgtgcggtgtctcgtcatgtagcgttgcggcaggcgtgccggggcgggggctaaaaatgaagctaaagctggtgtcaaagccaacatcggtaatgagcttcatcatttttgcaaagtcatcttccgtctcgcccgggaagcccacaatgaagtcagagctcatagaaatatctggcctgatcgcgcgcaacttgcgcaccgtgctcttgaactccaaggcggtgtaaccgcgcttcatggccatcaagatacggtcactaccgtgttgcacaggcaagtgcaagtgattgaccagttggggcacgcgcgcatagacatcaatgaggcgctgtgtaaattctttcgggtggctggtggtgaagcgtatgcgctccacgccgggcaatgcggctacatactcaatgagcagggcgaagtcagcaatctcagccgttccgcccatcacaccgcggtaggcgttcacgttttgacccaacaacgtgatctccttgaccccttgctcggtcaaccccgcgacctctgccaacacgtcgtcaaacgggcggcttacttcttcgccgcgtgtgtagggcacgacgcagtagctacagtactttgagcagccttccataatggagacgaaggcgctggcgccatcgacgcgcgctggcggcaggtgatcaaacttctcaatctcagggaagctgatatcaacctgcggcttctgagcgcgttcgcgctcattcaacagatcgggcaagcggtgcagggtttgagggccaaacaccacatcgacaaacggggcacgcgcaataattgccgcgccctcttggcttgccacacaaccgcccacaccaatgagcacgccttttttcttgaggtgcttcacacggcctaagtcactaaacaccttctcttgcgccttttcgcgcacagagcaggtgttgaacaaaatcagatcggcctcatccacatcttgggtgggctcatagccttgtgccgcttgcaagacgtcagacatcttgtctgagtcgtacacattcatttggcagccgaaggtcttgataaaaacttttttgctcatgtcgcgttgcttgggttaggccaacccatgcacgccacgcaccagcgcgagccgcgggtgcgaaagagagcgagggccggcgttgcatggtgtagatccagtggccggcgtgcagacgcgctgcacacaaaacatgattgtaatacttgggcaggcaataaaaaaacccggaaaatttgcaccatccagacagaaggcaaacacttcttccggagtacggccgtgcatgcgtaccgttttttctagcacggccatcacatcacctcatccaatttgtttattgctgccgcaccgaactgtgccgcgtagcgcgcccagtgagttggggctagggctctatcgaaactgcgcagataagaaactacatcaaaagcattaattcctatagactgataaatcaagtccctgcttagctgtttttcacaacgaggtgccagtccatggatcacacaatcacaaaaccagcgcgcgtcgaaggctacgccgtccaccgtatggtcgccgctttggtagacgacgcacccgcgctgcatctcgatgccggcgacaccctaaccattcgcaccgatgcgcccctgcccagtgggcatattgtgggcttctcgttgcgtgcctgtgtctctgtcaagaacaaggggcggcaccgctatttccccagtgctgactggcgctctcgccacagttggctcgagcgaaaaggcgtacagcatggcttcgaagtcatcaccgtgcattgctctgccaaacacttggtcatcgaaaaacaatctggccaattcagtgttgatgacaccttgtttacgggtgtcctcaaagttgtcgattacgacaagtacaacgccgcgctgctatcgggcatcggcaacacggcacgcgccttcgggttcggcatgttagttatttaatcttcaccaagggaaaccatgccaaagcaaaccatcgttatcgacaccgttatcaccacacaaggcccgctgtctatcgccatgcccgtcgcacagggcacacgggcaaacgactacaacaactttccattgatggcccgtgggcaggatgaactgggcgccgtattgcaaacagcctacctgcccgctagtacggtgcgtgggttccttcgccgtgcggctggcattgccgcgatggaaaagcgcggcgtaggcaacaccacattgcagcaagcgtattccgatattttggggcagtctaaagacgccaaagaaacggtggacttggtccagctgtctgccatacgcgaggcagaccccatactcgacctctttggttcgtggtctatcaagtcgcgcttactggtgagtaacttcttgcccacaaccaacgtgttgccacaggccatcacgggtgtcagaaaagacttagaagacaccgaaggcgtgttgaccctcttgagtgagaccgaccaacaggcctattacaaccgcagtgacatcaacagccagcgcgcagccgctgacgcagtcgtcaagggcctcactcgtgacatcagaaaagccaaaaaagacggcaacgcactcactgacctagaggcggcgcttgtgatcgccgacgcgaaggccgtggccttaaaaacggatatgggcgagatggcgaactcatcacgcaccatcaccgagttttttgccttgcccgctaacatggccttgcacggacgcatcgtggttgagcaagccaaggagcgtgaccttgcattgatcgtggaggcgctagacaccctgtctattcgccccatgttgggcgcccaagtagcgcgcggctgtggcgaggtggcggggcagttcaccatcaaggtggatggcatcgtggtcaagacagtcaccacgggcggctgggtgcctgcgcaggtcgaagacttctcgtctgatgcgcctgcaccagccgctgtctaattgcacgtggaccagttacgaatcaccgcccacctcagcggcccccttgtgacggggggcggctacctcacctttgatgcgttgctcgcctctgccacttacagcttgacgcaagacattgagcaggcccacaaccagctgccacttaaacaagttgccggcctgtaccacgccagcgccgccatttatgaacccgttgccatcggggcattggctattgtgcaagccatgcgtcccgacgacctgtggcttgaccaccagtggttaaagaagaacaagcgcggcgcggtgcacaccaagttcgacaacctatccgacaacatactgaccacctacaagaccatagcggcaccgaccatgacctggtactgcgaaggtgatgtagaccgcattcgtgtcttactagcgcatctacccctcattggtaaaaagcgggtttgctccgtgactcagtggaccgttgaggcgggcgagcttgacggtctgcatggctatgccgatgagccactgcggcctgtacccgttgagctgtgggatggtgacaagagcagccccatcgtggacgcggcatggcgtcccgcttattgggatgcgactgggcgcaccgcttgttttgtgaactgagggcacaccatgacgacgcttgaatttttaatcagtacttcggtcgccacctcgttgcgcaaaccggtgatgcgcaggccgatgcaacgcgcacgctgtcgtctggccacaaaatggccaagggtggcacagcacaacgcattgcatcgggttgggcggtgatctcagaagatgtcagcacgcttcaattcaagctggcggccaccggcttaagttacggcggacagacgcgttacgaggcttggctagatgcgcttgaggcatttagcggcaagcccatcatgcttattgagtttgataagaagcctgtaccagttaccaacctgtttcgtacgcatgatttacgagcggtacaggtgtgttcgcccggcggggcggcgctatttgactttacgcaagaacccaccgctgagagtggtaaagcgcacaaagtgctgtggaaattaaaactagaaaggctaaaaagcgctgttgaatcaagcgcttgagccacatgagatcaagccaccctctaaatgggtggttactagaactcaccggtcagccactcgtttgttttgcggatcaagccaccgtctaaatgggtggttactagaacatgtcgctagttgcgctttacgaaggcaaagatcaagccaccctctaaatgggtggttactagaacgacgtgcttggtgacatacaacgcgtgcgcagatcaagccaccctctaaatgggtggttactagaactatgccgtccagcccgttcgtttcaagccttgatcaagccaccctctaaatgggtggttattagaaccaatcaaatatctacgcctaccgtaaaaatgatcaagccaccctctaaatgggtggttacttatttacagacataccatgggccgccgtgcccttattaggagttcaccgatgtttcgttcctcagagcagcagcatttctgcaatgtgcttattaagcatttgaaacgcgtcgatgcgcccatattgctggaaggcggggtgggtcttgggaagacgcgtgcctacctggccgcactggcaactacgacgcaaacggttgccattgtgttacccacacaccaactgattgaccagttgctggctagcgctgacttgtcagccgttgccttgccattggccgtgttcaggccagccagtcggtttgacacacgggaggcgtaccaagcgcagcgagaggcggcccgtgctgcgcgtgtcatgctctgcaccgctgcaagcgtgattattgaccaacgccttgcgggggcttacaacggcgcaacacagcgtgatgtggtgttatttgatgaagccgaccagttacccgatatggcggcattgcagagcgactttgtgattgaggcggcgctactgcagggccagccgctgcacgcggccttagagcgcataagcaccacccgttcacagtcggttgaggccgagcaaaaggctgctgcgcgggtcatgcttgagatattggccgaaccggtgggctacgcatccgtcgggcttgatgatgatggcaatgcgcggctacaccacgccctgccaggtcgcttattaaagaaaattagcaatcgcggtagcacggtgtttctttctgcaacgctgacccacaacgataagtttgatgacttcaagatcgccatgggcctagacgcggtgagtagcctgtcaacaagcattgagccagaacagcatggcacgctcgacttcaccgtacacgcgcacgaggtggacacgcctgactggtttgcggccaccgttcagtgcatacaaagcgcgcagcgccccacgttggtggtcacacctagccatgacctcacagagcggctacaaaccgccgtgggtgagcaagcagacttgcttatacgtgcgggtgcatgggcgggtcttgacacgccaacgcgctggcgtaccgtggttattccgcgcgtgccatttggcgcaccagtcattgttgacggggtggcggtcacgtcttacttggccgccaaggtgacggccagtcggcggatgcgccaagcaattggccgtgggcttagaacacctgaggcggtgtgcacggttgtggttttggatgcgcgggcacacaacttaggtcgctttgtgccagagcgttttgcggcagattggtcgtctcggcaagtgtttgaggagggtgcccgccatgcggtggtgctgtccaaagcggagcgcgaccccgctttggccaaagccgcgctcagacactacggcgctcaatgccaacaagcgggttgttccgtgacagaggcgtgtcagctggacgtgcaccaccttgaccccgtaagcgaaggcgtgcgccgcacaaccttgaaggatgtgaccgtgctgtgtgcaaaccaccaccgacaggcccaccacgacatgaaaatggggctgaacgtgtcgtagcgcaacaaaaaacccgccatacctttgggtacgcgggttttgggagttctggcaaggcctgaaacctaaatgtggtggtgataggtggacttgaaccaccgaccccagcattatgaatgctgtgctctaaccaactgagctatatcaccgagcctgaaattatagccaaaattctcagggctttggcttgccgccaaaagtttttgttagccattttgtcgcgcccgtacgacgcgccaagcccttggttattggtgtttgaaggcgggtttgcgcttgtttatgaacgcatccatgccctctttttggtcttcggttgcaaacagcgcgtggaacagacggcgctcaaaacgcacgccttcgctgaggctgccttcaaacgcttggttcaccgcttcctttgccgccatgacactggggagggagtagttgcaaatcatcagggctgcgcccaaggcctcggtcatgagttggtcatcggcgaccacgcggctcaccagtccgccgcgctcggcttctgcagcgtccatcatgcggcctgtgagggccatgtccatggccttggctttgccaacggcgcgtggcaggcgctgcgtgccacctgcgccagggataacgcccaacttgatttcgggttggccaaatttggcgctctcgctggcaatgatgacgtcgcacatcatggccaattcacagccgccgccgagggcaaagccgctgacggcggcaataacgggcttgcgaacgctgcgaatggtttcccagttgcgcgtgatgtagtctgacttgtagacgtcagcaaaggtgtaggtcgccatagcgccaatgtcggcacccgcggcaaaggctttttcactgcctgtgagcacaatgcagccaatgtccgggtcggcgtcgaatgcggttagcgccgcgccaagctcgtccattagcgcactgttgagggcattgagttgtttgggacggtttagggtgagtatgcccacgcggccttcgatgcggattaaaaccagttgctcactcatgtctgtgttctccaatgtggtgcgaaaagttgcttagaaaaagttgtttcgaaagttgcttcgacgtaagcggttgatcatagccaagcggtgagcttgctagggtctttcaccaccagttcggcgatctggttggcgtgggtcgatggccagatgagggggcacgacaacatgcggccatcgcgcgcgacaccggcaaccaatgggtgctgggctacgtcggcgtggcgtctcgcaatgttctccacatcgctcagtgactttacccgccattgatcggtgccatcaaatagtgtcacccattcgtcacccgccgccatgcccgcttgttcgcctgcaccgcctcttgccacgtgggtgatgcggatgccgtctcgctcaacgacacgcatgcccaagcgctgggcgagggtgccgctcttggccgccacggcgacaccgtaatgactaagcagtgcgtgtaccggcaggtcttcggtgctgtgtacccagtgcgcgagctgtgtggcgacgttggcgtgcccttgctggttgagcagggcgtagatgtcggcctcactgatggtgccgcctttgcttttgacccataggccgcgcatgagggtgtcgagatcgccgccttgttggcgcagcatgaggtcggtgcacagcgctattagcgcccctttggtgtagtagctaacggtggcgttgggcgtgttttcgccaatgcggtagtacttgacccacgcgtcatagctagactgggcaacgctttgcagatgccgccctggggtggccgcaacgtggttaatggatttggccagcagcgtgagataggtgggcgtatcaatgagtttggcgcgttgcagaaacaggtcatcgtagtagctggtaaagccttcaaagaaccacagcagctcggtgtagttctcttggttgaagtcgatgcttgcaaactcggatgggcgcaggcgcttgacgttccatgtgtgaaagtactcatggctaatgaggccaagtaattggttgtagccagcgccttgtgcatgggggggcgctgcctcgccagcgacggccgttaggggcaagtcggcacgctggcaaatgagtgcggtgctggcgatgtgctctagcccgccgtagccgttttcagtggcgtgaagcatgaagacgtagcggtcaaagggtagttggcgttgcggttgtttgccgtgccaaaacgtgatctctgtttcgcaaattcggcgggtgtcggcaactaattttttgacatcaaacccgggcgcggtgtggttgccaatgcccgtgacaacgagttcatgcggtacgccagagaccttaaaccggctgacgtaaaaatcacccaaggtaaagggactgtcggcgagctcgccgcagttgcgggcggtgtagcgcccgaagccacgcgcgtcgatttgccgcgcgggcaatgcggtagacagccgccacgcattgaacgcgggcgcggtggggcgctcgacggagatggtttgtatctcgtcttcgcccccgaccacttgcaaacacaggctggtggggttaaagaagccgcgggtgttgtccaaaaaggcggttcgcaccgaggcgtcaaaggcgtagatttggtaattgagctccagcgggcgtttgccgtcggattccactagccactcatttttactgcactgcgtgatttggcaaggcgtgcggccttgcttggctgtgagcgcttgcaggtgttgcgaaaattcacgcaccaaataactacccgcaatccaaacgggtagacgcaggcgctgttgcttttttgggcttgagatgcgcagatgcacaccgaacaggtgcgcttccgcgctgtcaacgcgaatgttgtgatcgatgcgcatggtgttacttgatggcggccagacgcttctcaacttcggcggcagaaatggcgccggggacacgtgtgccgtctgagaagaaaagggcaggcgtgcccgagatacggtgcttttgaccaaacgcgatgttgcggtcaagcgcgctggtgtcgcagctgatggcggcggcgctggtggttagagggacttcattcaccatccagtcttcaaaggctacgccggggtttttgtcgcaccaaatggccttggacttgagcgttgaatccgcgccgagtatggggtacaaaaagatatgcagggtgatgttgtcgacattcatcatgtcacgttcaaagcgcttgcagaagccacagttggggtcttcaaaaaccgcgagttgacgcttgccgttaccgcgtttgatggtgaaggcatctttaaagggcagggcctcaaagggtattgcgctcaatttatcgaggcgctcctgcgtcaggttgcgtttgcccttgaggtcaacgagtacgccttgcagcaaaaattcaccgttggcatcggtgtacaaaatttcggtttcaccaaagcgaacttcgtagaggccggccatgggggtcttggtgacgctgttgatagcgggtaagttgggtagttgcttgggtagcatctcgcgaatcttggcttcctgtgcccagcccatgcttgccatgagagtgaatgcgatgcccacggccaagccgcgcaataaagagcgtgtgggggtgggtgcgagaggtgacgtgtggtgaagcatggtgtggttcgctaggtaggcgttgtttgggggtaagagggtgggtgggttggttcgtgggagggggctgttgggtagcggatgctcgctgttggagcaccatcgtggcaatcagttccccatgccaacacgctgtacccacgacttgagtgggcccatggcattaaagcccgacatgcctgcattgcgtagccaactggcggcggggttgcggcccaaggggttgttgaacaagtgaaagagtccgtgcgtgacccattgcatgggttcggtggcggcgcgtcgacgccgttggtagcgctgaagcacgcgtgaggcacccggagactcacctcgggcgcgtgccgcaacgcagtcactgagcgtttgtacgtcggccaagccaaggttgagaccttgccctgcgagggggtggatggtgtgcgccgcatcgccggctaacgcggtctgctgggcaacccattgcgtggttaagccgacgctcaaggggaaggcaacaggcccgctggtaagggagaggtgccctagcgcgccctgactggcttgggtgagttggtcttctagggcggcggtttgggcggtggtctccatgtccagccacgtctggtgcgcagcgtctggtagcgaccagacaacggccaggtcgtgcccgtcagcgccgcccatgggcagcagggccaaaatatgtgtgccgttaaaccactggtgggcgacgccgccgtggctgtgctcggcgcgcatgcgcaacgccaaggcacggtgggggtagtgcttacttaccatgtcaatacccaaggcggtgcgcgcgataccgctcttgccttcgcaaatgatggtcaatgcgctaggcggtgtctgggctgatggtgacgcgtggtcgtcaaattgcacgcgtgcatggcgtgtgacggcttcggcaagatggtcctctaggacaggcacatcgaccatccacgccaagggctgcgcttgctgtgggggtgcgtcgaattgcagcgcgcctgacgcatcgccaaacacccgcatatgggtcatgggggtcagccacgcggcctgatcgtcttgaggccagacaccgcatgctttgagggtgtctctcgaggtgtggttgatggcgtaggcgcgaatgtcgcgggtgtgcggtggcgcttggggcgcgggcaggctgacggaaaagccttgctctgccaataacaatgccgccgcgtgcgcggtgatgccagcgcctaaaacggtgatgtgccctgattgagtcatggcgttattctattgggacacccacttggggggccagcgatgaccctgccccggaagtgccttaaactctgggtcttgctttttgaggattgtcatgagtttgaaatgcggcatcgttggtctgcccaacgtcggtaaatctaccctgtttaacgcgcttaccaaggctggtatcgccgctgagaactaccctttttgcaccatcgagcccaacgttggcgtggtggaggtgcccgacacccgcctagcgcagctcagcgatatcgtgacgcctgagcgcattgttcctgcgattgttgaatttgtggatatagccggcttggtggcgggtgccagtacgggcgagggcttgggtaacaagtttttggcccatatccgcgaaaccgatgccacggttaacgttgtgcgttgttttgaagatgacaacgtggtgcacgtcgcgggcaaggtggatccgatttctgacattgaggtgattcaaacggagttgtgccttgccgacttaggcgcagtagagaaagccctgcaccgggtctccaagaccgcgcgttctggcgacaaagagtcggtgcgcttggtgtcgattttggagcgctgtcaggcggccttaaacgagggcaagcctgttcgcacgctagatttcagcaaagaagaagcgccgctgcttaagcagtttttcttgattacggccaagccagcgatgttcgttgcgaacgtgtctgaggatggctttgagaacaaccccctgcttgaccgcttgaccgcctttgccaacgagcagaacgcgcctgtggtggcgatctgcgccaagctagaggccgagatgagcgagatgagcgacgaggaccgcgatatgttcctggaagagctggggcagtccgagccgggcttaaaccgtctgatccgtgccgcctacagtttgttgggtttgcagacctacttcactgcgggtgtaaaagaggtgcgcgcttggactatccacgttggggatacggggccgcaggcggccggtgtgatccacactgatttcgaaaagggctacattcgcgcccaaaccattgcctttgatgacttcattgcattcaagggcgagcagggcgctaaggacgcgggcaagatgcgcgcagaaggcaaggagtatgtcgtgaaagacggcgatgtactcaacttcttgttcagctcataagccactgcgcactcgcggcaatggcaaggtagcgggcgaacttgccaatggccatgtacaccgcgcaggccagccagggcattcttagccagcctgcgagggtgcacaccacatcgccgaccacgggtagccaagccagcaaacacgccttgggtccgagtttttccagttgagccaaagcccacgcggcgagcctgccagccgttggggtggcctgagcatccgcgcgtcggtgcgggtgcgcacggttttggtaggcgcggtgcgctgattgcaggccaacgcccatcagccaactcaccatgccacccaaggtgttgcctaccgtcgctagtaacaaggcgggccaaaatagatggggtgagatggcgatgagacccattaatgccgcctccgaccccatgggaagccacgtcgcggagacgaatgccgtgacaaaaacggtagtcaacccccattcgggcagactgaaccagtgaagtaagctcgcaaaaaaggcatccattggcttgagtataggtacaatcatgcttaaattttcagcaagcaccgacgcgtcaatcggtgcttttttgtctctaactgccgtccaacgtgcatatcggtccctaccacctccgcaataacctgttcgtcgcgcctatggctggcgtgacagaccgcccgtttcgccagttgtgtaagcaactgggcgcgggctatgccgtgagcgaaatggtgacatcgcggcgcgatttgtgggactcgcttaaaacctcacgccgtgcaaatcacgccggtgagagcgggcccattgcggttcaaattgcggggaccgacgcccagatgatggccgatgccgcggtgtacaacattgaccgtggcgcacaaattattgatatcaacatggggtgccccgcaaaaaaggtgtgcaacaagtgggccggttctgcgttgatgcaagacgagaccttggcgatcgccattgtcgaagcggtggtgaacgcctgcgcctctaaggatgtcccggtgacattaaagatgcggacgggttgggcggcgcatgcgaagaatgccacgcggttggcgctggcggcggagcaagtgggggtgcagatgttgacgattcacggtcgcacgcgcgagcaaggctataagggttttgcagagcatgagacggtggcggacattaagtcgcgggtgcgtattcccgtggtggccaatggggatattgcatcgcccgaggcggcgcaacgtgtgttgcaagccacgggggccgatgcggtgatggtgggacgcgccgcgcaagggcgcccatggatatttagtgagatcgctcattttttagccaccggacgccacgcgccagcgcccagcgctgtggatatgcgggcgtggatggtggagcacctgcacgcgcactacgcgctttacggcgaatttacaggcgttcggtctgcgcgcaagcaccttggttggtatgcccaacacttgcccatgggtgagcttttgcgtcagcgcatcaatgccttaaccgattgcgcggagcagttggctgcagtcgaggcgtatttcgcagcgtgggacagtgatgatctggccgcgcttggtcgggcatggcaaccgacacagataccgggcagcgcgcagagccagtctgtgcgagagatgcctgtcgacatgacattggccccccttcattgagcgttatatgagccgtaaagacattgaaaagggcgtgcgtgaaagcatgcaaacctacttccaagacctcgccggtagcgagccacatggcctgtacgacatgatggttgatgttgtggagaagcccttgctggaggtggtgatggcgcaagcaggcaataaccagtctcgcgcggcgcagtggcttggtctcaatcgcaacaccttgcgcaaaaaattacttcaccacaagttactcagttaacgctgcaaacgcggcggcctaactcgtcatttccccctttatttttcacgactaccaagcaccatgaacgcactcttatctgtatccgacaaaaccggcattgtggcccttgcgcgcgcgctccacgcccaaggcattggcctgctgtctactggcggcacggccaagctgttggcggaagagggcctgcccgttaccgaggtggccgatatgaccggctttccagaaatgctcgatggtcgcgtcaaaaccttgcaccccaaggtgcacggcggcttgttggctagacgtgacgtgccagcgcacatggcggcgttggccgctcacgggatcgataccattgacgtgttggttgtgaacctgtacccctttgaggcgacggtggccaaagcgggttgcaccttggaagaggccattgagaacatcgatattggcggccccgcgatggtgcgtagtgctgccaaaaactggaaggacgtcgcggttttaacggatgccagccaatacgagaccgtcattgccgagctcgccgctaacggcgcggtgtctaccccgacgaagtttgcgctgtccgtggcggcgtttaaccgcatcagcaattacgatgcggcgatcagcgactacctgtcggcgtatcagttggagagcgataccttacaagcgttccctgcacaggcgaacggacgttttgtgaagttgcaagacctgcgttacggcgagaatccgcaccaatcagcagcgttttaccgtgacctacaccccgcgcccggctcgctggtaacggcgaaacagttgcaaggtaaggagctgtcctataacaacatcgccgatgcggatgcggcatgggagtgcgtgaaaagctttgacgtgcccgcctgtgtgatcgtgaagcacgccaacccctgcggtgtggcgttggccgaggatgcgttgggcgcctataccaaggcgtttcaaaccgaccccacatcggcctttggcggcatcatcgcgctcaacgttgtggtggatgaagcggctgccaaggccattagccagcagtttgtcgaggtgctgatggcgcccgcttataccgagggtgccttggcggtatttcaagccaaagccaatgtgcgcgttttgcaaattacgctgcctgcggcgggtggacagacggcgtgggagcgtgggcgcaacgtgcaagacataaagcgcgtggggtctggtttgttgattcaaacggcagacaaccatgacctgagtttggccgacctcaaagtggtgtccaaagtgcagccgaccgaggcgcagttgcaagacctcttgtttgcgtggaaggtggccacgtatgtgaagtcgaacgcgattgttttctgtaaagaccgcatgaccgtcggcgttggtgcggggcaaatgagccgtttagattcagcgcgaatcgcgcgtatcaaggccgaccatgccggtttgtcattggcgcagtcggtggtcgctagtgatgcgttcttccctttccgagacggtctcgatgtggtggtggaggcgggcgcgactgcggttattcatcccggtggttccatgcgtgatcaagaggtgattgatgcggcggatgagcatggcgtcgcgatggtgtttacgggcgtgcgccacttccgtcactaagccgttgcgggtgttgcttgcgtggccatgttgacctggttggatatctcgcagacggcgagcgatgacgactgggtgaccttagaggtctgcgcgtctgtgacccgtgctgaccagcatcgcgtcgatgctgccgtctgtgagttgcttggttatttgtacgcgcgctgtggccgtcccagcgaagaccccgacgtgccgcccggcccacagtcgtggctgatcgatgtgcaggcgtatgccgagtcggcagccaaagcgccgctggccgtcgccttggattggcgcgacgacgccacggtgtctctgcaatgggtcacagcgggagccgctgacgcgaccacggaagacacccggcgaacccttctcattagtttgggcttgtcacccgcgttagcgttcgcttgcgatgaggcattcgaactggggctctagctgacgccccctaacgcggtgtatgccccgctcgtgggactacagggttgcaaatgtccgctttgccgcggcgatggtgtcgtcaatgtcttgcgcggtgtgcgcggcgctcacaaagccagcctcaaatagcgcgggcgcaaagtaaacaccttggtccaacatgccgtggaagaagcggttaaacaccgcgccgtctgtggtcatgaccttggcgtagttttgtggcaactcagggaagaagaagaagccaaacatgcccccttcgctgtcgccacaaaacgggatacccgcttccttggctgcggcggtcatgccgctgacgagttgttgggtgtgttgattcagttgggtgaaaaagccgtccttttgaatctcttttaaggttgccaaaccgcaggcggtggcgacggggttccctgacaaggtgcccgcttggtagaccgcgccaagtggtgcgaggtgggacatgacttcgcgcttaccgccgaacgcggctaacggcatgccgccgccaatgactttgcccatcacggtcatgtcaggctcaaagcccggaatttctttggcgtacaagctctgagcgcttcccagtgccacgcggaaaccacacatcacttcatcaaatgcgagtagcgctccgtgggcagtgcagagttcgcgacagcgttttacaaatggcacgctggcccgcacgaagttcatgttgccagcaatgggctccatcatcaaacaggcgacttcatcgccgtgttccttaaaggcggcctctagcgcttccacgtcattgaagggcagtactaaagtgtgttgcacaacctctggcgggacgcctgcgctggtggggttaccaaacgtggcgaggccagagccggccttaaccaacagggcatcggcgtggccgtggtagcagccttcaaacttaatgattttgctgcgtcccgtggcgccccgagccagtcgaatggcgctcatgccggcctcggtgcctgagctgaccagtctcaccatttcaatggatggaaccagcttgatgatttcttcggccagttctatttcgcgttcagtcggtgcaccaaatgacagcccttgctctgcagcgctcagcaccgcggcgtgtacggcggggtggcggtgccccaagatcatcgggccccaagagccaatgtagtcaatgtagcgctgatcttctgcgtcccaaaaataggcgccatcgccccgcgtgatgaagcggggtgttccgccgacggctttgaaggcgcgtacgggtgagttaaccccacccggaatggctagcttggcgcgtgtaaataattggtcgtttttgttcatgatgtgtttccggttacgttgcacggttcagtgtttggtgtcgtctagcgggaagtcgcctaacgtgtggtgaccgacatccagcgtcggtgtgtcgggggcgtcggtatcctcggtatcgtctatgccgtcatcttcgccgcgtccccaaaacaagcggtcgggtaaggcgtgtcccatgccgggtgcaaagcctgcatccagactctggtcgagataggtcagcgcttctgcgcaggcggactgcaagtcttcgcctgcacccagcagggccgtgagggcggctgacagggtttccccagccccggtgaaggtggtgtcaaaccgctcgaagcgtgcggtggccaacacggtctcaggggacgctaggtggttttctaagaattgttcaggtgcatttaacccggtgaccaaggtgtaactcactccgtgtagctgcgcggcgcgagctacgtcgcgcggtgtggggggcttttcgctcgcccagtcgggtaataaccagcgacacaaggtgctgtagttgcccacgagaacggcggtttgcgggagcattaactcggtaaatgcgtctaagtaggcatctagagcgatatcgtccatccacgtcaaactgggcatataggcaacgacgggggtgtccgcgtagtcgttggcaatttgcgccactgcgctgatgttttccggactgcccaaaaagccgactttgatactggtcacggggatgtcttcgagcaccatgcgggcttggtcgttgatggcatcagcgtccagcgagacgtggtcttggacggcggtggtgtctcggatgagcaccgcggtgaccacgggcaacatgtgtacagaggcggaacccatggcgccgatgtcagcggccaaaccgccagcacccgttgggtcactggcattgaacgacagcacgcacggcagcgttagctggtgcgcggtcgtgctcgtgtcccgtttgctgggctgcttgggcggcgaatctaaagcatcggtcatgggtttgctcgttgaggggctgtctcagttccttcgggggtatgcttctgcaccgatacaatgtgatcattctatgacacggttttaaaaaaatgagcgactcaacgacttggatgtgcctgatctgcggctggatgtacaacgaagccgagggcgcgccagcggacggcattgccgcaggcaccaaatgggcagatgtccccatgaactggacctgtcccgagtgcggcgcgcgcaaggaagattttgaaatggttcaaatctaattctcgcgcatggcgcccttcagggcttgggcttcttcacgacggcgtagcgagccaacgttcgctcgcgggcggcggcatggtcgacgatgggtttagggtagttctcccctaaggtaacgccggcggtgatgaggtcgaaggggtcagctagccaaggggcgtgtatgcgtttgtccgacagctcagcgagaaccggtaagtagcggcgaataaacttgccctgcgcgtcaaacttctcgctctgtgtcgtgggattaaaaatccgaaagtacggttgcgcatcacacccgctagaactggcccattgccatcccccgttgttggcagacaggtcaaagtcgatgagcttttccgcgaagtagtcagccccccagcgccagtctatgcctaagtctttggtgaggaagctggcaacgaccatgcgtaagcggttgtgcatgtaaccggtttggttgagttggtgcatcgcagcatccaccagtgggtagcccgttgcgccttggcaccacgcgtgaaagagggccttggcgctggcgccgtgttcccacttgatggcgtcgtattcaggcttgaatgcgcgatcgacgatgcgtgggtggtggtgcatcacctgcatataaaaatcacgccaaattaactcccctagccaggtgctggcacccacatggccttggctatgaccggcgaaggcatgttgggcgagggtgcgaatagacacggttccaaagcgcaggtgaacgcttaggtagctggggcccttgacggcagggaagtcacgcgtgtccttgtagcgggccatgcggggcaagaagtcggccaacaaggccgcagcgccagacgcgcccggcgtgatattttgtgccacgaggtcgacaggcgtaaaccccatactggttagtgagggcatgtcgcccagtgccttgaggtctgagggcagggcatcggtttgggccagggcggttgcgtaacgctcggtggggtaggcctttaggtagtagggctctagcttcttgagccaggcgtttttgtagggcgtgaagacgccaaaggggcgcgattgttgcgtgaggacctcgctacgctcgaaaatgcattggtctttgtaggtgttgagcaggatgccgttgtgcgcaaggtgcccaaaaatagcggcgtctctcgccagtgcctgtggctcatcgtcgtggttggcaaataccgcatccacgcccaaggctttcgccgtgcgcggtatcgctcgctcgctctggtcgtggaggcatagcacgggctgggcattggcgccggctaccgcgcgtagctgggtgttgaggtccaccaagctgctgtggataaaggcgacgcgccgatcggttgtgggcaaggtgtccaaaatggccttgtcgaatacaaagatacaaaaaacggtgtcgcactgcttgagcgcgtgataaagcgcggcattgtccgtcaagcgcaggtcccgcctgaaccacatcaggccttttgtgtacttctttttcatcgtgtagattgctcgattgggtcgtgagagggtgcggattgtcggcagcgcccgcaccccttaaaataacatcatgcctactgattctgccgcgattgacctcacccatcatttcctcattgctatgcccgggttggaggacgaccttttcgctcgcagcgtggtttatgtgtgcgagcacagtgcgcggggcgcgctgggcctgattatcaacaagccgagtgatctgccgctggccggtctctttgagaagatcgcgttgcgactgcatcgtgacgacttaaccgatgcgcctgtgttccggggtggccccattcaaaccgaacggggttttgtgttgcatgcgcccatggggcagggcggtgagtcggtttactcttccactttggtgattcctggcgacggctctggcctgaagggtgtggactggccaaactctgaaattcatgttgcgcttagcgtggaggccgatgacgatgcagcgccgtccgcgccgcctgaagccccaaaatatgggcctgcgcgcctagaaatgaccacctctaaagacgtgctggaggcaatggctgaaggcgcaggccctgctcgggtgttggtcacgttgggctatgccacttggggcaagggccaactcgaatcggagttggctgagaatgcctggctgaccgtgcccgcggacgagtcgattatttttgacacaccgcctgagcttcgctacagccaagccatgggtttattgggtttggatgcaggcatgctgcacggtgaggcaggacacgcctgatgtccatgcggccactaccgccagtgatcgcctccgatgtgcagttgttcctagcttttgattatggggagaagcgcaccggtgtcgccagcggtaaccgcctgacccgcagcgccacccccttgggcacgatcgccgcgcaaggggacgcgaagtggcctcagattgcccaatacctgaaagactggtcgccacaggccgtcgtgattggggtgccacggcacccagacggcgccgaccacgagaacacgcttgcggcgcaaaagtttggcagacaaatcgcgggtcgttttgccgtgactgtattcgaaaccgatgagcgctacaccaccaccgaagcgcatagcctcgctgcaaaggatgcagacgccgtggccgcttgtattattcttgagcaatttcttcggagcctaccgtgaccagccagtttgataacaccgtgcaggcagatgccttggacgcagagggtctctatcagcaactattgacggcgattcgccccttgacggcgacggctgacaagcccgtgcgtttagttggtatcgcctccggcggcgtgtggcttgcccaacgcctgcagaaggacttgggcttggcgggggagtcgggcgtgatttccagcagcctgcaccgcgatgacttttccaagcgtggcctcagctctatgggggtacaaacgaaattgccttttgacgtgaacggcgccaccgtgtggcttatcgacgatgtgctgtacaccgggcgcacgatacgcgccgtgctgaacgagttatttgactacggtcgcccagccgatgtgaggttggccgttttggtcgatcgcggtcagcgggagttgcccgttcaggccgatctggtggtggctcgttgctcggtgccgagcacgcagtcactggagctgtcgcaaacggacggcggtcgtctaacctttaggattgaaactgcgggttgaacgccacagaatcactttgcaccgccacactttattgccctagcgcccctatgcgaacacaacgtaacccccaactgaacgccaacggcgagctcatacacctgctctcaaccgaaggcctgtccaaagagatgttgacccacatcttggacacagccaccaatttcgtgagtgtcagcgaccgcgaggtcaagaaggtgcctttgctgcgcgggaaaagtgttttcaatctgttttttgaaaactccacccgtacacggaccacattcgatatcgctgccacccggttgagcgccgacgtggttaacctagatatcgcgcgctcctctgccagcaagggcgagagcctgttggacaccattgacaacctttcggcgatggccgcggacatttttgttgtccgccacaacgagtctggcgccccctacctcattgcgcaacacgtggggcctcatgtgcacgtggtgaacgcgggcgatgggcgacacgcccatccgacccaagccctgctggacatgtacacgattcgccacttcaagggggacttttccaatttgagtgtggcgattgttggtgacgtggcgcactcgcgtgttgcgcgctcaaacattcacgccttgacgaccttgggctgccctgacctgcgtgtggtgggccccaagaccttggtgccgaatgacatggcacaaatgggcgttcgggtctgtaacgatttgcgctctggcatcgacggtgtcgatgtggtgattaccttgcgtctgcaaaacgaacgcatgagtggcgccttgttgccgtccgcgcaggagtttttcaagagttacggcctgacgcccgagcgcctgcagtgggctaagcccgatgccattgtgatgcacccggggcctatcaatcgaggggttgagattgcatcgtcggtcgttgacgggccacaagcggtgattttgtcgcaggtaaccttcggtatcgcggttcgtatggccgtgatgtctattgttgccagccacgagggctaatgactggccatggcgagtgcaccccaacaaccgacccctttaacccagtacgtgttttaaatcgcctgagcaccatatcgatatgaagattctgattcaatccggacgtgtcatcgaccccactagcgggctagaggccgttcaagaccttgccattgccgctggtcgcattgtggcgatgggcgcgcaggtcaaagacttttcgcccgagcgtgtgatcgatgccaccgactgtgtggtggcgcccggcttggttgatctgtgcacgcgcttacgcgagccggggttcgagcatgagtcaatgttggagtctgagatgtccgccgccgttgcgggcggcattacctccttggtctgtccgccagatactgacccggtcttagatgagccgggcttggttgacatgctcaagtttcgaaccaaaaagctgcgtcaagcacgcgtcttcccgttgggggctttgacccgtggcttggagggggaggtgctgaccgaaatggccgagctcaccgagtcaggttgcgtgggttttgggcaagcggatgcgccgatacagaacacgcaggtactgcaacgcacgtttcaatacgcggcctcgtttggttacagcgtctggttgcgtccgcaagattactggctgggtcagggtgtcgctgccagtggtccgttagccacgcgcatgggcttgtctggcgtgcctgtgtctgctgaggtgattgcgctagaaactatttttgagctgatgcgaggcaccccagcgcgggtgcacctctgtcgtattagcagtgcccgcggggtggacttggtgcgcgccgcgaaggccgaaggcttgtccgtgacctgcgatgtcagcgtgcacaatttgcatctcattgacgtggatatgggctattacgatgcgcgcttgcgtttgcaaccacccgttcggcaacagcgtgaccgcgacgccctgcgtgcggggttggcggatggcactattgacgccttggttagcgaccacaaccccgtcgaagcggatgccaaaaacctgccttttgcgcaagcagaaccgggcgccactgcggtggagttgttgctgagtttggctcttaaatggggacgtgaagaccaggtgccgttgcagcgcgtgatcgcggttttgacgcaagggcctgtcaaagttctgggtcaaagtctgggaagtttgcaagccagcttaggccaaatcacccttggtggtgtggcggatatttgtgtttacaagccggatgccgcgtgggtggtgggcgcagacacattgcgaagccaaggaaagcacaccccctttgcgggttatgaattgcccgcaaaagtagccaccaccattgccggtggctatattgcctttgacgcagtctgagcgcgatgcgagcaatccctgcggcttggcgcatgatattgggcgtgaatcacgttctgcgcggtctacgaaccattaacaaatactttgccacggcaacgcaaaccgagcgtgacgcgatggtgcaggcgtggtctctcgccttgcttgagctgctaaatgttgaattggtcactgatggtgctgagcctgtacccggcttggtggttgcaaaccacgtctcgtggttggatatcttggtgatgaatgccgcacaccccgttcggtttttatcgaaatcagatgtcaagaagtggcccttactcggccgcctgattgcggggtctggcacgttatttatagaacgtgcaaagcgccgcgatgcgctacgtgtggtgcagcaaattacgacgtatttacgtgatggtcaccgcgtggcgatctttcccgagggcacgaccaacgatggtattcatgtgctgccgtttcatggcaacttgattcaatccgctatcgacgccgaggcggcagtgtgcccggtcgggatacgctacatggacaaggccagtggccaacgcagcttggcgcccgcctatattgatgacgacacgctggtgggctccatttggcggacgctgcgcagcggtcgcatggtggcgcgggtgcgcttgggtgagccacaactaaccgtgggacgtgaccggcgcgcatgggcgagcgaccttcaacgcgcggtcgtcaccctgaccgctgagtaaatgcgaggccgtgcgacgtgcggctaaacctcggggcgtcagccttggctggcttggcggcgggccaccatcttttctgcgctgactttgcggtcggcattgacctgagtaaccgttgcacgcgttgacaggtgtcgcaggtactctttgacgggaagttccgatagaaaatcttggccgtaaataattttggtggccgtggagatgagcggcaggtgggcaactgccgtgcagtcagcgaggctgaaggtatcgcccccaataaacggtgtgaagcgtgccagcgatgcgaaggctgcaatgtttttcttcagttgcgtcgccgtcttttcctttaagttgtcacttaccttgccgccaaaaaacgcctctttgtataggtttcgcgcgaccaactcaaggtgtaggtcaatgtaggtggcgagctcacgcaccttggcggcttgaaaggggtctgccggcaccagcgggtgcgcggggtactgttgctctatgtagtcgagcatcacagtggactcgcataaagcgcccgacggcgtcagtaggtaaggcaccttgcctagcggtgaggcatgggtgtcaacctccgaggtccacacctccgactcttgaaacggaacacctttctcgagcaatgccaatttgactttgttgtaatagttgcttgctgaaaagccgcataaagtgatcatgtgatgcccgttggttgagatggctggttaggaagagtgcgtgtaaacgatgcgataattttgccacggaagcgggctctgtcagccccctctgtgttgcccccgctttgcgtcacgtaatggcgtatcaatttttttgaggttttcatgcgccaacgatggtctactttctcgctagccgcagcggtcttttctgcactgctcacggcggctcccataacggtaaatg

SEQ ID NO: 16 - DNA, 30734 bp, Artificial Sequence
  Synthetic Oligonucleotide
  misc_feature (1)..(9959): n is a, c, g, or t
nnnnnnnnnnnnnnnnnnnnnnnnnnnnnnnnnnnnnnnnnnnnnnnnnnnnnnnnnnnnnnnnnnnnnnnnnnnnnnnnnnnnnnnnnnnnnnnnnnnnnnnnnnnnnnnnnnnnnnnnnnnnnnnnnnnnnnnnnnnnnnnnnnnnnnnnnnnnnnnnnnnnnnnnnnnnnnnnnnnnnnnnnnnnnnnnnnnnnnnnnnnnnnnnnnnnnnnnnnnnnnnnnnnnnnnnnnnnnnnnnnnnnnnnnnnnnnnnnnnnnnnnnnnnnnnnnnnnnnnnnnnnnnnnnnnnnnnnnnnnnnnnnnnnnnnnnnnnnnnnnnnnnnnnnnnnnnnnnnnnnnnnnnnnnnnnnnnnnnnnnnnnnnnnnnnnnnnnnnnnnnnnnnnnnnnnnnnnnnnnnnnnnnnnnnnnnnnnnnnnnnnnnnnnnnnnnnnnnnnnnnnnnnnnnnnnnnnnnnnnnnnnnnnnnnnnnnnnnnnnnnnnnnnnnnnnnnnnnnnnnnnnnnnnnnnnnnnnnnnnnnnnnnnnnnnnnnnnnnnnnnnnnnnnnnnnnnnnnnnnnnnnnnnnnnnnnnnnnnnnnnnnnnnnnnnnnnnnnnnnnnnnnnnnnnnnnnnnnnnnnnnnnnnnnnnnnnnnnnnnnnnnnnnnnnnnnnnnnnnnnnnnnnnnnnnnnnnnnnnnnnnnnnnnnnnnnnnnnnnnnnnnnnnnnnnnnnnnnnnnnnnnnnnnnnnnnnnnnnnnnnnnnnnnnnnnnnnnnnnnnnnnnnnnnnnnnnnnnnnnnnnnnnnnnnnnnnnnnnnnnnnnnnnnnnnnnnnnnnnnnnnnnnnnnnnnnnnnnnnnnnnnnnnnnnnnnnnnnnnnnnnnnnnnnnnnnnnnnnnnnnnnnnnnnnnnnnnnnnnnnnnnnnnnnnnnnnnnnnnnnnnnnnnnnnnnnnnnnnnnnnnnnnnnnnnnnnnnnnnnnnnnnnnnnnnnnnnnnnnnnnnnnnnnnnnnnnnnnnnnnnnnnnnnnnnnnnnnnnnnnnnnnnnnnnnnnnnnnnnnnnnnnnnnnnnnnnnnnnnnnnnnnnnnnnnnnnnnnnnnnnnnnnnnnnnnnnnnnnnnnnnnnnnnnnnnnnnnnnnnnnnnnnnnnnnnnnnnnnnnnnnnnnnnnnnnnnnnnnnnnnnnnnnnnnnnnnnnnnnnnnnnnnnnnnnnnnnnnnnnnnnnnnnnnnnnnnnnnnnnnnnnnnnnnnnnnnnnnnnnnnnnnnnnnnnnnnnnnnnnnnnnnnnnnnnnnnnnnnnnnnnnnnnnnnnnnnnnnnnnnnnnnnnnnnnnnnnnnnnnnnnnnnnnnnnnnnnnnnnnnnnnnnnnnnnnnnnnnnnnnnnnnnnnnnnnnnnnnnnnnnnnnnnnnnnnnnnnnnnnnnnnnnnnnnnnnnnnnnnnnnnnnnnnnnnnnnnnnnnnnnnnnnnnnnnnnnnnnnnnnnnnnnnnnnnnnnnnnnnnnnnnnnnnnnnnnnnnnnnnnnnnnnnnnnnnnnnnnnnnnnnnnnnnnnnnnnnnnnnnnnnnnnnnnnnnnnnnnnnnnnnnnnnnnnnnnnnnnnnnnnnnnnnnnnnnnnnnnnnnnnnnnnnnnnnnnnnnnnnnnnnnnnnnnnnnnnnnnnnnnnnnnnnnnnnnnnnnnnnnnnnnnnnnnnnnnnnnnnnnnnnnnnnnnnnnnnnnnnnnnnnnnnnnnnnnnnnnnnnnnnnnnnnnnnnnnnnnnnnnnnnnnnnnnnnnnnnnnnnnnnnnnnnnnnnnnnnnnnnnnnnnnnnnnnnnnnnnnnnnnnnnnnnnnnnnnnnnnnnnnnnnnnnnnnnnnnnnnnnnnnnnnnnnnnnnnnnnnnnnnnnnnnnnnnnnnnnnnnnnnnnnnnnnnnnnnnnnnnnnnnnnnnnnnnnnnnnnnnnnnnnnnnnnnnnnnnnnnnnnnnnnnnnnnnnnnnnnnnnnnnnnnnnnnnnnnnnnnnnnnnnnnnnnnnnnnnnnnnnnnnnnnnnnnnnnnnnnnnnnnnnnnnnnnnnnnnnnnnnnnnnnnnnnnnnnnnnnnnnnnnnnnnnnnnnnnnnnnnnnnnnnnnnnnnnnnnnnnnnnnnnnnnnnnnnnnnnnnnnnnnnnnnnnnnnnnnnnnnnnnnnnnnnnnnnnnnnnnnnnnnnnnnnnnnnnnnnnnnnnnnnnnnnnnnnnnnnnnnnnnnnnnnnnnnnnnnnnnnnnnnnnnnnnnnnnnnnnnnnnnnnnnnnnnnnnnnnnnnnnnnnnnnnnnnnnnnnnnnnnnnnnnnnnnnnnnnnnnnnnnnnnnnnnnnnnnnnnnnnnnnnnnnnnnnnnnnnnnnnnnnnnnnnnnnnnnnnnnnnnnnnnnnnnnnnnnnnnnnnnnnnnnnnnnnnnnnnnnnnnnnnnnnnnnnnnnnnnnnnnnnnnnnnnnnnnnnnnnnnnnnnnnnnnnnnnnnnnnnnnnnnnnnnnnnnnnnnnnnnnnnnnnnnnnnnnnnnnnnnnnnnnnnnnnnnnnnnnnnnnnnnnnnnnnnnnnnnnnnnnnnnnnnnnnnnnnnnnnnnnnnnnnnnnnnnnnnnnnnnnnnnnnnnnnnnnnnnnnnnnnnnnnnnnnnnnnnnnnnnnnnnnnnnnnnnnnnnnnnnnnnnnnnnnnnnnnnnnnnnnnnnnnnnnnnnnnnnnnnnnnnnnnnnnnnnnnnnnnnnnnnnnnnnnnnnnnnnnnnnnnnnnnnnnnnnnnnnnnnnnnnnnnnnnnnnnnnnnnnnnnnnnnnnnnnnnnnnnnnnnnnnnnnnnnnnnnnnnnnnnnnnnnnnnnnnnnnnnnnnnnnnnnnnnnnnnnnnnnnnnnnnnnnnnnnnnnnnnnnnnnnnnnnnnnnnnnnnnnnnnnnnnnnnnnnnnnnnnnnnnnnnnnnnnnnnnnnnnnnnnnnnnnnnnnnnnnnnnnnnnnnnnnnnnnnnnnnnnnnnnnnnnnnnnnnnnnnnnnnnnnnnnnnnnnnnnnnnnnnnnnnnnnnnnnnnnnnnnnnnnnnnnnnnnnnnnnnnnnnnnnnnnnnnnnnnnnnnnnnnnnnnnnnnnnnnnnnnnnnnnnnnnnnnnnnnnnnnnnnnnnnnnnnnnnnnnnnnnnnnnnnnnnnnnnnnnnnnnnnnnnnnnnnnnnnnnnnnnnnnnnnnnnnnnnnnnnnnnnnnnnnnnnnnnnnnnnnnnnnnnnnnnnnnnnnnnnnnnnnnnnnnnnnnnnnnnnnnnnnnnnnnnnnnnnnnnnnnnnnnnnnnnnnnnnnnnnnnnnnnnnnnnnnnnnnnnnnnnnnnnnnnnnnnnnnnnnnnnnnnnnnnnnnnnnnnnnnnnnnnnnnnnnnnnnnnnnnnnnnnnnnnnnnnnnnnnnnnnnnnnnnnnnnnnnnnnnnnnnnnnnnnnnnnnnnnnnnnnnnnnnnnnnnnnnnnnnnnnnnnnnnnnnnnnnnnnnnnnnnnnnnnnnnnnnnnnnnnnnnnnnnnnnnnnnnnnnnnnnnnnnnnnnnnnnnnnnnnnnnnnnnnnnnnnnnnnnnnnnnnnnnnnnnnnnnnnnnnnnnnnnnnnnnnnnnnnnnnnnnnnnnnnnnnnnnnnnnnnnnnnnnnnnnnnnnnnnnnnnnnnnnnnnnnnnnnnnnnnnnnnnnnnnnnnnnnnnnnnnnnnnnnnnnnnnnnnnnnnnnnnnnnnnnnnnnnnnnnnnnnnnnnnnnnnnnnnnnnnnnnnnnnnnnnnnnnnnnnnnnnnnnnnnnnnnnnnnnnnnnnnnnnnnnnnnnnnnnnnnnnnnnnnnnnnnnnnnnnnnnnnnnnnnnnnnnnnnnnnnnnnnnnnnnnnnnnnnnnnnnnnnnnnnnnnnnnnnnnnnnnnnnnnnnnnnnnnnnnnnnnnnnnnnnnnnnnnnnnnnnnnnnnnnnnnnnnnnnnnnnnnnnnnnnnnnnnnnnnnnnnnnnnnnnnnnnnnnnnnnnnnnnnnnnnnnnnnnnnnnnnnnnnnnnnnnnnnnnnnnnnnnnnnnnnnnnnnnnnnnnnnnnnnnnnnnnnnnnnnnnnnnnnnnnnnnnnnnnnnnnnnnnnnnnnnnnnnnnnnnnnnnnnnnnnnnnnnnnnnnnnnnnnnnnnnnnnnnnnnnnnnnnnnnnnnnnnnnnnnnnnnnnnnnnnnnnnnnnnnnnnnnnnnnnnnnnnnnnnnnnnnnnnnnnnnnnnnnnnnnnnnnnnnnnnnnnnnnnnnnnnnnnnnnnnnnnnnnnnnnnnnnnnnnnnnnnnnnnnnnnnnnnnnnnnnnnnnnnnnnnnnnnnnnnnnnnnnnnnnnnnnnnnnnnnnnnnnnnnnnnnnnnnnnnnnnnnnnnnnnnnnnnnnnnnnnnnnnnnnnnnnnnnnnnnnnnnnnnnnnnnnnnnnnnnnnnnnnnnnnnnnnnnnnnnnnnnnnnnnnnnnnnnnnnnnnnnnnnnnnnnnnnnnnnnnnnnnnnnnnnnnnnnnnnnnnnnnnnnnnnnnnnnnnnnnnnnnnnnnnnnnnnnnnnnnnnnnnnnnnnnnnnnnnnnnnnnnnnnnnnnnnnnnnnnnnnnnnnnnnnnnnnnnnnnnnnnnnnnnnnnnnnnnnnnnnnnnnnnnnnnnnnnnnnnnnnnnnnnnnnnnnnnnnnnnnnnnnnnnnnnnnnnnnnnnnnnnnnnnnnnnnnnnnnnnnnnnnnnnnnnnnnnnnnnnnnnnnnnnnnnnnnnnnnnnnnnnnnnnnnnnnnnnnnnnnnnnnnnnnnnnnnnnnnnnnnnnnnnnnnnnnnnnnnnnnnnnnnnnnnnnnnnnnnnnnnnnnnnnnnnnnnnnnnnnnnnnnnnnnnnnnnnnnnnnnnnnnnnnnnnnnnnnnnnnnnnnnnnnnnnnnnnnnnnnnnnnnnnnnnnnnnnnnnnnnnnnnnnnnnnnnnnnnnnnnnnnnnnnnnnnnnnnnnnnnnnnnnnnnnnnnnnnnnnnnnnnnnnnnnnnnnnnnnnnnnnnnnnnnnnnnnnnnnnnnnnnnnnnnnnnnnnnnnnnnnnnnnnnnnnnnnnnnnnnnnnnnnnnnnnnnnnnnnnnnnnnnnnnnnnnnnnnnnnnnnnnnnnnnnnnnnnnnnnnnnnnnnnnnnnnnnnnnnnnnnnnnnnnnnnnnnnnnnnnnnnnnnnnnnnnnnnnnnnnnnnnnnnnnnnnnnnnnnnnnnnnnnnnnnnnnnnnnnnnnnnnnnnnnnnnnnnnnnnnnnnnnnnnnnnnnnnnnnnnnnnnnnnnnnnnnnnnnnnnnnnnnnnnnnnnnnnnnnnnnnnnnnnnnnnnnnnnnnnnnnnnnnnnnnnnnnnnnnnnnnnnnnnnnnnnnnnnnnnnnnnnnnnnnnnnnnnnnnnnnnnnnnnnnnnnnnnnnnnnnnnnnnnnnnnnnnnnnnnnnnnnnnnnnnnnnnnnnnnnnnnnnnnnnnnnnnnnnnnnnnnnnnnnnnnnnnnnnnnnnnnnnnnnnnnnnnnnnnnnnnnnnnnnnnnnnnnnnnnnnnnnnnnnnnnnnnnnnnnnnnnnnnnnnnnnnnnnnnnnnnnnnnnnnnnnnnnnnnnnnnnnnnnnnnnnnnnnnnnnnnnnnnnnnnnnnnnnnnnnnnnnnnnnnnnnnnnnnnnnnnnnnnnnnnnnnnnnnnnnnnnnnnnnnnnnnnnnnnnnnnnnnnnnnnnnnnnnnnnnnnnnnnnnnnnnnnnnnnnnnnnnnnnnnnnnnnnnnnnnnnnnnnnnnnnnnnnnnnnnnnnnnnnnnnnnnnnnnnnnnnnnnnnnnnnnnnnnnnnnnnnnnnnnnnnnnnnnnnnnnnnnnnnnnnnnnnnnnnnnnnnnnnnnnnnnnnnnnnnnnnnnnnnnnnnnnnnnnnnnnnnnnnnnnnnnnnnnnnnnnnnnnnnnnnnnnnnnnnnnnnnnnnnnnnnnnnnnnnnnnnnnnnnnnnnnnnnnnnnnnnnnnnnnnnnnnnnnnnnnnnnnnnnnnnnnnnnnnnnnnnnnnnnnnnnnnnnnnnnnnnnnnnnnnnnnnnnnnnnnnnnnnnnnnnnnnnnnnnnnnnnnnnnnnnnnnnnnnnnnnnnnnnnnnnnnnnnnnnnnnnnnnnnnnnnnnnnnnnnnnnnnnnnnnnnnnnnnnnnnnnnnnnnnnnnnnnnnnnnnnnnnnnnnnnnnnnnnnnnnnnnnnnnnnnnnnnnnnnnnnnnnnnnnnnnnnnnnnnnnnnnnnnnnnnnnnnnnnnnnnnnnnnnnnnnnnnnnnnnnnnnnnnnnnnnnnnnnnnnnnnnnnnnnnnnnnnnnnnnnnnnnnnnnnnnnnnnnnnnnnnnnnnnnnnnnnnnnnnnnnnnnnnnnnnnnnnnnnnnnnnnnnnnnnnnnnnnnnnnnnnnnnnnnnnnnnnnnnnnnnnnnnnnnnnnnnnnnnnnnnnnnnnnnnnnnnnnnnnnnnnnnnnnnnnnnnnnnnnnnnnnnnnnnnnnnnnnnnnnnnnnnnnnnnnnnnnnnnnnnnnnnnnnnnnnnnnnnnnnnnnnnnnnnnnnnnnnnnnnnnnnnnnnnnnnnnnnnnnnnnnnnnnnnnnnnnnnnnnnnnnnnnnnnnnnnnnnnnnnnnnnnnnnnnnnnnnnnnnnnnnnnnnnnnnnnnnnnnnnnnnnnnnnnnnnnnnnnnnnnnnnnnnnnnnnnnnnnnnnnnnnnnnnnnnnnnnnnnnnnnnnnnnnnnnnnnnnnnnnnnnnnnnnnnnnnnnnnnnnnnnnnnnnnnnnnnnnnnnnnnnnnnnnnnnnnnnnnnnnnnnnnnnnnnnnnnnnnnnnnnnnnnnnnnnnnnnnnnnnnnnnnnnnnnnnnnnnnnnnnnnnnnnnnnnnnnnnnnnnnnnnnnnnnnnnnnnnnnnnnnnnnnnnnnnnnnnnnnnnnnnnnnnnnnnnnnnnnnnnnnnnnnnnnnnnnnnnnnnnnnnnnnnnnnnnnnnnnnnnnnnnnnnnnnnnnnnnnnnnnnnnnnnnnnnnnnnnnnnnnnnnnnnnnnnnnnnnnnnnnnnnnnnnnnnnnnnnnnnnnnnnnnnnnnnnnnnnnnnnnnnnnnnnnnnnnnnnnnnnnnnnnnnnnnnnnnnnnnnnnnnnnnnnnnnnnnnnnnnnnnnnnnnnnnnnnnnnnnnnnnnnnnnnnnnnnnnnnnnnnnnnnnnnnnnnnnnnnnnnnnnnnnnnnnnnnnnnnnnnnnnnnnnnnnnnnnnnnnnnnnnnnnnnnnnnnnnnnnnnnnnnnnnnnnnnnnnnnnnnnnnnnnnnnnnnnnnnnnnnnnnnnnnnnnnnnnnnnnnnnnnnnnnnnnnnnnnnnnnnnnnnnnnnnnnnnnnnnnnnnnnnnnnnnnnnnnnnnnnnnnnnnnnnnnnnnnnnnnnnnnnnnnnnnnnnnnnnnnnnnnnnnnnnnnnnnnnnnnnnnnnnnnnnnnnnnnnnnnnnnnnnnnnnnnnnnnnnnnnnnnnnnnnnnnnnnnnnnnnnnnnnnnnnnnnnnnnnnnnnnnnnnnnnnnnnnnnnnnnnnnnnnnnnnnnnnnnnnnnnnnnnnnnnnnnnnnnnnnnnnnnnnnnnnnnnnnnnnnnnnnnnnnnnnnnnnnnnnnnnnnnnnnnnnnnnnnnnnnnnnnnnnnnnnnnnnnnnnnnnnnnnnnnnnnnnnnnnnnnnnnnnnnnnnnnnnnnnnnnnnnnnnnnnnnnnnnnnnnnnnnnnnnnnnnnnnnnnnnnnnnnnnnnnnnnnnnnnnnnnnnnnnnnnnnnnnnnnnnnnnnnnnnnnnnnnnnnnnnnnnnnnnnnnnnnnnnnnnnnnnnnnnnnnnnnnnnnnnnnnnnnnnnnnnnnnnnnnnnnnnnnnnnnnnnnnnnnnnnnnnnnnnnnnnnnnnnnnnnnnnnnnnnnnnnnnnnnnnnnnnnnnnnnnnnnnnnnnnnnnnnnnnnnnnnnnnnnnnnnnnnnnnnnnnnnnnnnnnnnnnnnnnnnnnnnnnnnnnnnnnnnnnnnnnnnnnnnnnnnnnnnnnnnnnnnnnnnnnnnnnnnnnnnnnnnnnnnnnnnnnnnnnnnnnnnnnnnnnnnnnnnnnnnnnnnnnnnnnnnnnnnnnnnnnnnnnnnnnnnnnnnnnnnnnnnnnnnnnnnnnnnnnnnnnnnnnnnnnnnnnnnnnnnnnnnnnnnnnnnnnnnnnnnnnnnnnnnnnnnnnnnnnnnnnnnnnnnnnnnnnnnnnnnnnnnnnnnnnnnnnnnnnnnnnnnnnnnnnnnnnnnnnnnnnnnnnnnnnnnnnnnnnnnnnnnnnnnnnnnnnnnnnnnnnnnnnnnnnnnnnnnnnnnnnnnnnnnnnnnnnnnnnnnnnnnnnnnnnnnnnnnnnnnnnnnnnnnnnnnnnnnnnnnnnnnnnnnnnnnnnnnnnnnnnnnnnnnnnnnnnnnnnnnnnnnnnnnnnnnnnnnnnnnnnnnnnnnnnnnnnnnnnnnnnnnnnnnnnnnnnnnnnnnnnnnnnnnnnnnnnnnnnnnnnnnnnnnnnnnnnnnnnnnnnnnnnnnnnnnnnnnnnnnnnnnnnnnnnnnnnnnnnnnnnnnnnnnnnnnnnnnnnnnnnnnnnnnnnnnnnnnnnnnnnnnnnnnnnnnnnnnnnnnnnnnnnnnnnnnnnnnnnnnnnnnnnnnnnnnnnnnnnnnnnnnnnnnnnnnnnnnnnnnnnnnnnnnnnnnnnnnnnnnnnnnnnnnnnnnnnnnnnnnnnnnnnnnnnnnnnnnnnnnnnnnnnnnnnnnnnnnnnnnnnnnnnnnnnnnnnnnnnnnnnnnnnnnnnnnnnnnnnnnnnnnnnnnnnnnnnnnnnnnnnnnnnnnnnnnnnnnnnnnnnnnnnnnnnnnnnnnnnnnnnnnnnnnnnnnnnnnnnnnnnnnnnnnnnnnnnnnnnnnnnnnnnnnnnnnnnnnnnnnnnnnnnnnnnnnnnnnnnnnnnnnnnnnnnnnnnnnnnnnnnnnnnnnnnnnnnnnnnnnnnnnnnnnnnnnnnnnnnnnnnnnnnnnnnnnnnnnnnnnnnnnnnnnnnnnnnnnnnnnnnnnnnnnnnnnnnnnnnnnnnnnnnnnnnnnnnnnnnnnnnnnnnnnnnnnnnnnnnnnnnnnnnnnnnnnnnnnnnnnnnnnnnnnnnnnnnnnnnnnnnnnnnnnnnnnnnnnnnnnnnnnnnnnnnnnnnnnnnnnnnnnnnnnnnnnnnnnnnnnnnnnnnnnnnnnnnnnnnnnnnnnnnnnnnnnnnnnnnnnnnnnnnnnnnnnnnnnnnnnnnnnnnnnnnnnnnnnnnnnnnnnnnnnnnnnnnnnnnnnnnnnnnnnnnnnnnnnnnnnnnnnnnnnnnnnnnnnnnnnnnnnnnnnnnnnnnnnnnnnnnnnnnnnnnnnnnnnnnnnnnnnnnnnnnnnnnnnnnnnnnnnnnnnnnnnnnnnnnnnnnnnnnnnnnnnnnnnnnnnnnnnnnnnnnnnnnnnnnnnnnnnnnnnnnnnnnnnnnnnnnnnnnnnnnnnnnnnnnnnnnnnnnnnnnnnnnnnnnnnnnnnnnnnnnnnnnnnnnnnnnnnnnnnnnnnnnnnnnnnnnnnnnnnnnnnnnnnnnnnnnnnnnnnnnnnnnnnnnnnnnnnnnnnnnnnnnnnnnnnnnnnnnnnnnnnnnnnnnnnnnnnnnnnnnnnnnnnnnnnnnnnnnnnnnnnnnnnnnnnnnnnnnnnnnnnnnnnnnnnnnnnnnnnnnnnnnnnnnnnnnnnnnnnnnnnnnnnnnnnnnnnnnnnnnnnnnnnnnnnnnnnnnnnnnnnnnnnnnnnnnnnnnnnnnnnnnnnnnnnnnnnnnnnnnnnnnnnnnnnnnnnnnnnnnnnnnnnnnnnnnnnnnnnnnnnnnnnnnnnnnnnnnnnnnnnnnnnnnnnnnnnnnnnnnnnnnnnnnnnnnnnnnnnnnnnnnnnnnnnnnnnnnnnnnnnnnnnnnnnnnnnnnnnnnnnnnnnnnnnnnnnnnnnnnnnnnnnnnnnnnnnnnnnnnnnnnnnnnnnnnnnnccaccagtagaagcagaggctaactactacaggcaactggttgagcaatcaacagtggccacaacaacttaaaccaaacagcctcctcgaaacccggggcgattcagactggtttgcggccaccgttcagtgcatacaaagcgcgcagcgccccacgttggtggtcacacctagccatgacctcacagagcggctacaaaccgccgtgggtgagcaagcagacttgcttatacgtgcgggtgcatgggcgggtcttgacacgccaacgcgctggcgtaccgtggttattccgcgcgtgccatttggcgcaccagtcattgttgacggggtggcggtcacgtcttacttggccgccaaggtgacggccagtcggcggatgcgccaagcaattggccgtgggcttagaacacctgaggcggtgtgcacggttgtggttttggatgcgcgggcacacaacttaggtcgctttgtgccagagcgttttgcggcagattggtcgtctcggcaagtgtttgaggagggtgcccgccatgcggtggtgctgtccaaagcggagcgcgaccccgctttggccaaagccgcgctcagacactacggcgctcaatgccaacaagcgggttgttccgtgacagaggcgtgtcagctggacgtgcaccaccttgaccccgtaagcgaaggcgtgcgccgcacaaccttgaaggatgtgaccgtgctgtgtgcaaaccaccaccgacaggcccaccacgacatgaaaatggggctgaacgtgtcgtagcgcaacaaaaaacccgccatacctttgggtacgcgggttttgggagttctggcaaggcctgaaacctaaatgtggtggtgataggtggacttgaaccaccgaccccagcattatgaatgctgtgctctaaccaactgagctatatcaccgagcctgaaattatagccaaaattctcagggctttggcttgccgccaaaagtttttgttagccattttgtcgcgcctgtacgacgcgccaagcccttggttattggtgtttgaaggcgggtttgcgcttgtttatgaacgcatccatgccctctttttggtcttcggttgcaaacagcgcgtggaacagacggcgctcaaaacgcacgccttcgctgaggctgccttcaaacgcttggttcaccgcttcctttgccgccatgacactggggagggagtagttgcaaatcatcagggctgcgcccaaggcctcggtcatgagttggtcatcggcgaccacgcggctcaccagtccgccgcgctcggcttctgcagcgtccatcatgcggcctgtgagggccatgtccatggccttggctttgccaacggcgcgtggcaggcgctgcgtgccacctgcgccagggataacgcccaacttgatttcgggttggccaaatttggcgctctcgctggcaatgatgacgtcgcacatcatggccaattcacaaccgccgccgagggcaaagccgctgacggcggcaataacgggcttgcgaacgctgcgaatggtttcccagttgcgcgtgatgtagtctgacttgtagacgtcagcaaaggtgtaggtggccatggcgccaatgtcggcacccgcggcaaaggctttttcactgcctgtgagcacaatgcagccaatgtccgggtcggcgtcgaatgcggttagcgccgcgccaagctcgtccattagcgcactgttgagggcattgagttgtttggggcggtttagggtgagtatgcccacgcggccttcggtgcggattaaaaccagttgctcactcatgtctgtgttctccaatgtggtgcgaaaagttgcttagaaaaagttgtttcgaaagttgcttcgacgtaagcggttgatcatagccaagcggtgagcttgctagggtctttcaccaccagttcggcgatctggttggcgtgggtcgatggccagatgagggggcacgacaacatgcggccatcgcgcgcgacaccggcaaccaatgggtgctgggctacgtcggcgtggcgtctcgcaatgttctccacatcgctcagtgacttcacccgccattgatcggtgccgtcaaatagcgtcacccattcgtcacccgccgccatgcccgcttgttcgcctgcaccgcctcttgccacgtgggtgatgcggatgccgtctcgctcaacgacacgcatgcccaagcgctgggcgagggtgccgctcttggccgccacggcgacaccgtaatgactaagcagtgcgtgtaccggcaggtcttccgtgctgtgtacccagtgcgcgagttgtgtggcgacgttggcgtgcccttgctggttgagcagggcgtagatgtcggcctcactgatggtgccacctttgcttttgacccaaaggccgcgcatgagggtgtcgagatcgccgccttgttggcgcagcatgaggtcggtgcacagcgctattagcgcccctttggtgtagtagctaacggtggcgttgggcgtgttttcgccaatgcggtagtacttgacccacgcgtcatagctagactgggcaacgctttgcagatgccgccctggagtggccgcaacgtggttaatggatttggccagcagcgtgagataggtgggcgtatcaatgagtttggcgcgttgcagaaacaggtcatcgtagtagctggtaaagccttcaaagaaccacagcagctcggtgtagttctcttggttgaagtcgatgcttgcaaactcggatgggcgcagacgcttgacgttccatgtgtggaagtactcatggctaatgaggccaagtaattggttgtagccagcgccttgtgcatgggggggcgctgcctcgccagcgacggccgttaggggcaagtcggcacgctggcaaatgagtgcggtgctggcgatgtgctctagcccgccgtagccgttttcagtggcgtgaagcatgaagacgtagcggtcaaagggtagttggcgttgcggttgtttgccgtgccaaaacgtgatctctgtttcgcaaattcggcgggtgtcggcaactaattttttgacatcaaacccgggcgcggtgtggttgccaatgcccgtgacaacgagttcatgcggtacgccagagaccttaaaccgactgacgtaaaaatcacccaaggtaaagggactgtcggcgagctcgccgtagttgcgggcggtgtagcgcccgaagccacgcgcgtcgatttgccgcgcgggcaatgcggtagacagccgccacgcattgaacgcgggcgcggtggggcgctcgacggagatggtttgtatctcgtcttcgcccccgaccacttgcaaacacaggctggtggggttgaagaagccgcgggtgttgtccaaaaaggcggttcgcaccgaggcgtcaaaggcgtagatttggtaattgagctccagcgggcgtttgccgtcggattccactagccactcatttttactgcactgcgtgatttggcaaggcgtgcggccttgcttggctgtcagcgcttgcaggtgttgcgaaaactcacgcaccaaataactaccagcaatccaaacgggtagacgcaggcgctgttgcttttttgggcttgagatgcgcagatgcacaccgaacaggtgcgcttccgcgctgtcaacgcgaatgttgtgatcgatgcgcatggtgttacttgatggcggccagacgcttctcaacttcggcggcagaaatggcgccggggacacgtgtgccgtctgagaagaaaagggcaggcgtgcccgagatacggtgcttttgaccaaacgcgatgttgcggtcaagcgcgctggtgtcgcagctgatggcggcggcgctggtggttagagggacttcattcaccatccagtcttcaaaggctacgccggggtttttgtcgcaccaaatggccttggacttgagcgttgaatccgcgccgagtatggggtacaaaaagatgtgcagggtgatgtcgtcgacattcatcatgtcacgttcaaagcgcttgcagaagccacagttggggtcttcaaaaaccgcgagttgacgcttgccgttaccgcgtttgatggtgaaggcatctttaaagggcagggcctcaaagggtattgcgctcaatttatcgaggcgctcctgcgtcaggttgcgtttgcccttgaggtcaacgagtacgccttgcagcaaaaattcaccgttggcatcggtgtacaaaatttcggtttcaccaaagcgaacttcgtagaggccggccatgggggtcttggtgacgctgttgatagcgggtaagttgggtagttgcttgggtagcatctcgcgaatcttggcttcctgtgcccagcccatgcttgccatgagggtgaatgcgatgcccacggccaagccgcgcaataaagagcgtgtgggggtgggtgcgagaggtgacgtgtggtgaagcatggtgtggttcgctaggtaggcgttgtttgggggtaagagggtgggtgggttggttcgtgggagggggctgttgggtagcggatgctcgctgttggagcaccatcgtggcaatcagttccccatgccaacacgctgtacccacgacttgagtgggcccatggcattaaagcccgacatgcctgcattgcgtagccaactggcggcggggttgcggcccaaggggttgttgaacaagtgaaagagtccgtgcgtgacccattgcatgggttcggtggcggcgcgtcgacgccgttggtagcgctgaagcacgcgtgaggcacccggagactcacctcgggcgcgtgccgcaacgcagtcactgagcgtttgtacgtcggccaagccaaggttgagaccttgccctgcgagggggtggatggtgtgcgccgcatcgccggctaacgcggtctgctgggcaatccattgcgtggttaagccgacgctcaaggggaaggcaacaggcccgctggtgagggagaggtgccctagcgcgccctgactggcttgggtgagttggtcttctagggcggcggtttgggcggtggtctccatgtccagccacgtctggtgcgcagcgtctggtagcgaccagacaacggccaggtcgtgcccgtcagcgccgcccatgggcagcagggccaaaatatgtgtgccgttaaaccactggtgggcgacgccgccgtggctgtgctcggcgcgcatgcgcaacgccaaggcacggtgggggtagtgcttacttaccatgtcaatacccaaggcggtgcgcgcgataccgctcttgccttcgcaaatgatggtcaatgcgctaggcggtgtctgggctgatggtgacgcgtggtcgtcaaattgcacgcgtgcatggcgtgtgacggcttcggcaagatggtcctccaggacaggcacatcgaccatccacgccaagggttgcgcttgctgcgggggtgcgtcgaattgcagcgcgcctgacgcatcgccaaacacccgcatatgggtcatgggggtcagccacgcggcctgatcgtcttgaggccagacaccgcatgctttgagggtgtctctcgaggtgtggttgatggcgtaggcgcgaatgtcgcgggtgtgcggtggcgcttggggcgcgggcaggctgacggaaaagccttgctctgccaataacaatgccgccgcgtgcgcggtgatgccagcgcctaaaacggtgatgtgccctgattgagtcatggcgttattctattgggacacccacttggggggccagcgatgaccctgccccggaagtgccttaaactctgggtcttgctttttgaggattgtcatgagtttgaaatgcggcatcgttggtctgcccaacgtcggtaaatctaccctgtttaatgcgcttaccaaggctggtatcgccgctgagaactaccctttttgcaccatcgagcccaacgttggcgtggtggaggtgcccgacacccgcctagcgcagctcagcgatatcgtgacgcctgagcgcattgttcctgcgattgttgaatttgtggatattgccggcttggtggcaggtgccagtacgggcgagggcttgggtaacaagtttttggcccatatccgcgaaaccgatgccacggttaacgttgtgcgttgttttgaagatgacaacgtggtgcacgtcgcgggcaaggtggatccgatttctgacattgaggtgattcaaacggagttgtgccttgccgacttaggcgcagtagagaaagccctgcaccgggtctccaagaccgcgcgttctggcgacaaagagtcggtgcgcttggtgtcgattttggagcgctgtcaggcggccttaaacgaaggcaagcccgttcgcacgctggacttcagcaaagaagaagcgccgctgcttaagcagtttttcttgattacggccaagccagcgatgttcgttgcgaacgtgtctgaggatggctttgagaacaaccccctgcttgaccgcttgaccgcttttgccaacgagcagaacgcgcctgtggtggcgatctgcgccaagctagaggccgagatgagcgagatgagcgacgaggaccgcgatatgttcttggaagagctggggcagtccgagccgggcttaaaccgtctgatccgtgccgcctacagtttgttgggtttgcagacctacttcactgcgggtgtaaaagaggtgcgcgcttggactatccacgttggggatacggggccgcaggcggccggtgtgatccacactgatttcgaaaagggctacattcgcgcccaaaccattgcctttgatgacttcattgcattcaagggcgagcagggcgctaaggacgcgggcaagatgcgcgcagaaggcaaggagtatgtcgtgaaagacggcgatgtactcaacttcttgttcagctcataagccactgcgcactcgcggcaatggcaaggtagcgggcgaacttgccaatggccatgtacaccgcgcaggccagccagggcattcttagccagcctgcgagggtgcacaccacatcgccgaccacgggtagccaagccagcaaacacgccttgggtccgagtttttccagttgagccaaagcccacgcggcgagcctgccagccgttggggtggcctgagcatccgcgcgtcggtgcgggtgcgcacggttttggtaggcgcggtgcgctgattgcaggccaacgcccatcagccaactcaccatgccacccaaggtgttgcctactgtcgccagtaacaaggcgggccaaaatagatggggtgagatggcgatgagacccattaatgccgcctccgaccccatgggaagccacgtcgcggagacgaatgccgtgacaaaaacggtaggcaacccccattcgggcagactgaaccagtgaagtaagctcgcaaaaaaggcatccattggcttgagtataggtacaatcatgcttaaattttcagcaagcaccgacgcgtcaatcggtgcttttttgtctctaactgccgtccaacgtgcatatcggtccctaccacctccgcaataacctgttcgtcgcgcctatggctggcgtgacagaccgcccgtttcgccagttgtgtaagcaactgggcgcgggctatgccgtgagcgaaatggtgacatcgcggcgcgatttgtgggactcgcttaaaacctcacgccgtgcaaatcacgccggtgagagcgggcccattgcggttcaaattgcggggaccgacgcccagatgatggccgatgccgcggtgtacaacattgaccgtggcgcacaaattattgatatcaacatggggtgccccgcaaaaaaggtgtgcaacaagtgggccggttctgcgttgatgcaagacgagaccttggcgatcgccattgtcgaagcggtggtgaacgcctgcgcctctaaggatgtccctgtgacattgaagatgcggacgggttgggcggcgcatgcgaagaatgccacgcggttggcgctggcggcggagcaagtgggggtgcagatgttgacgattcacggtcgcacgcgcgagcaaggctataagggttttgcagagcatgagacggtggcggacattaagtcgcgggtgcgtattcccgtggtggccaatggggatattgcatcgcccgaggcggcgcaacgtgtgttgcaagccacgggggccgatgcggtgatggtgggacgcgccgcgcaagggcgcccatggatatttagtgaaatcgctcattttttagccaccggacgccacgcgccaccgcccagcgctgtggatatgcgggcgtggatggtggagcacctgcacgcgcactacgcgctttacggcgaatttacaggcgttcggtctgcgcgcaagcaccttggttggtatgcgcaacacttgcccatgggtgagcttttgcgtcagcgcatcaatgccttaaccgattgcgcggagcagttggctgcagtcgaggcgtatttcgcagcgtgggacagtgatgatctggccgcgcttggtcgggcatggcaaccgacacagataccgggcagcgcgcagagccagtctgtgcgagagatgcctgtcgacatgacattggccccccttcattgagcgttatatgagccgtaaagacattgaaaagggcgtgcgtgaaagcatgcaaacctacttccaagacctcgccggtagcgagccacatggcctgtacgacatgatggttgatgttgtggagaagcccttgctggaggtggtgatggcgcaagcaggcaataaccagtctcgcgcggcgcagtggcttggtctcaatcgcaacaccttgcgcaaaaaattacttcatcacaagttactcagttaacgctgcaaacgcggcggcctaactcgtcatttccccctttatttttcacgactaccaagcaccatgaacgcactcttatctgtatccgacaaaaccggcattgtggcccttgcgcgcgcgctccacgcccaaggcattggcctgctgtctactggcggcacggccaagctgttggcggaagagggcctgcccgttaccgaggtggccgatatgaccggctttccagaaatgctcgatggtcgcgtcaaaaccttgcaccccaaggtgcacggcggcttgttggctagacgtgacgtgccagcgcacatggcggcgttggccgctcacgggatcgataccattgacgtgttggttgtgaacctctacccctttgaggcgacggtggccaaagcgggttgcaccttggaagaggccattgagaacatcgatattggcggccccgcgatggtgcgtagtgccgccaaaaactggaaggacgtcgcggttctaacggatgccagccaatacgagaccgtcattgccgagctcgccgctaacggcgcggtgtctaccccgacgaagtttgcgctgtccgtggcggcgtttaaccgcatcagcaattacgatgcggcgatcagcgactacctgtcggcgtatcagttggagagcgataccttgcaagcgttccctgcacaggcgaacggacgttttgtgaagttgcaagacctgcgttacggcgagaacccgcaccaatcagcggcgttttatcgtgacctacaccccgcgcccggctcgctggtaacggcgaagcagttgcagggtaaggagctgtcctataacaacatcgccgatgcggatgcggcatgggagtgcgtgaaaagctttgacgtgcccgcctgtgtgatcgtgaagcacgccaacccctgcggtgtggcgttggccgaggatgcgttgggcgcctataccaaggcgtttcaaaccgaccccacatcggcctttggcggcatcatcgcgctcaacgttgtggtggatgaagcggctgccaaggccattagccagcagtttgtcgaggtgctgatggcgcccgcttataccgagggtgccttggcggtatttcaagccaaagccaatgtgcgcgtcttgcaaattacgctgcctgcggcgggtggacagacggcgtgggagcgtgggcgcaacgtgcaagacataaagcgcgtggggtctggtttgttgattcaaacggcagacaaccatgacctgagtttggccgacctcaaagtggtgtccaaagtgcagccgaccgaggcgcagttgcaagacctcttgtttgcgtggaaggtggccacgtatgtgaagtcgaacgcgattgttttctgtaaagaccgcatgaccgtcggcgttggtgcggggcaaatgagccgtttagattcagcgcgaatcgcgcgtatcaaggccgaccatgccggtttgtcattggcgcagtcggtggtcgctagtgatgcgttcttccctttccgagacggtctcgatgtggtggtggaggcgggcgcgacggcggttattcatcccggtggttccatgcgtgatcaagaggtgattgatgcggcggatgagcatggcgtcgcgatggtgtttacgggcgtgcgccacttccgtcactaagccgttgcgggtgttgcttgcgtggccatgttgacctggttggatatctcgcagacggcgagcgatgacgactgggtgaccttagaggtctgcgcgtctgtgacccgtgctgaccagcatcgcgtcgatgctgccgtctgtgagttgcttggttatttgtacgcgcgctgtggccgtcccagcgaagaccccgacgtgccgcccggcccgcagtcgtggctgatcgatgtgcaggcgtatgccgagtcggcagccaaagcgccgctggccgtcgccttggattggcgcgacgacgccacggtgtctctgcaatgggtcacagcgggagccgctgacgcgaccacggaagacacccggcgaacccttctcattagtttgggcttgtcacccgcgttagcgttcgcttgcgatgaggcattcgaactggggctctagctgacgccccctaacgcggtgtatgccccgctcgtgggactacagggttgcaaatgtccgctttgccgcggcgatggtgtcgtcaatgtcttgcgcggtgtgcgcggcgctcacaaagccagcctcaaatagcgcgggcgcaaagtaaacaccttggtccaacatgccgtggaagaagcggttaaacaccgcgccgtctgtggtcatgaccttggcgtagttttgtggcaactcagggaagaagaagaagccaaacatgcccccttcgctgtcgccacaaaacgggatacccgcgtccttggctgcggcggtcatgccgctgacgagttgttgggtgcgttgattcagttgggtaaaaaagccgtccttttgaatctcttttaaggttgccaaaccgcaggcggtggcgacggggttccctgacaaggtgcccgcttggtagaccgcgccaagtggtgcgaggtgggacatgacttcgcgcttaccgccgaacgcggctaacggcatgccgccgccaatgactttgcccatcacggtcatgtcaggctcaaagcccggaatttctttggcgtacaagctctgagcgcttcccagtgccacgcggaaaccacacatcacttcatcaaatgcgagtagcgctccgtgggcagtgcagagttcgcgacagcgttttacaaatggcacgctggcccgcacgaagttcatgttgccagcaatgggctccatcatcaaacaggcgacttcatcgccgtgttccttaaaggcggcctctagcgcttccacgtcattgaagggcagtaccaaagtgtgctgcacaacctctggcgggacgcccgcgctggtggggttaccaaacgtggcgaggccagaaccggccttaaccaacagggcatcggcgtggccgtgatagcagccttcaaactttatgattttgctgcgtcccgtggcgccccgagccagtcgaatggcgctcatgccggcctcggtgcctgagctgaccagtctcaccatttcaatggatggaaccagcttgatgatttcttcggccagttctatttcgcgttcagtcggtgcaccaaatgacagcccttgctctgcagcgctcagcaccgcggcgtgtacggcggggtggcggtgccccaagatcatcgggccccaagagccaatgtagtcaatgtagcgctgatcttctgcgtcccaaaaataggcgccatcgccccgcgtgatgaagcggggtgttccgccgacggctttgaaggcgcgtacgggtgagttaaccccacccggaatggctagcttggcgcgtgtaaataattggtcgtttttgttcatgatgtgtttccggttacgttgcacggttcagtgtttggtgtcgtctagcgggaagtcgcctaacgtgtggtgaccgacatccagcgtcggtgtgtcgggggcgtcggtatcctcggtatcgtctatgccgtcatcttcgccgcgtccccaaaacaagcggtcgggtaaggcgtgtcccatgccgggtgcaaagcctgcatccagactctggtcgagataggtcagcgcttctgcgcaggcggactgcaagtcttcgcctgcacccagcagggccgtgagggcggctgacagggtttcaccagcgccggtgaaggtggtgtcaaaccgctcgaagcgtgcggtggccaacacggtctcaggggacgctaggtggttttctaagaattgctcaggtgcatttaacccggtgaccaaggtgtaactcacaccgtgtagctgcgcggcgcgagctacgtcgcgcggtgtggggggcttttcgcttgcccagtcgggtaataaccagcgacacaaggtgctgtagttgcccacgagcacggcggtttgcgggagcattaattcggtgaacgcgtctaagtaggcatctagagcgatatcgtccatccacgtcaaactgggcatataggcaacgacgggggtgtccgcgtagtcgttggcaatttgcgccactgcgctgatgttttccggactgcccaaaaagccgactttgaaactggtcacgggaatgtcttcgagcaccatgcgggcttggtcgttgatggcatcagcgtccagcgagacgtggtcttggacggcggtggtgtctcggatgagcaccgcggtgaccacgggcaacatgtgcacagaggcggaacccatggcgccgatgtcagcggccaaaccgccagcacccgttgggtcattggcattgaacgacagcacgcatggcagcgttagctggtgcgcggtcgtgctcgtgtcccgtttgctgggctgcttgggcggcgaatctaaagcatcggtcatgggtttgctcgttgaggggctgtctcagttccttcgggggtatgcttctgcaccgatacaatgtgatcattctatgacacggttttaaaaaaatgagcgactcaacgacttggatgtgcctgatctgcggctggatgtacaacgaagccgagggcgcgccagcggacggcattgccgcaggcaccaaatgggcagatgtccccatgaactggacctgtcccgagtgcggcgcgcgcaaggaagattttgaaatggttcaaatctaattctcgcgcatggcgcccttcagggcttgggcttcttcacgacggcgtagcgagccaacgttcgctcgcgggcggcggcatggtcgacgatgggtttagggtagttctcccctaaggtaacgccggcggtgatgaggtcgaaggggtcagctagccaaggggcgtgtatgcgtttgtccgacagctcagcgagaaccggtaagtagcggcgaataaacttgccctgcgcgtcaaacttctcgctctgtgtcgtgggattaaaaatccgaaagtacggttgcgcatcacacccgctagaactggcccattgccatcccccgttgttggcagacaggtcaaagtctatgagcttttccgcgaagtagtcagccccccagcgccagtctatgcctaagtctttggtgaggaagctggcaacgaccatgcgtaagcggttgtgcatgtaaccggtttggttgagttggtgcatcgcagcatccaccagtgggtagcccgttgcgccttggcaccacgcgtgaaagagggccttggcgctggcgccgtgttcccacttgatggcgtcgtattcaggcttgaatgcgcgatcgacgatgcgtgggtggtggtgcatcacctgcatataaaaatcacgccaaattaactcccctagccaggtgctggcacccacatggccttggctatgaccggcgaaggcatgttgggcgagggtgcgaatagacacggttccaaagcgcaggtgaacgcttaggtagctggggcccttgacggcagggaagtcacgcgtgtccttgtagcgggccatgcggggcaagaagtcggccaacaaggccgcagcgccagacgcgcccggcgtgatattttgtgccacgaggtcgacaggcgtaaaccccatactggttagtgagggcatgtcgcccagtgccttgaggtctgagggcagggcatcggtttgggccagggcggttgcgtaacgctcggtggggtaggcctttaggtagtagggctctagcttcttgagccaggcgtttttgtagggcgtgaagacgccaaaggggcgcgattgttgcgtgaggacctcgctacgctcgaaaatgcattggtctttgtaggtgttgagcaggatgccgttgtgcgcaaggtgcccaaaaatagcggcgtctctcgccagtgcctgtggctcatcgtcgtggttggcaaataccgcatccacgcccaaggctttcgccgtgcgcggtatcgctcgctcgctctggtcgtggaggcatagcacgggctgggcattggcgccggctaccgcgcgtagctgggtgttgaggtccaccaagctgctgtggataaaggcgacgcgccgatcggttgtgggcaaggtgtccaaaatggccttgtcgaatacaaagatacaaaaaacggtgtcgcactgcttgagcgcgtgataaagcgcggcattgtccgtcaagcgcaggtcccgcctgaaccacatcaggccttttgtgtacttctttttcatcgtgtagattgctcgattgggtcgtgagagggtgcggattgtcggcagcgcccgcaccccttaaaataacatcatgcctactgattctgccgcgattgacctcacccatcatttcctcattgctatgcccgggttggaggacgaccttttcgctcgcagcgtggtctatgtgtgcgagcacagtgcgcggggcgcgctgggcctgattatcaacaagccgagtgatctgccgctggccggtctctttgagaagatcgcgttgcgactgcatcgtgacgacttaaccgatgcgcctgtgttccggggtggccccattcaaaccgaacggggttttgtgttgcatgcgcccatggggcagggcggtgagtcggtttactcttccactttggtgattcctggcgacggctctggcctgaagggtgtggactggccaaactctgaaattcatgttgcgcttagcgtggagaccgatgacgatgcagcgccgtccgcgccgcctgaagccccaaaatatgggcctgcgcgcctagaaatgaccacctctaaagacgtgctggaggcaatggctgaaggcgcaggccctgctcgggtgttggtcacgttgggctatgccacttggggcaagggccaactcgaatcggagttggctgagaatgcctggctgaccgtgcctgcggacgagtcgattatttttgatacaccgcctgagcttcgctacagccaagccatgggtttattgggtttggatgcaggcatgctgcacggtgaggcaggacacgcctgatgtccatgcggccactaccgccagtgatcgcctccgatgtgcagttgttcctagcttttgattatggggagaagcgcaccggtgtcgccagcggtaaccgcctgacccgcagcgccacccccttgggcacgatcgccgcgcaaggggacgcgaagtggcctcagattgcccaatacctgaaagactggtcgccacaggccgtcgtgattggggtgccacggcacccagacggcgccgaccacgagaacacgcttgcggcgcaaaagtttggcagacaaatcgcgggtcgttttgccgtgactgtattcgaaaccgatgagcgctacaccaccaccgaagcgcatagcctcggtgcaaaggatgcagacgccgtggccgcttgtattattcttgagcaatttcttcggagcctaccgtgaccagccagtttgataacaccgtgcaggcagatgccttggacgcagagggtctctatcagcaactattgacggcgattcgccccttgacggcgacggctgacaagcccgtgcgtttagttggtatcgcctccggcggcgtgtggcttgcccaacgcctgcagaaggacttgggcttggcgggggagtcgggcgtgatttccagcagcctgcaccgcgatgacttttccaagcgtggcctcagctctatgggggtacaaacgaaattgccttttgacgtgaacggcgccaccgtgtggcttatcgacgatgtgctgtacaccgggcgcacgatacgcgccgtgctgaacgagttatttgactacggtcgcccagccgatgtgaggttggccgttttggtcgatcgcggtcagcgggagttgcccgttcaggccgatctggtggtggctcgttgctcggtgccgagcacgcagtcactggagctgtcgcaaacggacggcggtcgtctaacctttgggattgaaactgcgggttgaacgccacagaatcactttgcaccgccacactttattgccctagcgcccctatgcgaacacaacgtaacccccaactgaacgccaacggcgagctcatacacctgctctcaaccgaaggcctgtccaaagagatgttgacccacatcttggacacagccaccaatttcgtgagtgtcagcgaccgcgaggtcaagaaggtgcctttgctgcgcgggaaaagtgttttcaatctgttttttgaaaactccacccgtacacggaccaccttcgatatcgccgccacccggttgagcgccgacgtggttaacctagacatcgcgcgctcctctgccagcaagggcgagagcctgttggacaccattgacaacctttcggcgatggccgcggacatttttgttgtccgccacaacgagtctggcgccccctacctcattgcgcaacacgtggggcctcatgtgcacgtggtgaacgcgggcgatgggcgacacgcccatccgacccaagccctgctggacatgtacacgattcgccacttcaagggggacttttccaatttgagtgtggcgattgttggtgacgtggcgcactcgcgtgttgcgcgctcaaacattcacgccttgacgaccttgggctgccctgacctgcgtgtggtgggccccaagaccttggtgccgaatgacatggcacaaatgggcgttcgggtctgtaacgatttgcgctctggcatcgacggtgtcgatgtggtgattaccttgcgtctgcaaaacgaacgcatgagtggcgccttgttgccgtccgcgcaggagtttttcaagagttacggcctgacgcccgagcgcctgcagtgggctaagcccgatgccattgtgatgcacccggggcctatcaatcgaggggttgagattgcatcgtcggtcgttgacgggccacaagcggtgattttgtcgcaggtaaccttcggtatcgcggttcgtatggccgtgatgtctattgttgccagccacgagggctaatgactggccatggcgagtgcaccccaacaaccgacccctttaacccagtacgtgttttaaatcgcctgagcaccatatcgatatgaagattctgattcaatccggacgtgtcatcgaccccactagcgggctagaggccgttcaagaccttgccattgccgctggtcgcattgtggcgatgggcgcgcaggtcaaagacttttcgcccgagcgtgtgatcgatgccaccgactgtgtggtggcgcccggcttggttgatctgtgcacgcgcttacgcgagccggggttcgagcatgagtcaatgttggagtctgagatgtccgccgccgttgcgggcggcattacctccttggtctgtccgccagatactgacccggtcttagatgagccgggcttggttgacatgctcaagtttcgaaccaaaaagctgcgtcaagcacgcgtcttcccgttgggggctttgacccgtggcttggagggggaggtgctgaccgaaatggccgagctcaccgagtcaggttgcgtgggttttgggcaagcggatgcgccgatacagaacacgcaggtactgcaacgcacgtttcaatacgcggcctcgtttggttacagcgtctggttgcgtccgcaagattactggctgggtcagggtgtcgctgccagtggtccgctggccacgcgcatgggcttgtctggcgtgcctgtatctgctgaggtgattgcgctagaaactatttttgagctgatgcgaggcaccccagcgcgggtgcacctctgtcgtattagcagtgcccgcggggtggacttggtgcgcgccgcgaaggccgaaggcttgtccgtgacctgcgatgtcagcgtgcacaatttgcatctcattgacgtggatatgggctattacgatgcgcgcttgcgtttgcaaccacccgttcggcaacagcgtgaccgcgacgccctgcgtgcggggttggcggatggcactattgacgccttggttagcgaccacaaccccgtcgaagcggatgccaaaaacctgccctttgcgcaagcagaaccgggcgccactgcggtggagttgttgctgagtttggctcttaaatggggacgtgaagaccaggtgccgttgcagcgcgtgatcgcggttttgacgcaagggcctgtcaaagttctgggtcaaagtctgggaagtttgcaagccagcttaggccaaatcacccttggtggtgtggcggatatttgtgtttacaagccggatgccgcgtgggtggtgggcgcagacacattgcgaagccaaggaaagcacaccccttttgcgggttatgaattgcccgcaaaagtagccaccaccattgccggtggctatattgcctttgacgcaggctgagcgcgatgcgagcaatccctgcggcttggcgcatgatattgggcgtgaatcacgttctgcgcggcctacgaaccattaacaaatacttcgcgacggcaacgcaaaccgagcgtgacgcgatggtgcaggcgtggtctctcgccctgcttgagctgctaaatgttgaattggtcaccgatggtgctgagcctgtacccggcttggtggttgcaaaccacgtctcgtggttggatatcttggtgatgaatgccgcacaccccgttcggtttttatcgaaatcagatgtcaagaagtggcccttactcggccgcctgattgcggggtctggcacgttatttatagaacgtgcaaagcgccgcgatgcgctacgtgtggtgcagcaaattacgacgtatttacgtgatggtcaccgcgtggcgatctttcccgagggcacgaccaacgatggtattcatgtgctgccgtttcatggcaacttgattcaatccgctatcgacgccgaggcggcggtgtgtccggttgggatacgctacatggacaaggccactggccaacgcagcttggcgcccgcctatattgatgacgacacgctggtaggctctatttggcggacgctacgcagtggtcgcatggtggcgcgggtgcgcttgggtgagccacaactaaacgtgggacgtgaccggcgcgtatgggcgagcgaccttcaacgcgcggtcgtcaccctgaccgctgagtaaatacgaggccgtgcgacgtgcggctaaacctcggggcgtcagccttggctggcttggcggcgggccaccatcttttctgcgctgactttgcggtcggcattgacctgagtaaccgttgcgcgcgttgacaggtgtcgcaggtactctttgacgggaagttccgacagaaaatcttggccgtaaataattttggtggccgtggagatgagcggcaggtgggcaactgccgtgcagtcagcgaggctgaaggtatcgcccccaataaacggtgtgaagcgtgccagcgatgcgaaggctgcaatgtttttcttcagttgcgtcgccgtcttttcctttaagttgtcacttaccttgccgccaaaaaacgcctctttgtataggtttcgcgcgaccaactcaaggtgtaggtcaatgtaggtggcgagctcacgcaccttggcggcttgaaaggggtctgccggcaccagcgggtgcgcggggtactgttgctctatgtagtcgagcatcacagtggactcgcataaagcgcccgacggcgtcagtaggtaaggcaccttgcctagcggtgaggcatgggtgtcaacctccgaggtccacacctccgactcttgaaacggaacacctttctcgagcagtgccaatttgactttgttgtaatagttgcttgctgaaaagccgcataaagtgatcatgtgatgcccgttggttgagatggctggttaggaagagtgcgtgtaaacgatgcgataattttgccacggaagcaggctctgtcggccccgctctgtgttgcccccgctttgcgtcacgtaatggcgtaccaatttttttgaggttttcatgcgccaacgatggtctactttctcgctagccgcagcggtcttttctgcactgctcacggcggctcccataacggtaaat

SEQ ID NO: 17 - DNA, 30172 bp, Artificial Sequence
  Synthetic Oligonucleotide
  misc_feature (1)..(9997): n is a, c, g, or t
  misc_feature (12342)..(12342): n is a, c, g, or t
  misc_feature (12365)..(12365): n is a, c, g, or t
  misc_feature (12386)..(12386): n is a, c, g, or t
  misc_feature (12395)..(12395): n is a, c, g, or t
nnnnnnnnnnnnnnnnnnnnnnnnnnnnnnnnnnnnnnnnnnnnnnnnnnnnnnnnnnnnnnnnnnnnnnnnnnnnnnnnnnnnnnnnnnnnnnnnnnnnnnnnnnnnnnnnnnnnnnnnnnnnnnnnnnnnnnnnnnnnnnnnnnnnnnnnnnnnnnnnnnnnnnnnnnnnnnnnnnnnnnnnnnnnnnnnnnnnnnnnnnnnnnnnnnnnnnnnnnnnnnnnnnnnnnnnnnnnnnnnnnnnnnnnnnnnnnnnnnnnnnnnnnnnnnnnnnnnnnnnnnnnnnnnnnnnnnnnnnnnnnnnnnnnnnnnnnnnnnnnnnnnnnnnnnnnnnnnnnnnnnnnnnnnnnnnnnnnnnnnnnnnnnnnnnnnnnnnnnnnnnnnnnnnnnnnnnnnnnnnnnnnnnnnnnnnnnnnnnnnnnnnnnnnnnnnnnnnnnnnnnnnnnnnnnnnnnnnnnnnnnnnnnnnnnnnnnnnnnnnnnnnnnnnnnnnnnnnnnnnnnnnnnnnnnnnnnnnnnnnnnnnnnnnnnnnnnnnnnnnnnnnnnnnnnnnnnnnnnnnnnnnnnnnnnnnnnnnnnnnnnnnnnnnnnnnnnnnnnnnnnnnnnnnnnnnnnnnnnnnnnnnnnnnnnnnnnnnnnnnnnnnnnnnnnnnnnnnnnnnnnnnnnnnnnnnnnnnnnnnnnnnnnnnnnnnnnnnnnnnnnnnnnnnnnnnnnnnnnnnnnnnnnnnnnnnnnnnnnnnnnnnnnnnnnnnnnnnnnnnnnnnnnnnnnnnnnnnnnnnnnnnnnnnnnnnnnnnnnnnnnnnnnnnnnnnnnnnnnnnnnnnnnnnnnnnnnnnnnnnnnnnnnnnnnnnnnnnnnnnnnnnnnnnnnnnnnnnnnnnnnnnnnnnnnnnnnnnnnnnnnnnnnnnnnnnnnnnnnnnnnnnnnnnnnnnnnnnnnnnnnnnnnnnnnnnnnnnnnnnnnnnnnnnnnnnnnnnnnnnnnnnnnnnnnnnnnnnnnnnnnnnnnnnnnnnnnnnnnnnnnnnnnnnnnnnnnnnnnnnnnnnnnnnnnnnnnnnnnnnnnnnnnnnnnnnnnnnnnnnnnnnnnnnnnnnnnnnnnnnnnnnnnnnnnnnnnnnnnnnnnnnnnnnnnnnnnnnnnnnnnnnnnnnnnnnnnnnnnnnnnnnnnnnnnnnnnnnnnnnnnnnnnnnnnnnnnnnnnnnnnnnnnnnnnnnnnnnnnnnnnnnnnnnnnnnnnnnnnnnnnnnnnnnnnnnnnnnnnnnnnnnnnnnnnnnnnnnnnnnnnnnnnnnnnnnnnnnnnnnnnnnnnnnnnnnnnnnnnnnnnnnnnnnnnnnnnnnnnnnnnnnnnnnnnnnnnnnnnnnnnnnnnnnnnnnnnnnnnnnnnnnnnnnnnnnnnnnnnnnnnnnnnnnnnnnnnnnnnnnnnnnnnnnnnnnnnnnnnnnnnnnnnnnnnnnnnnnnnnnnnnnnnnnnnnnnnnnnnnnnnnnnnnnnnnnnnnnnnnnnnnnnnnnnnnnnnnnnnnnnnnnnnnnnnnnnnnnnnnnnnnnnnnnnnnnnnnnnnnnnnnnnnnnnnnnnnnnnnnnnnnnnnnnnnnnnnnnnnnnnnnnnnnnnnnnnnnnnnnnnnnnnnnnnnnnnnnnnnnnnnnnnnnnnnnnnnnnnnnnnnnnnnnnnnnnnnnnnnnnnnnnnnnnnnnnnnnnnnnnnnnnnnnnnnnnnnnnnnnnnnnnnnnnnnnnnnnnnnnnnnnnnnnnnnnnnnnnnnnnnnnnnnnnnnnnnnnnnnnnnnnnnnnnnnnnnnnnnnnnnnnnnnnnnnnnnnnnnnnnnnnnnnnnnnnnnnnnnnnnnnnnnnnnnnnnnnnnnnnnnnnnnnnnnnnnnnnnnnnnnnnnnnnnnnnnnnnnnnnnnnnnnnnnnnnnnnnnnnnnnnnnnnnnnnnnnnnnnnnnnnnnnnnnnnnnnnnnnnnnnnnnnnnnnnnnnnnnnnnnnnnnnnnnnnnnnnnnnnnnnnnnnnnnnnnnnnnnnnnnnnnnnnnnnnnnnnnnnnnnnnnnnnnnnnnnnnnnnnnnnnnnnnnnnnnnnnnnnnnnnnnnnnnnnnnnnnnnnnnnnnnnnnnnnnnnnnnnnnnnnnnnnnnnnnnnnnnnnnnnnnnnnnnnnnnnnnnnnnnnnnnnnnnnnnnnnnnnnnnnnnnnnnnnnnnnnnnnnnnnnnnnnnnnnnnnnnnnnnnnnnnnnnnnnnnnnnnnnnnnnnnnnnnnnnnnnnnnnnnnnnnnnnnnnnnnnnnnnnnnnnnnnnnnnnnnnnnnnnnnnnnnnnnnnnnnnnnnnnnnnnnnnnnnnnnnnnnnnnnnnnnnnnnnnnnnnnnnnnnnnnnnnnnnnnnnnnnnnnnnnnnnnnnnnnnnnnnnnnnnnnnnnnnnnnnnnnnnnnnnnnnnnnnnnnnnnnnnnnnnnnnnnnnnnnnnnnnnnnnnnnnnnnnnnnnnnnnnnnnnnnnnnnnnnnnnnnnnnnnnnnnnnnnnnnnnnnnnnnnnnnnnnnnnnnnnnnnnnnnnnnnnnnnnnnnnnnnnnnnnnnnnnnnnnnnnnnnnnnnnnnnnnnnnnnnnnnnnnnnnnnnnnnnnnnnnnnnnnnnnnnnnnnnnnnnnnnnnnnnnnnnnnnnnnnnnnnnnnnnnnnnnnnnnnnnnnnnnnnnnnnnnnnnnnnnnnnnnnnnnnnnnnnnnnnnnnnnnnnnnnnnnnnnnnnnnnnnnnnnnnnnnnnnnnnnnnnnnnnnnnnnnnnnnnnnnnnnnnnnnnnnnnnnnnnnnnnnnnnnnnnnnnnnnnnnnnnnnnnnnnnnnnnnnnnnnnnnnnnnnnnnnnnnnnnnnnnnnnnnnnnnnnnnnnnnnnnnnnnnnnnnnnnnnnnnnnnnnnnnnnnnnnnnnnnnnnnnnnnnnnnnnnnnnnnnnnnnnnnnnnnnnnnnnnnnnnnnnnnnnnnnnnnnnnnnnnnnnnnnnnnnnnnnnnnnnnnnnnnnnnnnnnnnnnnnnnnnnnnnnnnnnnnnnnnnnnnnnnnnnnnnnnnnnnnnnnnnnnnnnnnnnnnnnnnnnnnnnnnnnnnnnnnnnnnnnnnnnnnnnnnnnnnnnnnnnnnnnnnnnnnnnnnnnnnnnnnnnnnnnnnnnnnnnnnnnnnnnnnnnnnnnnnnnnnnnnnnnnnnnnnnnnnnnnnnnnnnnnnnnnnnnnnnnnnnnnnnnnnnnnnnnnnnnnnnnnnnnnnnnnnnnnnnnnnnnnnnnnnnnnnnnnnnnnnnnnnnnnnnnnnnnnnnnnnnnnnnnnnnnnnnnnnnnnnnnnnnnnnnnnnnnnnnnnnnnnnnnnnnnnnnnnnnnnnnnnnnnnnnnnnnnnnnnnnnnnnnnnnnnnnnnnnnnnnnnnnnnnnnnnnnnnnnnnnnnnnnnnnnnnnnnnnnnnnnnnnnnnnnnnnnnnnnnnnnnnnnnnnnnnnnnnnnnnnnnnnnnnnnnnnnnnnnnnnnnnnnnnnnnnnnnnnnnnnnnnnnnnnnnnnnnnnnnnnnnnnnnnnnnnnnnnnnnnnnnnnnnnnnnnnnnnnnnnnnnnnnnnnnnnnnnnnnnnnnnnnnnnnnnnnnnnnnnnnnnnnnnnnnnnnnnnnnnnnnnnnnnnnnnnnnnnnnnnnnnnnnnnnnnnnnnnnnnnnnnnnnnnnnnnnnnnnnnnnnnnnnnnnnnnnnnnnnnnnnnnnnnnnnnnnnnnnnnnnnnnnnnnnnnnnnnnnnnnnnnnnnnnnnnnnnnnnnnnnnnnnnnnnnnnnnnnnnnnnnnnnnnnnnnnnnnnnnnnnnnnnnnnnnnnnnnnnnnnnnnnnnnnnnnnnnnnnnnnnnnnnnnnnnnnnnnnnnnnnnnnnnnnnnnnnnnnnnnnnnnnnnnnnnnnnnnnnnnnnnnnnnnnnnnnnnnnnnnnnnnnnnnnnnnnnnnnnnnnnnnnnnnnnnnnnnnnnnnnnnnnnnnnnnnnnnnnnnnnnnnnnnnnnnnnnnnnnnnnnnnnnnnnnnnnnnnnnnnnnnnnnnnnnnnnnnnnnnnnnnnnnnnnnnnnnnnnnnnnnnnnnnnnnnnnnnnnnnnnnnnnnnnnnnnnnnnnnnnnnnnnnnnnnnnnnnnnnnnnnnnnnnnnnnnnnnnnnnnnnnnnnnnnnnnnnnnnnnnnnnnnnnnnnnnnnnnnnnnnnnnnnnnnnnnnnnnnnnnnnnnnnnnnnnnnnnnnnnnnnnnnnnnnnnnnnnnnnnnnnnnnnnnnnnnnnnnnnnnnnnnnnnnnnnnnnnnnnnnnnnnnnnnnnnnnnnnnnnnnnnnnnnnnnnnnnnnnnnnnnnnnnnnnnnnnnnnnnnnnnnnnnnnnnnnnnnnnnnnnnnnnnnnnnnnnnnnnnnnnnnnnnnnnnnnnnnnnnnnnnnnnnnnnnnnnnnnnnnnnnnnnnnnnnnnnnnnnnnnnnnnnnnnnnnnnnnnnnnnnnnnnnnnnnnnnnnnnnnnnnnnnnnnnnnnnnnnnnnnnnnnnnnnnnnnnnnnnnnnnnnnnnnnnnnnnnnnnnnnnnnnnnnnnnnnnnnnnnnnnnnnnnnnnnnnnnnnnnnnnnnnnnnnnnnnnnnnnnnnnnnnnnnnnnnnnnnnnnnnnnnnnnnnnnnnnnnnnnnnnnnnnnnnnnnnnnnnnnnnnnnnnnnnnnnnnnnnnnnnnnnnnnnnnnnnnnnnnnnnnnnnnnnnnnnnnnnnnnnnnnnnnnnnnnnnnnnnnnnnnnnnnnnnnnnnnnnnnnnnnnnnnnnnnnnnnnnnnnnnnnnnnnnnnnnnnnnnnnnnnnnnnnnnnnnnnnnnnnnnnnnnnnnnnnnnnnnnnnnnnnnnnnnnnnnnnnnnnnnnnnnnnnnnnnnnnnnnnnnnnnnnnnnnnnnnnnnnnnnnnnnnnnnnnnnnnnnnnnnnnnnnnnnnnnnnnnnnnnnnnnnnnnnnnnnnnnnnnnnnnnnnnnnnnnnnnnnnnnnnnnnnnnnnnnnnnnnnnnnnnnnnnnnnnnnnnnnnnnnnnnnnnnnnnnnnnnnnnnnnnnnnnnnnnnnnnnnnnnnnnnnnnnnnnnnnnnnnnnnnnnnnnnnnnnnnnnnnnnnnnnnnnnnnnnnnnnnnnnnnnnnnnnnnnnnnnnnnnnnnnnnnnnnnnnnnnnnnnnnnnnnnnnnnnnnnnnnnnnnnnnnnnnnnnnnnnnnnnnnnnnnnnnnnnnnnnnnnnnnnnnnnnnnnnnnnnnnnnnnnnnnnnnnnnnnnnnnnnnnnnnnnnnnnnnnnnnnnnnnnnnnnnnnnnnnnnnnnnnnnnnnnnnnnnnnnnnnnnnnnnnnnnnnnnnnnnnnnnnnnnnnnnnnnnnnnnnnnnnnnnnnnnnnnnnnnnnnnnnnnnnnnnnnnnnnnnnnnnnnnnnnnnnnnnnnnnnnnnnnnnnnnnnnnnnnnnnnnnnnnnnnnnnnnnnnnnnnnnnnnnnnnnnnnnnnnnnnnnnnnnnnnnnnnnnnnnnnnnnnnnnnnnnnnnnnnnnnnnnnnnnnnnnnnnnnnnnnnnnnnnnnnnnnnnnnnnnnnnnnnnnnnnnnnnnnnnnnnnnnnnnnnnnnnnnnnnnnnnnnnnnnnnnnnnnnnnnnnnnnnnnnnnnnnnnnnnnnnnnnnnnnnnnnnnnnnnnnnnnnnnnnnnnnnnnnnnnnnnnnnnnnnnnnnnnnnnnnnnnnnnnnnnnnnnnnnnnnnnnnnnnnnnnnnnnnnnnnnnnnnnnnnnnnnnnnnnnnnnnnnnnnnnnnnnnnnnnnnnnnnnnnnnnnnnnnnnnnnnnnnnnnnnnnnnnnnnnnnnnnnnnnnnnnnnnnnnnnnnnnnnnnnnnnnnnnnnnnnnnnnnnnnnnnnnnnnnnnnnnnnnnnnnnnnnnnnnnnnnnnnnnnnnnnnnnnnnnnnnnnnnnnnnnnnnnnnnnnnnnnnnnnnnnnnnnnnnnnnnnnnnnnnnnnnnnnnnnnnnnnnnnnnnnnnnnnnnnnnnnnnnnnnnnnnnnnnnnnnnnnnnnnnnnnnnnnnnnnnnnnnnnnnnnnnnnnnnnnnnnnnnnnnnnnnnnnnnnnnnnnnnnnnnnnnnnnnnnnnnnnnnnnnnnnnnnnnnnnnnnnnnnnnnnnnnnnnnnnnnnnnnnnnnnnnnnnnnnnnnnnnnnnnnnnnnnnnnnnnnnnnnnnnnnnnnnnnnnnnnnnnnnnnnnnnnnnnnnnnnnnnnnnnnnnnnnnnnnnnnnnnnnnnnnnnnnnnnnnnnnnnnnnnnnnnnnnnnnnnnnnnnnnnnnnnnnnnnnnnnnnnnnnnnnnnnnnnnnnnnnnnnnnnnnnnnnnnnnnnnnnnnnnnnnnnnnnnnnnnnnnnnnnnnnnnnnnnnnnnnnnnnnnnnnnnnnnnnnnnnnnnnnnnnnnnnnnnnnnnnnnnnnnnnnnnnnnnnnnnnnnnnnnnnnnnnnnnnnnnnnnnnnnnnnnnnnnnnnnnnnnnnnnnnnnnnnnnnnnnnnnnnnnnnnnnnnnnnnnnnnnnnnnnnnnnnnnnnnnnnnnnnnnnnnnnnnnnnnnnnnnnnnnnnnnnnnnnnnnnnnnnnnnnnnnnnnnnnnnnnnnnnnnnnnnnnnnnnnnnnnnnnnnnnnnnnnnnnnnnnnnnnnnnnnnnnnnnnnnnnnnnnnnnnnnnnnnnnnnnnnnnnnnnnnnnnnnnnnnnnnnnnnnnnnnnnnnnnnnnnnnnnnnnnnnnnnnnnnnnnnnnnnnnnnnnnnnnnnnnnnnnnnnnnnnnnnnnnnnnnnnnnnnnnnnnnnnnnnnnnnnnnnnnnnnnnnnnnnnnnnnnnnnnnnnnnnnnnnnnnnnnnnnnnnnnnnnnnnnnnnnnnnnnnnnnnnnnnnnnnnnnnnnnnnnnnnnnnnnnnnnnnnnnnnnnnnnnnnnnnnnnnnnnnnnnnnnnnnnnnnnnnnnnnnnnnnnnnnnnnnnnnnnnnnnnnnnnnnnnnnnnnnnnnnnnnnnnnnnnnnnnnnnnnnnnnnnnnnnnnnnnnnnnnnnnnnnnnnnnnnnnnnnnnnnnnnnnnnnnnnnnnnnnnnnnnnnnnnnnnnnnnnnnnnnnnnnnnnnnnnnnnnnnnnnnnnnnnnnnnnnnnnnnnnnnnnnnnnnnnnnnnnnnnnnnnnnnnnnnnnnnnnnnnnnnnnnnnnnnnnnnnnnnnnnnnnnnnnnnnnnnnnnnnnnnnnnnnnnnnnnnnnnnnnnnnnnnnnnnnnnnnnnnnnnnnnnnnnnnnnnnnnnnnnnnnnnnnnnnnnnnnnnnnnnnnnnnnnnnnnnnnnnnnnnnnnnnnnnnnnnnnnnnnnnnnnnnnnnnnnnnnnnnnnnnnnnnnnnnnnnnnnnnnnnnnnnnnnnnnnnnnnnnnnnnnnnnnnnnnnnnnnnnnnnnnnnnnnnnnnnnnnnnnnnnnnnnnnnnnnnnnnnnnnnnnnnnnnnnnnnnnnnnnnnnnnnnnnnnnnnnnnnnnnnnnnnnnnnnnnnnnnnnnnnnnnnnnnnnnnnnnnnnnnnnnnnnnnnnnnnnnnnnnnnnnnnnnnnnnnnnnnnnnnnnnnnnnnnnnnnnnnnnnnnnnnnnnnnnnnnnnnnnnnnnnnnnnnnnnnnnnnnnnnnnnnnnnnnnnnnnnnnnnnnnnnnnnnnnnnnnnnnnnnnnnnnnnnnnnnnnnnnnnnnnnnnnnnnnnnnnnnnnnnnnnnnnnnnnnnnnnnnnnnnnnnnnnnnnnnnnnnnnnnnnnnnnnnnnnnnnnnnnnnnnnnnnnnnnnnnnnnnnnnnnnnnnnnnnnnnnnnnnnnnnnnnnnnnnnnnnnnnnnnnnnnnnnnnnnnnnnnnnnnnnnnnnnnnnnnnnnnnnnnnnnnnnnnnnnnnnnnnnnnnnnnnnnnnnnnnnnnnnnnnnnnnnnnnnnnnnnnnnnnnnnnnnnnnnnnnnnnnnnnnnnnnnnnnnnnnnnnnnnnnnnnnnnnnnnnnnnnnnnnnnnnnnnnnnnnnnnnnnnnnnnnnnnnnnnnnnnnnnnnnnnnnnnnnnnnnnnnnnnnnnnnnnnnnnnnnnnnnnnnnnnnnnnnnnnnnnnnnnnnnnnnnnnnnnnnnnnnnnnnnnnnnnnnnnnnnnnnnnnnnnnnnnnnnnnnnnnnnnnnnnnnnnnnnnnnnnnnnnnnnnnnnnnnnnnnnnnnnnnnnnnnnnnnnnnnnnnnnnnnnnnnnnnnnnnnnnnnnnnnnnnnnnnnnnnnnnnnnnnnnnnnnnnnnnnnnnnnnnnnnnnnnnnnnnnnnnnnnnnnnnnnnnnnnnnnnnnnnnnnnnnnnnnnnnnnnnnnnnnnnnnnnnnnnnnnnnnnnnnnnnnnnnnnnnnnnnnnnnnnnnnnnnnnnnnnnnnnnnnnnnnnnnnnnnnnnnnnnnnnnnnnnnnnnnnnnnnnnnnnnnnnnnnnnnnnnnnnnnnnnnnnnnnnnnnnnnnnnnnnnnnnnnnnnnnnnnnnnnnnnnnnnnnnnnnnnnnnnnnnnnnnnnnnnnnnnnnnnnnnnnnnnnnnnnnnnnnnnnnnnnnnnnnnnnnnnnnnnnnnnnnnnnnnnnnnnnnnnnnnnnnnnnnnnnnnnnnnnnnnnnnnnnnnnnnnnnnnnnnnnnnnnnnnnnnnnnnnnnnnnnnnnnnnnnnnnnnnnnnnnnnnnnnnnnnnnnnnnnnnnnnnnnnnnnnnnnnnnnnnnnnnnnnnnnnnnnnnnnnnnnnnnnnnnnnnnnnnnnnnnnnnnnnnnnnnnnnnnnnnnnnnnnnnnnnnnnnnnnnnnnnnnnnnnnnnnnnnnnnnnnnnnnnnnnnnnnnnnnnnnnnnnnnnnnnnnnnnnnnnnnnnnnnnnnnnnnnnnnnnnnnnnnnnnnnnnnnnnnnnnnnnnnnnnnnnnnnnnnnnnnnnnnnnnnnnnnnnnnnnnnnnnnnnnnnnnnnnnnnnnnnnnnnnnnnnnnnnnnnnnnnnnnnnnnnnnnnnnnnnnnnnnnnnnnnnnnnnnnnnnnnnnnnnnnnnnnnnnnnnnnnnnnnnnnnnnnnnnnnnnnnnnnnnnnnnnnnnnnnnnnnnnnnnnnnnnnnnnnnnnnnnnnnnnnnnnnnnnnnnnnnnnnnnnnnnnnnnnnnnnnnnnnnnnnnnnnnnnnnnnnnnnnnnnnnnnnnnnnnnnnnnnnnnnnnnnnnnnnnnnnnnnnnnnnnnnnnnnnnnnnnnnnnnnnnnnnnnnnnnnnnnnnnnnnnnnnnnnnnnnnnnnnnnnnnnnnnnnnnnnnnnnnnnnnnnnnnnnnnnnnnnnnnnnnnnnnnnnnnnnnnnnnnnnnnnnnnnnnnnnnnnnnnnnnnnnnnnnnnnnnnnnnnnnnnnnnnnnnnnnnnnnnnnnnnnnnnnnnnnnnnnnnnnnnnnnnnnnnnnnnnnnnnnnnnnnnnnnnnnnnnnnnnnnnnnnnnnnnnnnnnnnnnnnnnnnnnnnnnnnnnnnnnnnnnnnnnnnnnnnnnnnnnnnnnnnnnnnnnnnnnnnnnnnnnnnnnnnnnnnnnnnnnnnnnnnnnnnnnnnnnnnnnnnnnnnnnnnnnnnnnnnnnnnnnnnnnnnnnnnnnnnnnnnnnnnnnnnnnnnnnnnnnnnnnnnnnnnnnnnnnnnnnnnnnnnnnnnnnnnnnnnnnnnnnnnnnnnnnnnnnnnnnnnnnnnnnnnnnnnnnnnnnnnnnnnnnnnnnnnnnnnnnnnnnnnnnnnnnnnnnnnnnnnnnnnnnnnnnnnnnnnnnnnnnnnnnnnnnnnnnnnnnnnnnnnnnnnnnnnnnnnnnnnnnnnnnnnnnnnnnnnnnnnnnnnnnnnnnnnnnnnnnnnnnnnnnnnnnnnnnnnnnnnnnnnnnnnnnnnnnnnnnnnnnnnnnnnnnnnnnnnnnnnnnnnnnnnnnnnnnnnnnnnnnnnnnnnnnnnnnnnnnnnnnnnnnnnnnnnnnnnnnnnnnnnnnnnnnnnnnnnnnnnnnnnnnnnnnnnnncattgcagagcgactttgtgattgaggcggcgctactgcagggccagccgctgcacgcggccttagagcgcataagcaccacccgttcacagtcggttgaggccgagcaaaaggctgctgcgcgggtcatgcttgagatattggccgaaccggtgggctacgcatccgtcgggcttgatgatgatggcaatgcgcggctacaccacgccctgccaggtcgcttattaaagaaaattagcaatcgcggtagcacggtgtttctttctgcaacgctgacccacaacgataagtttgatgacttcaagatcgccatgggcctagacgcggtgagtagcctgtcaacaagcattgagccagaacagcatggcacgctcgacttcaccgtacacgcgcacgaggtggacacgcctgactggtttgcggccaccgttcagtgcatacaaagcgcgcagcgccccacgttggtggtcacacctagccatgacctcacagagcggctacaaaccgccgtgggtgagcaagcagacttgcttatacgtgcgggtgcatgggcgggtcttgacacgccaacgcgctggcgtaccgtggttattccgcgcgtgccatttggcgcaccagtcattgttgacggggtggcggtcacgtcttacttggccgccaaggtgacggccagtcggcggatgcgccaagcaattggccgtgggcttagaacacctgaggcggtgtgcacggttgtggttttggatgcgcgggcacacaacttaggtcgctttgtgccagagcgttttgcggcagattggtcgtctcggcaagtgtttgacgagggtgcccgccatgcggtggtgctgtccaaagcggagcgcgaccccgctttggccaaagccgcgctcagacactacggcgctcaatgccaacaagcgggttgttccgtgacagaggcgtgtcagctggacgtgcaccaccttgaccccgtaagcgaaggcgtgcgccgcacaaccttgaaggatgtgaccgtgctgtgtgcaaaccaccaccgacaggcccaccacgacatgaaaatggggctgaacgtgtcgtagcgcaacaaaaaacccgccatacctttgggtacgcgggttttgggagttctggcaaggcctgaaacctaaatgtggtggtgataggtggacttgaaccaccgaccccagcattatgaatgctgtgctctaaccaactgagctatatcaccgagcctgaaattatagccaaaattctcagggctttggcttgccgccaaaagtttttgttagccattttgtcgcgcctgtacgacgcgccaagcccttggttattggtgtttgaaggcgggtttgcgcttgtttatgaacgcatccatgccctctttttggtcttcggttgcaaacagcgcgtggaacagacggcgctcaaaacgcacgccttcgctgaggctgccttcaaacgcttggttcaccgcttcctttgccgccatgacactggggagggagtagttgcaaatcatcagggctgcgcccaaggcctcggtcatgagttggtcatcggcgaccacgcggctcaccagtccgccgcgctcggcttctgcagcgtccatcatgcggcctgtgagggccatgtccatggccttggctttgccaacggcgcgtggcaggcgctgcgtgccacctgcgccagggataacgcccaacttgatttcgggttggccaaatttggcgctctcgctggcaatgatgacgtcgcacatcatggccaattcacaaccgccgccgagggcaaagccgctgacggcggcaataacgggcttgcgaacgctgcgaatggtttcccagttgcgcgtgatgtagtctgacttgtagacgtcagcaaaggtgtaggtggccatggcgccaatgtcggcacccgcggcaaaggctttttcactgcctgtgagcacaatgcagccaatgtccgggtcggcgtcgaatgcggttagcgccgcgccaagctcgtccattagcgcactgttgagggcattgagttgtttggggcggtttagggtgagtatgcccacgcggccttcggtgcggattaaaaccagttgctcactcatgtctgtgttctccaatgtggtgcgaaaagttgcttagaaaaagttgtttcgaaagttgcttcgacgtaagcggttgatcatagccaagcggtgagcttgctagggtctttcaccaccagttcggcgatctggttggcgtgggtcgatggccagatgagggggcacgacaacatgcggccatcgcgcgcgacaccggcaaccaatgggtgctgggctacgtcggcgtggcgtctcgcaatgntctccacatcgctcagtgacttnacccgccattgatcggtgccntcaaatagngtcacccattcgtcacccgccgccatgcccgcttgttcgcctgcaccgcctcttgccacgtgggtgatgcggatgccgtctcgctcaacgacacgcatgcccaagcgctgggcgagggtgccgctcttggccgccacggcgacaccgtaatgactaagcagtgcgtgtaccggcaggtcttccgtgctgtgtacccagtgcgcgagttgtgtggcgacgttggcgtgcccttgctggttgagcagggcgtagatgtcggcctcactgatggtgccgcctttgcttttgacccataggccgcgcatgagggtgtcgagatcgccgccttgttggcgcagcatgaggtcggtgcacagcgctattagcgcccctttggtgtagtagctaacggtggcgttgggcgtgttttcgccaatgcggtagtacttgacccacgcgtcatagctagactgggcaacgctttgcagatgccgccctggggtggccgcaacgtggttaatggatttggccagtagcgtgagataggtggccgtatcaatgagtttggcgcgttgcagaaacaggtcatcgtagtagctggtaaagccttcaaagaaccacagcagctcggtgtagttctcttggttgaagtcgatgcttgcaaactcggatgggcgcaggcgcttgacgttccatgtgtgaaagtactcatggctaatgaggccaagtaattggttgtagccagcgccttgtgcatgggggggcgctgcctcgccagcgacggccgttaggggcaagtcggcacgctggcaaatgagtgcggtgctggcgatgtgctctagcccgccgtagccgttttcagtggcgtgaagcatgaagacgtagcggtcaaagggtagttggcgttgcggttgtttgccgtgccaaaacgtgatctctgtttcgcaaattcggcgggtgtcggcaactaattttttgacatcaaacccgggcgcggtgtggttgccaatgcccgtgacaacgagttcatgcggtacgccagagaccttaaaccggctgacgtaaaaatcacccaaggtaaagggactgtcggcgagctcgccgcagttgcgggcggtgtagcgcccgaagccacgcgcgtcgatttgccgcgcgggcaatgcggtagacagccgccacgcattgaacgcgggcgcggtggggcgctcgacggagatggtttgtatctcgtcttcgcccccgaccacttgcaaacacaggctggtggggttgaagaagccgcgggtgttgtccaaaaaggcggttcgcaccgaggcgtcaaaggcgtagatttggtaattgagctccagcgggcgtttgccgtcggattccactagccactcatttttactgcactgcgtgatttggcaaggcgtgcggccttgcttggctgtcagcgcttgcaggtgttgcgaaaattcacgcaccaaataactacccgcaatccaaacgggtagacgcaggcgctgttgcttttttgggcttgagatgcgcagatgcacaccgaacaggtgcgcttccgcgctgtcaacgcgaatgttgtgatcgatgcgcatggtgttacttgatggcggccagacgcttctcaacttcggcggcagaaatggcgccggggacacgtgtgccgtctgagaagaaaagggcaggcgtgcccgagatacggtgcttttgaccaaacgcgatgttgcggtcaagcgcgctggtgtcgcagctgatggcggcggcgctggtggttagagggacttcattcaccatccagtcttcaaaggctacgccggggtttttgtcgcaccaaatggccttggacttgagcgttgaatccgcgccgagtatggggtacaaaaagatatgcagggtgatgttgtcgacattcatcatgtcacgttcaaagcgcttgcagaagccacagttggggtcttcaaaaaccgcgagttgacgcttgccgttaccgcgtttgatggtgaaggcatctttaaagggcagggcctcaaagggtattgcgctcaatttatcgaggcgctcctgcgtcaggttgcgtttgcccttgaggtcaacgagtacgccttgcagcaaaaattcaccgttggcatcggtgtacaaaatttcggtttcaccaaagcgaacttcgtagaggccggccatgggggtcttggtgacgctgttgatagcgggtaagttgggtagttgcttgggtagcatctcgcgaatcttggcttcctgtgcccagcccatgcttgccatgagggtgaatgcgatgcccacggccaagccgcgcaataaagagcgtgtgggggtgggtgcgagaggtgacgtgtggtgaagcatggtgtggttcgctaggtaggcgttgtttgggggtaagagggtgggtgggttggttcgtgggagggggctgttgggtagcggatgctcgctgttggagcaccatcgtggcaatcagttccccatgccaacacgctgtacccacgacttgagtgggcccatggcattaaagcccgacatgcctgcattgcgtagccaactggcggcggggttgcggcccaaggggttgttgaacaagtgaaagagtccgtgcgtgacccattgcatgggttcggtggcggcgcgtcgacgccgttggtagcgctgaagcacgcgtgaggcacccggagactcacctcgggcgcgtgccgcaacgcagtcactgagcgtttgtacgtcggccaagccaaggttgagaccttgccctgcgagggggtggatggtgtgcgccgcatcgccggctaacgcggtctgctgggcaacccattgcgtggttaagccgacgctcaaggggaaggcaacaggcccgctggtaagggagaggtgccctagcgcgccctgactggcttgggtgagttggtcttctagggcggcggtttgggcggtggtctccatgtccagccacgtctggtgcgcagcgtctggtagcgaccagacaacggccaggtcgtgcccgtcagcgccgcccatgggcagcagggccaaaatatgtgtgccgttaaaccactggtgggcgacgccgccgtggctgtgctcggcgcgcatgcgcaacgccaaggcacggtgggggtagtgcttacttaccatgtcaatacccaaggcggtgcgcgcgataccgctcttgccttcgcaaatgatggtcaatgcgctaggcggtgtctgggctgatggtgacgcgtggtcgtcaaattgcacgcgtgcatggcgtgtgacggcttcggcaagatggtcctccaggacaggcacatcgaccatccacgccaagggttgcgcttgctgcgggggtgcgtcgaattgcagcgcgcctgacgcatcgccaaacacccgcatatgggtcatgggggtcagccacgcggcctgatcgtcttgaggccagacaccgcatgctttgagggtgtctctcgaggtgtggttgatggcgtaggcgcgaatgtcgcgggtgtgcggtggcgcttggggcgcgggcaggctgacggaaaagccttgctctgccaataacaatgccgccgcgtgcgcggtgatgccagcgcctaaaacggtgatgtgccctgattgagtcatggcgttattctattgggacacccacttggggggccagcgatgaccctgccccggaagtgccttaaactctgggtcttgctttttgaggattgtcatgagtttgaaatgcggcatcgttggtctgcccaacgtcggtaaatctaccctgtttaatgcgcttaccaaggctggtatcgccgctgagaactaccctttttgcaccatcgagcccaacgttggcgtggtggaggtgcccgacacccgcctagcgcagctcagcgatatcgtgacgcctgagcgcattgttcctgcgattgttgaatttgtggatattgccggcttggtggcaggtgccagtacgggcgagggcttgggtaacaagtttttggcccatatccgcgaaaccgatgccacggttaacgttgtgcgttgttttgaagatgacaacgtggtgcacgtcgcgggcaaggtggatccgatttctgacattgaggtgattcaaacggagttgtgccttgccgacttaggcgcagtagagaaagccctgcaccgggtctccaagaccgcgcgttctggcgacaaagagtcggtgcgcttggtgtcgattttggagcgctgtcaggcggccttaaacgaaggcaagcccgttcgcacgctagatttcagcaaagaagaagcgccgctgcttaagcagtttttcttgattacggccaagccagcgatgttcgttgcgaacgtgtctgaggatggctttgagaacaaccccctgcttgaccgcttgaccgcctttgccaacgagcagaacgcgcctgtggtggcgatctgcgccaagctagaggccgagatgagcgagatgagcgacgaggaccgcgatatgttcctggaagagctggggcagtccgagccgggcttaaaccgtctgatccgtgccgcctacagtttgttgggtttgcagacctacttcactgcgggtgtaaaagaggtgcgcgcttggactatccacgttggggatacggggccgcaggcggccggtgtgatccacactgatttcgaaaagggctacattcgcgcccaaaccattgcctttgatgacttcattgcattcaagggcgagcagggcgctaaggacgcgggcaagatgcgcgcagaaggcaaggagtatgtcgtgaaagacggcgatgtactcaacttcttgttcagctcataagccactgcgcactcgcggcaatggcaaggtagcgggcgaacttgccaatggccatgtacaccgcgcaggccagccagggcattcttagccagcctgcgagggtgcacaccacatcgccgaccacgggtagccaagccagcaaacacgccttgggtccgagtttttccagttgagccaaagcccacgcggcgagcctgccagccgttggggtggcctgagcatccgcgcgtcggtgcgggtgcgcacggttttggtaggcgcggtgcgctgattgcaggccaacgcccatcagccaactcaccatgccacccaaggtgttgcctaccgtcgctagtaacaaggcgggccaaaatagatggggtgagatggcgatgagacccattaatgccgcctccgaccccatgggaagccacgtcgcggagacgaatgccgtgacaaaaacggtagtcaacccccattcgggcagactgaaccagtgaagtaagctcgcaaaaaaggcatccattggcttgagtataggtacaatcatgcttaaattttcagcaagcaccgacgcgtcaatcggtgcttttttgtctctaactgccgtccaacgtgcatatcggtccctaccacctccgcaataacctgttcgtcgcgcctatggctggcgtgacagaccgcccgtttcgccagttgtgtaagcaactgggcgcgggctatgccgtgagcgaaatggtgacatcgcggcgcgatttgtgggactcgcttaaaacctcacgccgtgcaaatcacgccggtgagagcgggcccattgcggttcaaattgcggggaccgacgcccagatgatggccgatgccgcggtgtacaacattgaccgtggcgcacaaattattgatatcaacatggggtgccccgcaaaaaaggtgtgcaacaagtgggccggttctgcgttgatgcaagacgagaccttggcgatcgccattgtcgaagcggtggtgaacgcctgcgcctctaagggtgtccctgtgacattgaagatgcggacgggttgggcggcgcatgcgaagaatgccacgcggttggcgctggcggcggagcaagtgggggtgcagatgttgacgattcacggtcgcacgcgcgagcaaggctataagggttttgcagagcatgagacggtggcggacattaagtcgcgggtgcgtattcccgtggtggccaatggggatattgcatcgcccgaggcggcgcaacgtgtgttgcaagccacgggggccgatgcggtgatggtgggacgcgccgcgcaagggcgcccatggatatttagtgagatcgctcattttttagccaccggacgccacgcgccaccgcccaccgctgtggatatgcgggcgtggatggtggagcacctgcacgcgcactacgcgctttacggcgaatttacaggcgttcggtctgcgcgcaagcaccttggttggtatgcgcaacacttgcccatgggtgagcttttgcgtcagcgcatcaatgccttaaccgattgcgcggagcagttggctgcagtcgaggcgtatttcgcagcgtgggacagtgatgatctggccgcgcttggtcgggcatggcaaccgacacagataccgggcagcgcgcagagccagtctgtgcgagagatgcctgtcgacatgacattggccccccttcattgagcgttatatgagccgtaaagacattgaaaagggcgtgcgtgaaagcatgcaaacctacttccaagacctcgccggtagcgagccacatggcctgtacgacatgatggttgatgttgtggagaagcccttgctggaggtggtgatggcgcaagcaggcaataaccagtctcgcgcggcgcagtggcttggtctcaatcgcaacaccttgcgcaaaaaattacttcatcacaagttactcagttaacgctgcaaacgcggcggcctaactcgtcatttccccctttatttttcacgactaccaagcaccatgaacgcactcttatctgtatccgacaaaaccggcattgtggcccttgcgcgcgcgctccacgcccaaggcattggcctgctgtctactggcggcacggccaagctgttggcggaagagggcctgcccgttaccgaggtggccgatatgaccggctttccagaaatgctcgatggtcgcgtcaaaaccttgcaccccaaggtgcacggcggcttgttggctagacgtgacgtgccagcgcacatggcggcgttggccgctcacgggatcgataccattgacgtgttggttgtgaacctctacccctttgaggcgacggtggccaaagcgggttgcaccttggaagaggccattgagaacatcgatattggcggccccgcgatggtgcgtagtgccgccaaaaactggaaggacgtcgcggttttaacggatgccagccaatacgagaccgtcattgccgagctcgccgctaacggcgcggtgtctaccccgacgaagtttgcgctgtccgtggcggcgtttaaccgcatcagcaattacgatgcggcgatcagcgactacctgtcggcgtatcagttggagagcgataccttgcaagcgttccctgcacaggcgaacggacgttttgtgaagttgcaagacctgcgttacggcgagaatccgcaccaatcagcagcgttttaccgtgacctacaccccgcgcccggctcgctggtaacggcgaaacagttgcaaggtaaggagctgtcctataacaacatcgccgatgcggatgcggcatgggagtgcgtgaaaagctttgacgtgcccgcctgtgtgatcgtgaagcacgccaacccctgcggtgtggcgttggccgaggatgcgttgggcgcctataccaaggcgtttcaaaccgaccccacatcggcctttggcggcatcatcgcgctcaacgttgtggtggatgaagcggctgccaaggccattagccagcagtttgtcgaggtgctgatggcgcccgcttataccgagggtgccttggcggtatttcaagccaaagccaatgtgcgcgttttgcaaattacgctgcctgcggcgggtggacagacggcgtgggagcgtgggcgcaacgtgcaagacataaagcgcgtggggtctggtttgttgattcaaacgcagacaaccatgacctgagtttggccgacctcaaagtggtgtccaaagtgcagccgaccgaggcgcagttgcaagacctcttgtttgcgtggaaggtggccacgtatgtgaagtcgaacgcgattgttttctgtaaagaccgcatgaccgtcggcgttggtgcggggcaaatgagccgtttagattcagcgcgaatcgcgcgtatcaaggccgaccatgccggtttgtcattggcgcagtcggtggtcgctagtgatgcgttcttccctttccgagacggtctcgatgtggtggtggaggcgggcgcgactgcggttattcatcccggtggttccatgcgtgatcaagaggtgattgatgcggcggatgagcatggcgtcgcgatggtgtttacgggcgtgcgccacttccgtcactaagccgttgcgggtgttgcttgcgtggccatgttgacctggttggatatctcgcagacggcgagcgatgacgactgggtgaccttagaggtctgcgcgtctgtgacccgtgctgaccagcatcgcgtcgatgctgcggtctgtgagttgcttggttatttgtacgcgcgctgtggccgtcccagcgaagaccccgacgtgccgcccggcccacagtcgtggctgatcgatgtgcaggcgtatgccgagtcggcagccaaagcgccgctggccgtcgccttggattggcgcgacgacgccacggtgtctctgcaatggggcacagcgggagccgctgacgcgaccacggaagacacccggcgaacccttctcattagtttgggcttgtcacccgcgttagcgttcgcttgcgatgaggcattcgaactggggctctagctgacgccccctaacgcggtgtatgccccgctcgtgggactacagggttgcaaatgtccgctttgccgcggcgatggtgtcgtcaatgtcttgcgcggtgtgcgcggcgctcacaaagccagcctcaaatagcgcgggcgcaaagtaaacaccttggtccaacatgccgtggaagaagcggttaaacaccgcgccgtctgtggtcatgaccttggcgtagttttgtggcaactcagggaagaagaagaagccaaacatgcccccttcgctgtcgccacaaaacgggatacccgcgtccttggctgcggcggtcatgccgctgacgagttgttgggtgcgttgattcagttgggtgaaaaagccgtccttttgaatctcttttaaggttgccaaaccgcaggcggtggcgacggggttgcctgacaaggtgcccgcttggtagaccgcgccaagtggtgcgaggtgggacatgacttcgcgcttaccgccgaacgcggctaacggcatgccgccgccaatgactttgcccatcacggtcatgtcaggctcaaagcccggaatttctttggcgtacaagctctgagcgcttcccagtgccacgcggaaaccacacatcacttcatcaaatgcgagtagcgctccgtgggcagtgcagagttcgcgacagcgttttacaaatggcacgctggcccgcacgaagttcatgttgccagcaatgggctccatcatcaaacaggcgacttcatcgccgtgttccttaaaggcggcctctagcgcttccacgtcattgaagggcagtactaaagtgtgttgcacaacctctggcgggacgcctgcgctggtggggttaccaaacgtggcgaggccagagccggccttaaccaacagggcatcggcgtggccgtggtagcagccttcaaacttaatgattttgctgcgtcccgtggcgccccgagccagtcgaatggcgctcatgccggcctcggtgcctgagctgaccagtctcaccatttcaatggatggaaccagcttgatgatttcttcggccagttctatttcgcgttcagtcggtgcaccaaatgacagcccttgctctgcagcgctcagcaccgcggcgtgtacggcggggtggcggtgccccaagatcatcgggccccaagagccaatgtagtcaatgtagcgctgatcttctgcgtcccaaaaataggcgccatcgccccgcgtgatgaagcggggtgttccgccgacggctttgaaggcgcgtacgggtgagttaaccccacccggaatggctagcttggcgcgtgtaaataattggtcgtttttgttcatgatgtgtttccggttacgttgcacggttcagtgtttggtgtcgtctagcgggaagtcgcctaacgtgtggtgaccgacatccagcgtcggtgtgtcgggggcgtcgagatcctcggtatcgtctatgccgtcatcttcgccgcgtccccaaaacaagcggtcgggtaaggcgtgtcccatgccgggtgcaaagcctgcatccagactctggtcgagataggtcagcgcttctgcgcaggcggactgcaagtcttcgcctgcacccagcagggccgtgagggcggctgacagggtttcaccagcgccggtgaaggtggtgtcaaaccgctcgaagcgtgcggtggccaacacggtctcaggggacgctaggtggttttctaagaattgttcaggtgcatttaacccggtgaccaaggtgtaactcacaccgtgtagctgcgcggcgcgagctacgtcgcgcggtgtggggggcttttcgctcgcccagtcgggtaataaccagcgacacaaggtgctgtagttgcccacgagcacggcggtttgcgggagcattaattcggtgaatgcgtctaagtaggcatctagagcgatatcgtccatccacgtcaaactgggcatataggcaacgacgggggtgtccgcgtagtcgttggcaatttgcgccactgcgctgatgttttccggactgcccaaaaagccgactttgatactggtcacggggatgtcttcgagcaccatgcgggcttggtcgttgatggcatcagcgtccagcgagacgtggtcttggacggcggtggtgtctcggatgagcaccgcggtgaccacgggcaacatgtgcacagaggcggaacccatggcgccgatgtcagcggccaaaccgccagcacccgttgggtcattggcattgaacgacagcacgcacggcagcgttagctggtgcgcggtcgtgctcgtgtcccgtttgctgggctgcttgggcggcgaatctaaagcatcggtcatgggtttgctcgttgaggggctgtctcagttccttcgggggtatgcttctgcaccgatacaatgtgatcattctatgacacggttttaaaaaaatgagcgactcaacgacttggatgtgcctgatctgcggctggatgtacaacgaagccgagggcgcgccagcggacggcattgccgcaggcaccaaatgggcagatgtccccatgaactggacctgtcccgagtgcggcgcgcgcaaggaagattttgaaatggttcaaatctaattctcgcgcatggcgcccttcagggcttgggcttcttcacgacggcgtagcgagccaacgttcgctcgcgggcggcggcatggtcgacgatgggtttagggtagttctcccctaaggtaacgccggcggtgatgaggtcgaaggggtcagctagccaaggggcgtgtatgcgtttgtccgacagctcagcgagaaccggtaagtagcggcgaataaacttgccctgcgcgtcaaacttctcgctctgtgtcgtgggattaaaaatccgaaagtacggttgcgcatcacacccgctagaactggcccattgccatcccccgttgttggcagacaggtcaaagtcgatgagcttttccgcgaagtagtcagccccccagcgccagtctatgcctaagtctttggtgaggaagctggcaacgaccatgcgtaagcggttgtgcatgtaaccggtttggttgagttggtgcatcgcagcatccaccagtgggtagcccgttgcgccttggcaccacgcgtgaaagagggccttggcgctggcgccgtgttcccacttgatggcgtcgtattcaggcttgaatgcgcgatcgacgatgcgtgggtggtggtgcatcacctgcatataaaaatcacgccaaattaactcccctagccaggtgctggcacccacatggccttggctatgaccggcgaaggcatgttgggcgagggtgcgaatagacacggttccaaagcgcaggtgaacgcttaggtagctggggcccttgacggcagggaagtcacgcgtgtccttgtagcgggccatgcggggcaagaagtcggccaacaaggccgcagcgccagacgcgcccggcgtgatattttgtgccacgaggtcgacaggcgtaaaccccatactggttagtgagggcatgtcgcccagtgccttgaggtctgagggcagggcatcggtttgggccagggcggttgcgtaacgctcggtggggtaggcctttaggtagtagggctctagcttcttgagccaggcgtttttgtagggcgtgaagacgccaaaggggcgcgattgttgcgtgaggacctcgctacgctcgaaaatgcattggtctttgtaggtgttgagcaggatgccgttgtgcgcaaggtgcccaaaaatagcggcgtctctcgccagtgcctgtggctcatcgtcgtggttggcaaataccgcatccacgcccaaggctttcgccgtgcgcggtatcgctcgctcgctctggtcgtggaggcatagcacgggctgggcattggcgccggctaccgcgcgtagctgggtgttgaggtccaccaagctgctgtggataaaggcgacgcgccgatcggttgtgggcaaggtgtccaaaatggccttgtcgaatacaaagatacaaaaaacggtgtcgcactgcttgagcgcgtgataaagcgcggcattgtccgtcaagcgcaggtcccgcctgaaccacatcaggccttttgtgtacttctttttcatcgtgtagattgctcgattgggtcgtgagagggtgcggattgtcggcagcgcccgcaccccttaaaataacatcatgcctactgattctgccgcgattgacctcacccatcatttcctcattgctatgcccgggttggaggacgaccttttcgctcgcagcgtggtttatgtgtgcgagcacagtgcgcggggcgcgctgggcctgattatcaacaagccgagtgatctgccgctggccggtctctttgagaagatcgcgttgcgactgcatcgtgacgacttaaccgatgcgcctgtgttccggggtggccccattcaaaccgaacggggttttgtgttgcatgcgcccatggggcagggcggtgagtcggtttactcttccactttggtgattcctggcgacggctctggcctgaagggtgtggactggccaaactctgaaattcatgttgcgcttagcgtggagaccgatgacgatgcagcgccgtccgcgccgcctgaagccccaaaatatgggcctgcgcgcctagaaatgaccacctctaaagacgtgctggaggcaatggctgaaggcgcaggccctgctcgggtgttggtcacgttgggctatgccacttggggcaagggccaactcgaatcggagttggctgagaatgcctggctgaccgtgcccgcggacgagtcgattatttttgatacaccgcctgagcttcgctacagccaagccatgggtttattgggtttggatgcaggcatgctgcacggtgaggcaggacacgcctgatgtccatgcggccactaccgccagtgatcgcctccgatgtgcagttgttcctagcttttgattatggggagaagcgcaccggtgtcgccagcggtaaccgcctgacccgcagcgccacccccttgggcacgatcgccgcgcaaggggacgcgaagtggcctcagattgcccaatacctgaaagactggtcgccacaggccgtcgtgattggggtgccacggcacccagacggcgccgaccacgagaacacgcttgcggcgcaaaagtttggcagacaaatcgcgggtcgttttgccgtgactgtattcgaaaccgatgagcgctacaccaccaccgaagcgcatagcctcgctgcaaaggatgcagacgccgtggccgcttgtattattcttgagcaatttcttcggagcctaccgtgaccagccagtttgataacaccgtgcaggcagatgccttggacgcagagggtctctatcagcaactattgacggcgattcgccccttgacggcgacggctgacaagcccgtgcgtttagttggtatcgcctccggcggcgtgtggcttgcccaacgcctgcagaaggacttgggcttggcgggggagtcgggcgtgatttccagcagcctgcaccgcgatgacttttccaagcgtggcctcagctctatgggggtacaaacgaaattgccttttgacgtgaacggcgccaccgtgtggcttatcgacgatgtgctgtacaccgggcgcacgatacgcgccgtgctgaacgagttatttgactacggtcgcccagccgatgtgaggttggccgttttggtcgatcgcggtcagcgggagttgcccgttcaggccgatctggtggtggctcgttgctcggtgccgagcacgcagtcactggagctgtcgcaaacggacggcggtcgtctaacctttgggattgaaactgcgggttgaacgccacagaatcactttgcaccgccacactttattgccctagcgcccctatgcgaacacaacgtaacccccaactgaacgccaacggcgagctcatacacctgctctcaaccgaaggcctgtccaaagagatgttgacccacatcttggacacagccaccaatttcgtgagtgtcagcgaccgcgaggtcaagaaggtgcctttgctgcgcgggaaaagtgttttcaatctgttttttgaaaactccacccgtacacggaccaccttcgatatcgccgccacccggttgagcgccgacgtggttaacctagacatcgcgcgctcctctgccagcaagggcgagagcctgttggacaccattgacaacctttcggcgatggccgcggacatttttgttgtccgccacaacgagtctggcgccccctacctcattgcgcaacacgtggggcctcatgtgcacgtggtgaacgcgggcgatgggcgacacgcccatccgacccaagccctgctggacatgtacacgattcgccacttcaagggggacttttccaatttgagtgtggcgattgttggtgacgtggcgcactcgcgtgttgcgcgctcaaacattcacgccttgacgaccttgggctgccctgacctgcgtgtggtgggccccaagaccttggtgccgaatgacatggcacaaatgggcgttcgggtctgtaacgatttgcgctctggcatcgacggtgtcgatgtggtgattaccttgcgtctgcaaaacgaacgcatgagtggcgccttgttgccgtccgcgcaggagtttttcaagagttacggcctgacgcccgagcgcctgcagtgggctaagcccgatgccattgtgatgcacccggggcctatcaatcgaggggttgagattgcatcgtcggtcgttgacgggccacaagcggtgattttgtcgcaggtaaccttcggtatcgcggttcgtatggccgtgatgtctattgttgccagccacgagggctaatgactggccatggcgagtgcaccccaacaaccgacccctttaacccagtacgtgttttaaatcgcctgagcaccatatcgatatgaagattctgattcaatccggacgtgtcatcgaccccactagcgggctagaggccgttcaagaccttgccattgccgctggtcgcattgtggcgatgggcgcgcaggtcaaagacttttcgcccgagcgtgtgatcgatgccaccgactgtgtggtggcgcccggcttggttgatctgtgcacgcgcttacgcgagccggggttcgagcatgagtcaatgttggagtctgagatgtccgccgccgttgcgggcggcattacctccttggtctgtccgccagatactgacccggtcttagatgagccgggcttggttgacatgctcaagtttcgaaccaaaaagctgcgtcaagcacgcgtcttcccgttgggggctttgacccgtggcttggagggggaggtgctgaccgaaatggccgagctcaccgagtcaggttgcgtgggttttgggcaagcggatgcgccgatacagaacacgcaggtactgcaacgcacgtttcaatacgcggcctcgtttggttacagcgtctggttgcgtccgcaagattactggctgggtcagggtgtcgctgccagtggtccgctggccacgcgcatgggcttgtctggcgtgcctgtgtctgctgaggtgattgcgctagaaactatttttgagctgatgcgaggcaccccagcgcgggtgcacctctgtcgtattagcagtgcccgcggggtggacttggtgcgcgccgcgaaggccgaaggcttgtccgtgacctgcgatgtcagcgtgcacaatttgcatctcattgacgtggatatgggctattacgatgcgcgcttgcgtttgcaaccacccgttcggcaacagcgtgaccgcgacgccctgcgtgcggggttggcggatggcactattgacgccttggttagcgaccacaaccccgtcgaagcggatgccaaaaacctgccctttgcgcaagcagaaccgggcgccactgcggtggagttgttgctgagtttggctcttaaatggggacgtgaagaccaggtgccgttgcagcgcgtgatcgcggttttgacgcaagggcctgtcaaagttctgggtcaaagtctgggaagtttgcaagccagcttaggccaaatcacccttggtggtgtggcggatatttgtgtttacaagccggatgccgcgtgggtggtgggcgcagacacattgcgaagccaaggaaagcacaccccctttgcgggttatgaattgcccgcaaaagtagccaccaccattgccggtggctatattgcctttgacgcaggctgagcgcgatgcgagcaatccctgcggcttggcgcatgatattgggcgtgaatcacgttctgcgcggtctacgaaccattaacaaatactttgccacggcaacgcaaaccgagcgtgacgcgatggtgcaggcgtggtctctcgccctgcttgagctgctaaatgttgaattggtcaccgatggtgctgagcctgtacccggcttggtggttgcaaaccacgtctcgtggttggatatcttggtgatgaatgccgcacaccccgttcggtttttatcgaaatcagatgtcaagaagtggcccttactcggccgcctgattgcggggtctggtacgttatttatagaacgtgcaaagcgccgcgatgcgctgcgggtggtgcagcaaattacgacgtatttacgtgatggtcaccgcgtggcgatctttcccgagggcacgaccaacgatggtattcatgtgctgccgtttcatggcaacttgattcaatccgctatcgacgccgaggcggcggtgtgtccggttgggatacgctacatggacaaggccactggccaacgcagcttggcgcccgcctatattgatgacgacacgctggtaggctctatttggcggacgctacgcagtggtcgcatggtggcgcgggtgcgcttgggtgagccacaactaaacgtgggacgtgaccggcgcgtatgggcgagcgaccttcaacgcgcggtcgtcaccctgaccgctgagtaaatacgaggccgtgcgacg

SEQ ID NO: 18 - DNA, 30157 bp, Artificial Sequence
  Synthetic Oligonucleotide
  misc_feature (1)..(9982): n is a, c, g, or t
  misc_feature (12327)..(12327): n is a, c, g, or t
  misc_feature (12350)..(12350): n is a, c, g, or t
  misc_feature (12371)..(12371): n is a, c, g, or t
  misc_feature (12380)..(12380): n is a, c, g, or t
nnnnnnnnnnnnnnnnnnnnnnnnnnnnnnnnnnnnnnnnnnnnnnnnnnnnnnnnnnnnnnnnnnnnnnnnnnnnnnnnnnnnnnnnnnnnnnnnnnnnnnnnnnnnnnnnnnnnnnnnnnnnnnnnnnnnnnnnnnnnnnnnnnnnnnnnnnnnnnnnnnnnnnnnnnnnnnnnnnnnnnnnnnnnnnnnnnnnnnnnnnnnnnnnnnnnnnnnnnnnnnnnnnnnnnnnnnnnnnnnnnnnnnnnnnnnnnnnnnnnnnnnnnnnnnnnnnnnnnnnnnnnnnnnnnnnnnnnnnnnnnnnnnnnnnnnnnnnnnnnnnnnnnnnnnnnnnnnnnnnnnnnnnnnnnnnnnnnnnnnnnnnnnnnnnnnnnnnnnnnnnnnnnnnnnnnnnnnnnnnnnnnnnnnnnnnnnnnnnnnnnnnnnnnnnnnnnnnnnnnnnnnnnnnnnnnnnnnnnnnnnnnnnnnnnnnnnnnnnnnnnnnnnnnnnnnnnnnnnnnnnnnnnnnnnnnnnnnnnnnnnnnnnnnnnnnnnnnnnnnnnnnnnnnnnnnnnnnnnnnnnnnnnnnnnnnnnnnnnnnnnnnnnnnnnnnnnnnnnnnnnnnnnnnnnnnnnnnnnnnnnnnnnnnnnnnnnnnnnnnnnnnnnnnnnnnnnnnnnnnnnnnnnnnnnnnnnnnnnnnnnnnnnnnnnnnnnnnnnnnnnnnnnnnnnnnnnnnnnnnnnnnnnnnnnnnnnnnnnnnnnnnnnnnnnnnnnnnnnnnnnnnnnnnnnnnnnnnnnnnnnnnnnnnnnnnnnnnnnnnnnnnnnnnnnnnnnnnnnnnnnnnnnnnnnnnnnnnnnnnnnnnnnnnnnnnnnnnnnnnnnnnnnnnnnnnnnnnnnnnnnnnnnnnnnnnnnnnnnnnnnnnnnnnnnnnnnnnnnnnnnnnnnnnnnnnnnnnnnnnnnnnnnnnnnnnnnnnnnnnnnnnnnnnnnnnnnnnnnnnnnnnnnnnnnnnnnnnnnnnnnnnnnnnnnnnnnnnnnnnnnnnnnnnnnnnnnnnnnnnnnnnnnnnnnnnnnnnnnnnnnnnnnnnnnnnnnnnnnnnnnnnnnnnnnnnnnnnnnnnnnnnnnnnnnnnnnnnnnnnnnnnnnnnnnnnnnnnnnnnnnnnnnnnnnnnnnnnnnnnnnnnnnnnnnnnnnnnnnnnnnnnnnnnnnnnnnnnnnnnnnnnnnnnnnnnnnnnnnnnnnnnnnnnnnnnnnnnnnnnnnnnnnnnnnnnnnnnnnnnnnnnnnnnnnnnnnnnnnnnnnnnnnnnnnnnnnnnnnnnnnnnnnnnnnnnnnnnnnnnnnnnnnnnnnnnnnnnnnnnnnnnnnnnnnnnnnnnnnnnnnnnnnnnnnnnnnnnnnnnnnnnnnnnnnnnnnnnnnnnnnnnnnnnnnnnnnnnnnnnnnnnnnnnnnnnnnnnnnnnnnnnnnnnnnnnnnnnnnnnnnnnnnnnnnnnnnnnnnnnnnnnnnnnnnnnnnnnnnnnnnnnnnnnnnnnnnnnnnnnnnnnnnnnnnnnnnnnnnnnnnnnnnnnnnnnnnnnnnnnnnnnnnnnnnnnnnnnnnnnnnnnnnnnnnnnnnnnnnnnnnnnnnnnnnnnnnnnnnnnnnnnnnnnnnnnnnnnnnnnnnnnnnnnnnnnnnnnnnnnnnnnnnnnnnnnnnnnnnnnnnnnnnnnnnnnnnnnnnnnnnnnnnnnnnnnnnnnnnnnnnnnnnnnnnnnnnnnnnnnnnnnnnnnnnnnnnnnnnnnnnnnnnnnnnnnnnnnnnnnnnnnnnnnnnnnnnnnnnnnnnnnnnnnnnnnnnnnnnnnnnnnnnnnnnnnnnnnnnnnnnnnnnnnnnnnnnnnnnnnnnnnnnnnnnnnnnnnnnnnnnnnnnnnnnnnnnnnnnnnnnnnnnnnnnnnnnnnnnnnnnnnnnnnnnnnnnnnnnnnnnnnnnnnnnnnnnnnnnnnnnnnnnnnnnnnnnnnnnnnnnnnnnnnnnnnnnnnnnnnnnnnnnnnnnnnnnnnnnnnnnnnnnnnnnnnnnnnnnnnnnnnnnnnnnnnnnnnnnnnnnnnnnnnnnnnnnnnnnnnnnnnnnnnnnnnnnnnnnnnnnnnnnnnnnnnnnnnnnnnnnnnnnnnnnnnnnnnnnnnnnnnnnnnnnnnnnnnnnnnnnnnnnnnnnnnnnnnnnnnnnnnnnnnnnnnnnnnnnnnnnnnnnnnnnnnnnnnnnnnnnnnnnnnnnnnnnnnnnnnnnnnnnnnnnnnnnnnnnnnnnnnnnnnnnnnnnnnnnnnnnnnnnnnnnnnnnnnnnnnnnnnnnnnnnnnnnnnnnnnnnnnnnnnnnnnnnnnnnnnnnnnnnnnnnnnnnnnnnnnnnnnnnnnnnnnnnnnnnnnnnnnnnnnnnnnnnnnnnnnnnnnnnnnnnnnnnnnnnnnnnnnnnnnnnnnnnnnnnnnnnnnnnnnnnnnnnnnnnnnnnnnnnnnnnnnnnnnnnnnnnnnnnnnnnnnnnnnnnnnnnnnnnnnnnnnnnnnnnnnnnnnnnnnnnnnnnnnnnnnnnnnnnnnnnnnnnnnnnnnnnnnnnnnnnnnnnnnnnnnnnnnnnnnnnnnnnnnnnnnnnnnnnnnnnnnnnnnnnnnnnnnnnnnnnnnnnnnnnnnnnnnnnnnnnnnnnnnnnnnnnnnnnnnnnnnnnnnnnnnnnnnnnnnnnnnnnnnnnnnnnnnnnnnnnnnnnnnnnnnnnnnnnnnnnnnnnnnnnnnnnnnnnnnnnnnnnnnnnnnnnnnnnnnnnnnnnnnnnnnnnnnnnnnnnnnnnnnnnnnnnnnnnnnnnnnnnnnnnnnnnnnnnnnnnnnnnnnnnnnnnnnnnnnnnnnnnnnnnnnnnnnnnnnnnnnnnnnnnnnnnnnnnnnnnnnnnnnnnnnnnnnnnnnnnnnnnnnnnnnnnnnnnnnnnnnnnnnnnnnnnnnnnnnnnnnnnnnnnnnnnnnnnnnnnnnnnnnnnnnnnnnnnnnnnnnnnnnnnnnnnnnnnnnnnnnnnnnnnnnnnnnnnnnnnnnnnnnnnnnnnnnnnnnnnnnnnnnnnnnnnnnnnnnnnnnnnnnnnnnnnnnnnnnnnnnnnnnnnnnnnnnnnnnnnnnnnnnnnnnnnnnnnnnnnnnnnnnnnnnnnnnnnnnnnnnnnnnnnnnnnnnnnnnnnnnnnnnnnnnnnnnnnnnnnnnnnnnnnnnnnnnnnnnnnnnnnnnnnnnnnnnnnnnnnnnnnnnnnnnnnnnnnnnnnnnnnnnnnnnnnnnnnnnnnnnnnnnnnnnnnnnnnnnnnnnnnnnnnnnnnnnnnnnnnnnnnnnnnnnnnnnnnnnnnnnnnnnnnnnnnnnnnnnnnnnnnnnnnnnnnnnnnnnnnnnnnnnnnnnnnnnnnnnnnnnnnnnnnnnnnnnnnnnnnnnnnnnnnnnnnnnnnnnnnnnnnnnnnnnnnnnnnnnnnnnnnnnnnnnnnnnnnnnnnnnnnnnnnnnnnnnnnnnnnnnnnnnnnnnnnnnnnnnnnnnnnnnnnnnnnnnnnnnnnnnnnnnnnnnnnnnnnnnnnnnnnnnnnnnnnnnnnnnnnnnnnnnnnnnnnnnnnnnnnnnnnnnnnnnnnnnnnnnnnnnnnnnnnnnnnnnnnnnnnnnnnnnnnnnnnnnnnnnnnnnnnnnnnnnnnnnnnnnnnnnnnnnnnnnnnnnnnnnnnnnnnnnnnnnnnnnnnnnnnnnnnnnnnnnnnnnnnnnnnnnnnnnnnnnnnnnnnnnnnnnnnnnnnnnnnnnnnnnnnnnnnnnnnnnnnnnnnnnnnnnnnnnnnnnnnnnnnnnnnnnnnnnnnnnnnnnnnnnnnnnnnnnnnnnnnnnnnnnnnnnnnnnnnnnnnnnnnnnnnnnnnnnnnnnnnnnnnnnnnnnnnnnnnnnnnnnnnnnnnnnnnnnnnnnnnnnnnnnnnnnnnnnnnnnnnnnnnnnnnnnnnnnnnnnnnnnnnnnnnnnnnnnnnnnnnnnnnnnnnnnnnnnnnnnnnnnnnnnnnnnnnnnnnnnnnnnnnnnnnnnnnnnnnnnnnnnnnnnnnnnnnnnnnnnnnnnnnnnnnnnnnnnnnnnnnnnnnnnnnnnnnnnnnnnnnnnnnnnnnnnnnnnnnnnnnnnnnnnnnnnnnnnnnnnnnnnnnnnnnnnnnnnnnnnnnnnnnnnnnnnnnnnnnnnnnnnnnnnnnnnnnnnnnnnnnnnnnnnnnnnnnnnnnnnnnnnnnnnnnnnnnnnnnnnnnnnnnnnnnnnnnnnnnnnnnnnnnnnnnnnnnnnnnnnnnnnnnnnnnnnnnnnnnnnnnnnnnnnnnnnnnnnnnnnnnnnnnnnnnnnnnnnnnnnnnnnnnnnnnnnnnnnnnnnnnnnnnnnnnnnnnnnnnnnnnnnnnnnnnnnnnnnnnnnnnnnnnnnnnnnnnnnnnnnnnnnnnnnnnnnnnnnnnnnnnnnnnnnnnnnnnnnnnnnnnnnnnnnnnnnnnnnnnnnnnnnnnnnnnnnnnnnnnnnnnnnnnnnnnnnnnnnnnnnnnnnnnnnnnnnnnnnnnnnnnnnnnnnnnnnnnnnnnnnnnnnnnnnnnnnnnnnnnnnnnnnnnnnnnnnnnnnnnnnnnnnnnnnnnnnnnnnnnnnnnnnnnnnnnnnnnnnnnnnnnnnnnnnnnnnnnnnnnnnnnnnnnnnnnnnnnnnnnnnnnnnnnnnnnnnnnnnnnnnnnnnnnnnnnnnnnnnnnnnnnnnnnnnnnnnnnnnnnnnnnnnnnnnnnnnnnnnnnnnnnnnnnnnnnnnnnnnnnnnnnnnnnnnnnnnnnnnnnnnnnnnnnnnnnnnnnnnnnnnnnnnnnnnnnnnnnnnnnnnnnnnnnnnnnnnnnnnnnnnnnnnnnnnnnnnnnnnnnnnnnnnnnnnnnnnnnnnnnnnnnnnnnnnnnnnnnnnnnnnnnnnnnnnnnnnnnnnnnnnnnnnnnnnnnnnnnnnnnnnnnnnnnnnnnnnnnnnnnnnnnnnnnnnnnnnnnnnnnnnnnnnnnnnnnnnnnnnnnnnnnnnnnnnnnnnnnnnnnnnnnnnnnnnnnnnnnnnnnnnnnnnnnnnnnnnnnnnnnnnnnnnnnnnnnnnnnnnnnnnnnnnnnnnnnnnnnnnnnnnnnnnnnnnnnnnnnnnnnnnnnnnnnnnnnnnnnnnnnnnnnnnnnnnnnnnnnnnnnnnnnnnnnnnnnnnnnnnnnnnnnnnnnnnnnnnnnnnnnnnnnnnnnnnnnnnnnnnnnnnnnnnnnnnnnnnnnnnnnnnnnnnnnnnnnnnnnnnnnnnnnnnnnnnnnnnnnnnnnnnnnnnnnnnnnnnnnnnnnnnnnnnnnnnnnnnnnnnnnnnnnnnnnnnnnnnnnnnnnnnnnnnnnnnnnnnnnnnnnnnnnnnnnnnnnnnnnnnnnnnnnnnnnnnnnnnnnnnnnnnnnnnnnnnnnnnnnnnnnnnnnnnnnnnnnnnnnnnnnnnnnnnnnnnnnnnnnnnnnnnnnnnnnnnnnnnnnnnnnnnnnnnnnnnnnnnnnnnnnnnnnnnnnnnnnnnnnnnnnnnnnnnnnnnnnnnnnnnnnnnnnnnnnnnnnnnnnnnnnnnnnnnnnnnnnnnnnnnnnnnnnnnnnnnnnnnnnnnnnnnnnnnnnnnnnnnnnnnnnnnnnnnnnnnnnnnnnnnnnnnnnnnnnnnnnnnnnnnnnnnnnnnnnnnnnnnnnnnnnnnnnnnnnnnnnnnnnnnnnnnnnnnnnnnnnnnnnnnnnnnnnnnnnnnnnnnnnnnnnnnnnnnnnnnnnnnnnnnnnnnnnnnnnnnnnnnnnnnnnnnnnnnnnnnnnnnnnnnnnnnnnnnnnnnnnnnnnnnnnnnnnnnnnnnnnnnnnnnnnnnnnnnnnnnnnnnnnnnnnnnnnnnnnnnnnnnnnnnnnnnnnnnnnnnnnnnnnnnnnnnnnnnnnnnnnnnnnnnnnnnnnnnnnnnnnnnnnnnnnnnnnnnnnnnnnnnnnnnnnnnnnnnnnnnnnnnnnnnnnnnnnnnnnnnnnnnnnnnnnnnnnnnnnnnnnnnnnnnnnnnnnnnnnnnnnnnnnnnnnnnnnnnnnnnnnnnnnnnnnnnnnnnnnnnnnnnnnnnnnnnnnnnnnnnnnnnnnnnnnnnnnnnnnnnnnnnnnnnnnnnnnnnnnnnnnnnnnnnnnnnnnnnnnnnnnnnnnnnnnnnnnnnnnnnnnnnnnnnnnnnnnnnnnnnnnnnnnnnnnnnnnnnnnnnnnnnnnnnnnnnnnnnnnnnnnnnnnnnnnnnnnnnnnnnnnnnnnnnnnnnnnnnnnnnnnnnnnnnnnnnnnnnnnnnnnnnnnnnnnnnnnnnnnnnnnnnnnnnnnnnnnnnnnnnnnnnnnnnnnnnnnnnnnnnnnnnnnnnnnnnnnnnnnnnnnnnnnnnnnnnnnnnnnnnnnnnnnnnnnnnnnnnnnnnnnnnnnnnnnnnnnnnnnnnnnnnnnnnnnnnnnnnnnnnnnnnnnnnnnnnnnnnnnnnnnnnnnnnnnnnnnnnnnnnnnnnnnnnnnnnnnnnnnnnnnnnnnnnnnnnnnnnnnnnnnnnnnnnnnnnnnnnnnnnnnnnnnnnnnnnnnnnnnnnnnnnnnnnnnnnnnnnnnnnnnnnnnnnnnnnnnnnnnnnnnnnnnnnnnnnnnnnnnnnnnnnnnnnnnnnnnnnnnnnnnnnnnnnnnnnnnnnnnnnnnnnnnnnnnnnnnnnnnnnnnnnnnnnnnnnnnnnnnnnnnnnnnnnnnnnnnnnnnnnnnnnnnnnnnnnnnnnnnnnnnnnnnnnnnnnnnnnnnnnnnnnnnnnnnnnnnnnnnnnnnnnnnnnnnnnnnnnnnnnnnnnnnnnnnnnnnnnnnnnnnnnnnnnnnnnnnnnnnnnnnnnnnnnnnnnnnnnnnnnnnnnnnnnnnnnnnnnnnnnnnnnnnnnnnnnnnnnnnnnnnnnnnnnnnnnnnnnnnnnnnnnnnnnnnnnnnnnnnnnnnnnnnnnnnnnnnnnnnnnnnnnnnnnnnnnnnnnnnnnnnnnnnnnnnnnnnnnnnnnnnnnnnnnnnnnnnnnnnnnnnnnnnnnnnnnnnnnnnnnnnnnnnnnnnnnnnnnnnnnnnnnnnnnnnnnnnnnnnnnnnnnnnnnnnnnnnnnnnnnnnnnnnnnnnnnnnnnnnnnnnnnnnnnnnnnnnnnnnnnnnnnnnnnnnnnnnnnnnnnnnnnnnnnnnnnnnnnnnnnnnnnnnnnnnnnnnnnnnnnnnnnnnnnnnnnnnnnnnnnnnnnnnnnnnnnnnnnnnnnnnnnnnnnnnnnnnnnnnnnnnnnnnnnnnnnnnnnnnnnnnnnnnnnnnnnnnnnnnnnnnnnnnnnnnnnnnnnnnnnnnnnnnnnnnnnnnnnnnnnnnnnnnnnnnnnnnnnnnnnnnnnnnnnnnnnnnnnnnnnnnnnnnnnnnnnnnnnnnnnnnnnnnnnnnnnnnnnnnnnnnnnnnnnnnnnnnnnnnnnnnnnnnnnnnnnnnnnnnnnnnnnnnnnnnnnnnnnnnnnnnnnnnnnnnnnnnnnnnnnnnnnnnnnnnnnnnnnnnnnnnnnnnnnnnnnnnnnnnnnnnnnnnnnnnnnnnnnnnnnnnnnnnnnnnnnnnnnnnnnnnnnnnnnnnnnnnnnnnnnnnnnnnnnnnnnnnnnnnnnnnnnnnnnnnnnnnnnnnnnnnnnnnnnnnnnnnnnnnnnnnnnnnnnnnnnnnnnnnnnnnnnnnnnnnnnnnnnnnnnnnnnnnnnnnnnnnnnnnnnnnnnnnnnnnnnnnnnnnnnnnnnnnnnnnnnnnnnnnnnnnnnnnnnnnnnnnnnnnnnnnnnnnnnnnnnnnnnnnnnnnnnnnnnnnnnnnnnnnnnnnnnnnnnnnnnnnnnnnnnnnnnnnnnnnnnnnnnnnnnnnnnnnnnnnnnnnnnnnnnnnnnnnnnnnnnnnnnnnnnnnnnnnnnnnnnnnnnnnnnnnnnnnnnnnnnnnnnnnnnnnnnnnnnnnnnnnnnnnnnnnnnnnnnnnnnnnnnnnnnnnnnnnnnnnnnnnnnnnnnnnnnnnnnnnnnnnnnnnnnnnnnnnnnnnnnnnnnnnnnnnnnnnnnnnnnnnnnnnnnnnnnnnnnnnnnnnnnnnnnnnnnnnnnnnnnnnnnnnnnnnnnnnnnnnnnnnnnnnnnnnnnnnnnnnnnnnnnnnnnnnnnnnnnnnnnnnnnnnnnnnnnnnnnnnnnnnnnnnnnnnnnnnnnnnnnnnnnnnnnnnnnnnnnnnnnnnnnnnnnnnnnnnnnnnnnnnnnnnnnnnnnnnnnnnnnnnnnnnnnnnnnnnnnnnnnnnnnnnnnnnnnnnnnnnnnnnnnnnnnnnnnnnnnnnnnnnnnnnnnnnnnnnnnnnnnnnnnnnnnnnnnnnnnnnnnnnnnnnnnnnnnnnnnnnnnnnnnnnnnnnnnnnnnnnnnnnnnnnnnnnnnnnnnnnnnnnnnnnnnnnnnnnnnnnnnnnnnnnnnnnnnnnnnnnnnnnnnnnnnnnnnnnnnnnnnnnnnnnnnnnnnnnnnnnnnnnnnnnnnnnnnnnnnnnnnnnnnnnnnnnnnnnnnnnnnnnnnnnnnnnnnnnnnnnnnnnnnnnnnnnnnnnnnnnnnnnnnnnnnnnnnnnnnnnnnnnnnnnnnnnnnnnnnnnnnnnnnnnnnnnnnnnnnnnnnnnnnnnnnnnnnnnnnnnnnnnnnnnnnnnnnnnnnnnnnnnnnnnnnnnnnnnnnnnnnnnnnnnnnnnnnnnnnnnnnnnnnnnnnnnnnnnnnnnnnnnnnnnnnnnnnnnnnnnnnnnnnnnnnnnnnnnnnnnnnnnnnnnnnnnnnnnnnnnnnnnnnnnnnnnnnnnnnnnnnnnnnnnnnnnnnnnnnnnnnnnnnnnnnnnnnnnnnnnnnnnnnnnnnnnnnnnnnnnnnnnnnnnnnnnnnnnnnnnnnnnnnnnnnnnnnnnnnnnnnnnnnnnnnnnnnnnnnnnnnnnnnnnnnnnnnnnnnnnnnnnnnnnnnnnnnnnnnnnnnnnnnnnnnnnnnnnnnnnnnnnnnnnnnnnnnnnnnnnnnnnnnnnnnnnnnnnnnnnnnnnnnnnnnnnnnnnnnnnnnnnnnnnnnnnnnnnnnnnnnnnnnnnnnnnnnnnnnnnnnnnnnnnnnnnnnnnnnnnnnnnnnnnnnnnnnnnnnnnnnnnnnnnnnnnnnnnnnnnnnnnnnnnnnnnnnnnnnnnnnnnnnnnnnnnnnnnnnnnnnnnnnnnnnnnnnnnnnnnnnnnnnnnnnnnnnnnnnnnnnnnnnnnnnnnnnnnnnnnnnnnnnnnnnnnnnnnnnnnnnnnnnnnnnnnnnnnnnnnnnnnnnnnnnnnnnnnnnnnnnnnnnnnnnnnnnnnnnnnnnnnnnnnnnnnnnnnnnnnnnnnnnnnnnnnnnnnnnnnnnnnnnnnnnnnnnnnnnnnnnnnnnnnnnnnnnnnnnnnnnnnnnnnnnnnnnnnnnnnnnnnnnnnnnnnnnnnnnnnnnnnnnnnnnnnnnnnnnnnnnnnnnnnnnnnnnnnnnnnnnnnnnnnnnnnnnnnnnnnnnnnnnnnnnnnnnnnnnnnnnnnnnnnnnnnnnnnnnnnnnnnnnnnnnnnnnnnnnnnnnnnnnnnnnnnnnnnnnnnnnnnnnnnnnnnnnnnnnnnnnnnnnnnnnnnnnnnnnnnnnnnnnnnnnnnnnnnnnnnnnnnnnnnnnnnnnnnnnnnnnnnnnnnnnnnnnnnnnnnnnnnnnnnnnnnnnnnnnnnnnnnnnnnnnnnnnnnnnnnnnnnnnnnnnnnnnnnnnnnnnnnnnnnnnnnnnnnnnnnnnnnnnnnnnnnnnnnnnnnnnnnnnnnnnnnnnnnnnnnnnnnnnnnnnnnnnnnnnnnnnnnnnnnnnnnnnnnnnnnnnnnnnnnnnnnnnnnnnnnnnnnnnnnnnnnnnnnnnnnnnnnnnnnnnnnnnnnnnnnnnnnnnnnnnnnnnnnnnnnnnnnnnnnnnnnnnnnnnnnnnnncattgcagagcgactttgtgattgaggcggcgctactgcagggccagccgctgcacgcggccttagagcgcataagcaccacccgttcacagtcggttgaggccgagcaaaaggctgctgcgcgggtcatgcttgagatattggccgaaccggtgggctacgcatccgtcgggcttgatgatgatggcaatgcgcggctacaccacgccctgccaggtcgcttattaaagaaaattagcaatcgcggtagcacggtgtttctttctgcaacgctgacccacaacgataagtttgatgacttcaagatcgccatgggcctagacgcggtgagtagcctgtcaacaagcattgagccagaacagcatggcacgctcgacttcaccgtacacgcgcacgaggtggacacgcctgactggtttgcggccaccgttcagtgcatacaaagcgcgcagcgccccacgttggtggtcacacctagccatgacctcacagagcggctacaaaccgccgtgggtgagcaagcagacttgcttatacgtgcgggtgcatgggcgggtcttgacacgccaacgcgctggcgtaccgtggttattccgcgcgtgccatttggcgcaccagtcattgttgacggggtggcggtcacgtcttacttggccgccaaggtgacggccagtcggcggatgcgccaagcaattggccgtgggcttagaacacctgaggcggtgtgcacggttgtggttttggatgcgcgggcacacaacttaggtcgctttgtgccagagcgttttgcggcagattggtcgtctcggcaagtgtttgacgagggtgcccgccatgcggtggtgctgtccaaagcggagcgcgaccccgctttggccaaagccgcgctcagacactacggcgctcaatgccaacaagcgggttgttccgtgacagaggcgtgtcagctggacgtgcaccaccttgaccccgtaagcgaaggcgtgcgccgcacaaccttgaaggatgtgaccgtgctgtgtgcaaaccaccaccgacaggcccaccacgacatgaaaatggggctgaacgtgtcgtagcgcaacaaaaaacccgccatacctttgggtacgcgggttttgggagttctggcaaggcctgaaacctaaatgtggtggtgataggtggacttgaaccaccgaccccagcattatgaatgctgtgctctaaccaactgagctatatcaccgagcctgaaattatagccaaaattctcagggctttggcttgccgccaaaagtttttgttagccattttgtcgcgcctgtacgacgcgccaagcccttggttattggtgtttgaaggcgggtttgcgcttgtttatgaacgcatccatgccctctttttggtcttcggttgcaaacagcgcgtggaacagacggcgctcaaaacgcacgccttcgctgaggctgccttcaaacgcttggttcaccgcttcctttgccgccatgacactggggagggagtagttgcaaatcatcagggctgcgcccaaggcctcggtcatgagttggtcatcggcgaccacgcggctcaccagtccgccgcgctcggcttctgcagcgtccatcatgcggcctgtgagggccatgtccatggccttggctttgccaacggcgcgtggcaggcgctgcgtgccacctgcgccagggataacgcccaacttgatttcgggttggccaaatttggcgctctcgctggcaatgatgacgtcgcacatcatggccaattcacaaccgccgccgagggcaaagccgctgacggcggcaataacgggcttgcgaacgctgcgaatggtttcccagttgcgcgtgatgtagtctgacttgtagacgtcagcaaaggtgtaggtggccatggcgccaatgtcggcacccgcggcaaaggctttttcactgcctgtgagcacaatgcagccaatgtccgggtcggcgtcgaatgcggttagcgccgcgccaagctcgtccattagcgcactgttgagggcattgagttgtttggggcggtttagggtgagtatgcccacgcggccttcggtgcggattaaaaccagttgctcactcatgtctgtgttctccaatgtggtgcgaaaagttgcttagaaaaagttgtttcgaaagttgcttcgacgtaagcggttgatcatagccaagcggtgagcttgctagggtctttcaccaccagttcggcgatctggttggcgtgggtcgatggccagatgagggggcacgacaacatgcggccatcgcgcgcgacaccggcaaccaatgggtgctgggctacgtcggcgtggcgtctcgcaatgntctccacatcgctcagtgacttnacccgccattgatcggtgccntcaaatagngtcacccattcgtcacccgccgccatgcccgcttgttcgcctgcaccgcctcttgccacgtgggtgatgcggatgccgtctcgctcaacgacacgcatgcccaagcgctgggcgagggtgccgctcttggccgccacggcgacaccgtaatgactaagcagtgcgtgtaccggcaggtcttccgtgctgtgtacccagtgcgcgagttgtgtggcgacgttggcgtgcccttgctggttgagcagggcgtagatgtcggcctcactgatggtgccgcctttgcttttgacccataggccgcgcatgagggtgtcgagatcgccgccttgttggcgcagcatgaggtcggtgcacagcgctattagcgcccctttggtgtagtagctaacggtggcgttgggcgtgttttcgccaatgcggtagtacttgacccacgcgtcatagctagactgggcaacgctttgcagatgccgccctggggtggccgcaacgtggttaatggatttggccagtagcgtgagataggtggccgtatcaatgagtttggcgcgttgcagaaacaggtcatcgtagtagctggtaaagccttcaaagaaccacagcagctcggtgtagttctcttggttgaagtcgatgcttgcaaactcggatgggcgcaggcgcttgacgttccatgtgtgaaagtactcatggctaatgaggccaagtaattggttgtagccagcgccttgtgcatgggggggcgctgcctcgccagcgacggccgttaggggcaagtcggcacgctggcaaatgagtgcggtgctggcgatgtgctctagcccgccgtagccgttttcagtggcgtgaagcatgaagacgtagcggtcaaagggtagttggcgttgcggttgtttgccgtgccaaaacgtgatctctgtttcgcaaattcggcgggtgtcggcaactaattttttgacatcaaacccgggcgcggtgtggttgccaatgcccgtgacaacgagttcatgcggtacgccagagaccttaaaccggctgacgtaaaaatcacccaaggtaaagggactgtcggcgagctcgccgcagttgcgggcggtgtagcgcccgaagccacgcgcgtcgatttgccgcgcgggcaatgcggtagacagccgccacgcattgaacgcgggcgcggtggggcgctcgacggagatggtttgtatctcgtcttcgcccccgaccacttgcaaacacaggctggtggggttgaagaagccgcgggtgttgtccaaaaaggcggttcgcaccgaggcgtcaaaggcgtagatttggtaattgagctccagcgggcgtttgccgtcggattccactagccactcatttttactgcactgcgtgatttggcaaggcgtgcggccttgcttggctgtcagcgcttgcaggtgttgcgaaaattcacgcaccaaataactacccgcaatccaaacgggtagacgcaggcgctgttgcttttttgggcttgagatgcgcagatgcacaccgaacaggtgcgcttccgcgctgtcaacgcgaatgttgtgatcgatgcgcatggtgttacttgatggcggccagacgcttctcaacttcggcggcagaaatggcgccggggacacgtgtgccgtctgagaagaaaagggcaggcgtgcccgagatacggtgcttttgaccaaacgcgatgttgcggtcaagcgcgctggtgtcgcagctgatggcggcggcgctggtggttagagggacttcattcaccatccagtcttcaaaggctacgccggggtttttgtcgcaccaaatggccttggacttgagcgttgaatccgcgccgagtatggggtacaaaaagatatgcagggtgatgttgtcgacattcatcatgtcacgttcaaagcgcttgcagaagccacagttggggtcttcaaaaaccgcgagttgacgcttgccgttaccgcgtttgatggtgaaggcatctttaaagggcagggcctcaaagggtattgcgctcaatttatcgaggcgctcctgcgtcaggttgcgtttgcccttgaggtcaacgagtacgccttgcagcaaaaattcaccgttggcatcggtgtacaaaatttcggtttcaccaaagcgaacttcgtagaggccggccatgggggtcttggtgacgctgttgatagcgggtaagttgggtagttgcttgggtagcatctcgcgaatcttggcttcctgtgcccagcccatgcttgccatgagggtgaatgcgatgcccacggccaagccgcgcaataaagagcgtgtgggggtgggtgcgagaggtgacgtgtggtgaagcatggtgtggttcgctaggtaggcgttgtttgggggtaagagggtgggtgggttggttcgtgggagggggctgttgggtagcggatgctcgctgttggagcaccatcgtggcaatcagttccccatgccaacacgctgtacccacgacttgagtgggcccatggcattaaagcccgacatgcctgcattgcgtagccaactggcggcggggttgcggcccaaggggttgttgaacaagtgaaagagtccgtgcgtgacccattgcatgggttcggtggcggcgcgtcgacgccgttggtagcgctgaagcacgcgtgaggcacccggagactcacctcgggcgcgtgccgcaacgcagtcactgagcgtttgtacgtcggccaagccaaggttgagaccttgccctgcgagggggtggatggtgtgcgccgcatcgccggctaacgcggtctgctgggcaacccattgcgtggttaagccgacgctcaaggggaaggcaacaggcccgctggtaagggagaggtgccctagcgcgccctgactggcttgggtgagttggtcttctagggcggcggtttgggcggtggtctccatgtccagccacgtctggtgcgcagcgtctggtagcgaccagacaacggccaggtcgtgcccgtcagcgccgcccatgggcagcagggccaaaatatgtgtgccgttaaaccactggtgggcgacgccgccgtggctgtgctcggcgcgcatgcgcaacgccaaggcacggtgggggtagtgcttacttaccatgtcaatacccaaggcggtgcgcgcgataccgctcttgccttcgcaaatgatggtcaatgcgctaggcggtgtctgggctgatggtgacgcgtggtcgtcaaattgcacgcgtgcatggcgtgtgacggcttcggcaagatggtcctccaggacaggcacatcgaccatccacgccaagggttgcgcttgctgcgggggtgcgtcgaattgcagcgcgcctgacgcatcgccaaacacccgcatatgggtcatgggggtcagccacgcggcctgatcgtcttgaggccagacaccgcatgctttgagggtgtctctcgaggtgtggttgatggcgtaggcgcgaatgtcgcgggtgtgcggtggcgcttggggcgcgggcaggctgacggaaaagccttgctctgccaataacaatgccgccgcgtgcgcggtgatgccagcgcctaaaacggtgatgtgccctgattgagtcatggcgttattctattgggacacccacttggggggccagcgatgaccctgccccggaagtgccttaaactctgggtcttgctttttgaggattgtcatgagtttgaaatgcggcatcgttggtctgcccaacgtcggtaaatctaccctgtttaatgcgcttaccaaggctggtatcgccgctgagaactaccctttttgcaccatcgagcccaacgttggcgtggtggaggtgcccgacacccgcctagcgcagctcagcgatatcgtgacgcctgagcgcattgttcctgcgattgttgaatttgtggatattgccggcttggtggcaggtgccagtacgggcgagggcttgggtaacaagtttttggcccatatccgcgaaaccgatgccacggttaacgttgtgcgttgttttgaagatgacaacgtggtgcacgtcgcgggcaaggtggatccgatttctgacattgaggtgattcaaacggagttgtgccttgccgacttaggcgcagtagagaaagccctgcaccgggtctccaagaccgcgcgttctggcgacaaagagtcggtgcgcttggtgtcgattttggagcgctgtcaggcggccttaaacgaaggcaagcccgttcgcacgctagatttcagcaaagaagaagcgccgctgcttaagcagtttttcttgattacggccaagccagcgatgttcgttgcgaacgtgtctgaggatggctttgagaacaaccccctgcttgaccgcttgaccgcctttgccaacgagcagaacgcgcctgtggtggcgatctgcgccaagctagaggccgagatgagcgagatgagcgacgaggaccgcgatatgttcctggaagagctggggcagtccgagccgggcttaaaccgtctgatccgtgccgcctacagtttgttgggtttgcagacctacttcactgcgggtgtaaaagaggtgcgcgcttggactatccacgttggggatacggggccgcaggcggccggtgtgatccacactgatttcgaaaagggctacattcgcgcccaaaccattgcctttgatgacttcattgcattcaagggcgagcagggcgctaaggacgcgggcaagatgcgcgcagaaggcaaggagtatgtcgtgaaagacggcgatgtactcaacttcttgttcagctcataagccactgcgcactcgcggcaatggcaaggtagcgggcgaacttgccaatggccatgtacaccgcgcaggccagccagggcattcttagccagcctgcgagggtgcacaccacatcgccgaccacgggtagccaagccagcaaacacgccttgggtccgagtttttccagttgagccaaagcccacgcggcgagcctgccagccgttggggtggcctgagcatccgcgcgtcggtgcgggtgcgcacggttttggtaggcgcggtgcgctgattgcaggccaacgcccatcagccaactcaccatgccacccaaggtgttgcctaccgtcgctagtaacaaggcgggccaaaatagatggggtgagatggcgatgagacccattaatgccgcctccgaccccatgggaagccacgtcgcggagacgaatgccgtgacaaaaacggtagtcaacccccattcgggcagactgaaccagtgaagtaagctcgcaaaaaaggcatccattggcttgagtataggtacaatcatgcttaaattttcagcaagcaccgacgcgtcaatcggtgcttttttgtctctaactgccgtccaacgtgcatatcggtccctaccacctccgcaataacctgttcgtcgcgcctatggctggcgtgacagaccgcccgtttcgccagttgtgtaagcaactgggcgcgggctatgccgtgagcgaaatggtgacatcgcggcgcgatttgtgggactcgcttaaaacctcacgccgtgcaaatcacgccggtgagagcgggcccattgcggttcaaattgcggggaccgacgcccagatgatggccgatgccgcggtgtacaacattgaccgtggcgcacaaattattgatatcaacatggggtgccccgcaaaaaaggtgtgcaacaagtgggccggttctgcgttgatgcaagacgagaccttggcgatcgccattgtcgaagcggtggtgaacgcctgcgcctctaagggtgtccctgtgacattgaagatgcggacgggttgggcggcgcatgcgaagaatgccacgcggttggcgctggcggcggagcaagtgggggtgcagatgttgacgattcacggtcgcacgcgcgagcaaggctataagggttttgcagagcatgagacggtggcggacattaagtcgcgggtgcgtattcccgtggtggccaatggggatattgcatcgcccgaggcggcgcaacgtgtgttgcaagccacgggggccgatgcggtgatggtgggacgcgccgcgcaagggcgcccatggatatttagtgagatcgctcattttttagccaccggacgccacgcgccaccgcccaccgctgtggatatgcgggcgtggatggtggagcacctgcacgcgcactacgcgctttacggcgaatttacaggcgttcggtctgcgcgcaagcaccttggttggtatgcgcaacacttgcccatgggtgagcttttgcgtcagcgcatcaatgccttaaccgattgcgcggagcagttggctgcagtcgaggcgtatttcgcagcgtgggacagtgatgatctggccgcgcttggtcgggcatggcaaccgacacagataccgggcagcgcgcagagccagtctgtgcgagagatgcctgtcgacatgacattggccccccttcattgagcgttatatgagccgtaaagacattgaaaagggcgtgcgtgaaagcatgcaaacctacttccaagacctcgccggtagcgagccacatggcctgtacgacatgatggttgatgttgtggagaagcccttgctggaggtggtgatggcgcaagcaggcaataaccagtctcgcgcggcgcagtggcttggtctcaatcgcaacaccttgcgcaaaaaattacttcatcacaagttactcagttaacgctgcaaacgcggcggcctaactcgtcatttccccctttatttttcacgactaccaagcaccatgaacgcactcttatctgtatccgacaaaaccggcattgtggcccttgcgcgcgcgctccacgcccaaggcattggcctgctgtctactggcggcacggccaagctgttggcggaagagggcctgcccgttaccgaggtggccgatatgaccggctttccagaaatgctcgatggtcgcgtcaaaaccttgcaccccaaggtgcacggcggcttgttggctagacgtgacgtgccagcgcacatggcggcgttggccgctcacgggatcgataccattgacgtgttggttgtgaacctctacccctttgaggcgacggtggccaaagcgggttgcaccttggaagaggccattgagaacatcgatattggcggccccgcgatggtgcgtagtgccgccaaaaactggaaggacgtcgcggttttaacggatgccagccaatacgagaccgtcattgccgagctcgccgctaacggcgcggtgtctaccccgacgaagtttgcgctgtccgtggcggcgtttaaccgcatcagcaattacgatgcggcgatcagcgactacctgtcggcgtatcagttggagagcgataccttgcaagcgttccctgcacaggcgaacggacgttttgtgaagttgcaagacctgcgttacggcgagaatccgcaccaatcagcagcgttttaccgtgacctacaccccgcgcccggctcgctggtaacggcgaaacagttgcaaggtaaggagctgtcctataacaacatcgccgatgcggatgcggcatgggagtgcgtgaaaagctttgacgtgcccgcctgtgtgatcgtgaagcacgccaacccctgcggtgtggcgttggccgaggatgcgttgggcgcctataccaaggcgtttcaaaccgaccccacatcggcctttggcggcatcatcgcgctcaacgttgtggtggatgaagcggctgccaaggccattagccagcagtttgtcgaggtgctgatggcgcccgcttataccgagggtgccttggcggtatttcaagccaaagccaatgtgcgcgttttgcaaattacgctgcctgcggcgggtggacagacggcgtgggagcgtgggcgcaacgtgcaagacataaagcgcgtggggtctggtttgttgattcaaacgcagacaaccatgacctgagtttggccgacctcaaagtggtgtccaaagtgcagccgaccgaggcgcagttgcaagacctcttgtttgcgtggaaggtggccacgtatgtgaagtcgaacgcgattgttttctgtaaagaccgcatgaccgtcggcgttggtgcggggcaaatgagccgtttagattcagcgcgaatcgcgcgtatcaaggccgaccatgccggtttgtcattggcgcagtcggtggtcgctagtgatgcgttcttccctttccgagacggtctcgatgtggtggtggaggcgggcgcgactgcggttattcatcccggtggttccatgcgtgatcaagaggtgattgatgcggcggatgagcatggcgtcgcgatggtgtttacgggcgtgcgccacttccgtcactaagccgttgcgggtgttgcttgcgtggccatgttgacctggttggatatctcgcagacggcgagcgatgacgactgggtgaccttagaggtctgcgcgtctgtgacccgtgctgaccagcatcgcgtcgatgctgcggtctgtgagttgcttggttatttgtacgcgcgctgtggccgtcccagcgaagaccccgacgtgccgcccggcccacagtcgtggctgatcgatgtgcaggcgtatgccgagtcggcagccaaagcgccgctggccgtcgccttggattggcgcgacgacgccacggtgtctctgcaatggggcacagcgggagccgctgacgcgaccacggaagacacccggcgaacccttctcattagtttgggcttgtcacccgcgttagcgttcgcttgcgatgaggcattcgaactggggctctagctgacgccccctaacgcggtgtatgccccgctcgtgggactacagggttgcaaatgtccgctttgccgcggcgatggtgtcgtcaatgtcttgcgcggtgtgcgcggcgctcacaaagccagcctcaaatagcgcgggcgcaaagtaaacaccttggtccaacatgccgtggaagaagcggttaaacaccgcgccgtctgtggtcatgaccttggcgtagttttgtggcaactcagggaagaagaagaagccaaacatgcccccttcgctgtcgccacaaaacgggatacccgcgtccttggctgcggcggtcatgccgctgacgagttgttgggtgcgttgattcagttgggtgaaaaagccgtccttttgaatctcttttaaggttgccaaaccgcaggcggtggcgacggggttgcctgacaaggtgcccgcttggtagaccgcgccaagtggtgcgaggtgggacatgacttcgcgcttaccgccgaacgcggctaacggcatgccgccgccaatgactttgcccatcacggtcatgtcaggctcaaagcccggaatttctttggcgtacaagctctgagcgcttcccagtgccacgcggaaaccacacatcacttcatcaaatgcgagtagcgctccgtgggcagtgcagagttcgcgacagcgttttacaaatggcacgctggcccgcacgaagttcatgttgccagcaatgggctccatcatcaaacaggcgacttcatcgccgtgttccttaaaggcggcctctagcgcttccacgtcattgaagggcagtactaaagtgtgttgcacaacctctggcgggacgcctgcgctggtggggttaccaaacgtggcgaggccagagccggccttaaccaacagggcatcggcgtggccgtggtagcagccttcaaacttaatgattttgctgcgtcccgtggcgccccgagccagtcgaatggcgctcatgccggcctcggtgcctgagctgaccagtctcaccatttcaatggatggaaccagcttgatgatttcttcggccagttctatttcgcgttcagtcggtgcaccaaatgacagcccttgctctgcagcgctcagcaccgcggcgtgtacggcggggtggcggtgccccaagatcatcgggccccaagagccaatgtagtcaatgtagcgctgatcttctgcgtcccaaaaataggcgccatcgccccgcgtgatgaagcggggtgttccgccgacggctttgaaggcgcgtacgggtgagttaaccccacccggaatggctagcttggcgcgtgtaaataattggtcgtttttgttcatgatgtgtttccggttacgttgcacggttcagtgtttggtgtcgtctagcgggaagtcgcctaacgtgtggtgaccgacatccagcgtcggtgtgtcgggggcgtcgagatcctcggtatcgtctatgccgtcatcttcgccgcgtccccaaaacaagcggtcgggtaaggcgtgtcccatgccgggtgcaaagcctgcatccagactctggtcgagataggtcagcgcttctgcgcaggcggactgcaagtcttcgcctgcacccagcagggccgtgagggcggctgacagggtttcaccagcgccggtgaaggtggtgtcaaaccgctcgaagcgtgcggtggccaacacggtctcaggggacgctaggtggttttctaagaattgttcaggtgcatttaacccggtgaccaaggtgtaactcacaccgtgtagctgcgcggcgcgagctacgtcgcgcggtgtggggggcttttcgctcgcccagtcgggtaataaccagcgacacaaggtgctgtagttgcccacgagcacggcggtttgcgggagcattaattcggtgaatgcgtctaagtaggcatctagagcgatatcgtccatccacgtcaaactgggcatataggcaacgacgggggtgtccgcgtagtcgttggcaatttgcgccactgcgctgatgttttccggactgcccaaaaagccgactttgatactggtcacggggatgtcttcgagcaccatgcgggcttggtcgttgatggcatcagcgtccagcgagacgtggtcttggacggcggtggtgtctcggatgagcaccgcggtgaccacgggcaacatgtgcacagaggcggaacccatggcgccgatgtcagcggccaaaccgccagcacccgttgggtcattggcattgaacgacagcacgcacggcagcgttagctggtgcgcggtcgtgctcgtgtcccgtttgctgggctgcttgggcggcgaatctaaagcatcggtcatgggtttgctcgttgaggggctgtctcagttccttcgggggtatgcttctgcaccgatacaatgtgatcattctatgacacggttttaaaaaaatgagcgactcaacgacttggatgtgcctgatctgcggctggatgtacaacgaagccgagggcgcgccagcggacggcattgccgcaggcaccaaatgggcagatgtccccatgaactggacctgtcccgagtgcggcgcgcgcaaggaagattttgaaatggttcaaatctaattctcgcgcatggcgcccttcagggcttgggcttcttcacgacggcgtagcgagccaacgttcgctcgcgggcggcggcatggtcgacgatgggtttagggtagttctcccctaaggtaacgccggcggtgatgaggtcgaaggggtcagctagccaaggggcgtgtatgcgtttgtccgacagctcagcgagaaccggtaagtagcggcgaataaacttgccctgcgcgtcaaacttctcgctctgtgtcgtgggattaaaaatccgaaagtacggttgcgcatcacacccgctagaactggcccattgccatcccccgttgttggcagacaggtcaaagtcgatgagcttttccgcgaagtagtcagccccccagcgccagtctatgcctaagtctttggtgaggaagctggcaacgaccatgcgtaagcggttgtgcatgtaaccggtttggttgagttggtgcatcgcagcatccaccagtgggtagcccgttgcgccttggcaccacgcgtgaaagagggccttggcgctggcgccgtgttcccacttgatggcgtcgtattcaggcttgaatgcgcgatcgacgatgcgtgggtggtggtgcatcacctgcatataaaaatcacgccaaattaactcccctagccaggtgctggcacccacatggccttggctatgaccggcgaaggcatgttgggcgagggtgcgaatagacacggttccaaagcgcaggtgaacgcttaggtagctggggcccttgacggcagggaagtcacgcgtgtccttgtagcgggccatgcggggcaagaagtcggccaacaaggccgcagcgccagacgcgcccggcgtgatattttgtgccacgaggtcgacaggcgtaaaccccatactggttagtgagggcatgtcgcccagtgccttgaggtctgagggcagggcatcggtttgggccagggcggttgcgtaacgctcggtggggtaggcctttaggtagtagggctctagcttcttgagccaggcgtttttgtagggcgtgaagacgccaaaggggcgcgattgttgcgtgaggacctcgctacgctcgaaaatgcattggtctttgtaggtgttgagcaggatgccgttgtgcgcaaggtgcccaaaaatagcggcgtctctcgccagtgcctgtggctcatcgtcgtggttggcaaataccgcatccacgcccaaggctttcgccgtgcgcggtatcgctcgctcgctctggtcgtggaggcatagcacgggctgggcattggcgccggctaccgcgcgtagctgggtgttgaggtccaccaagctgctgtggataaaggcgacgcgccgatcggttgtgggcaaggtgtccaaaatggccttgtcgaatacaaagatacaaaaaacggtgtcgcactgcttgagcgcgtgataaagcgcggcattgtccgtcaagcgcaggtcccgcctgaaccacatcaggccttttgtgtacttctttttcatcgtgtagattgctcgattgggtcgtgagagggtgcggattgtcggcagcgcccgcaccccttaaaataacatcatgcctactgattctgccgcgattgacctcacccatcatttcctcattgctatgcccgggttggaggacgaccttttcgctcgcagcgtggtttatgtgtgcgagcacagtgcgcggggcgcgctgggcctgattatcaacaagccgagtgatctgccgctggccggtctctttgagaagatcgcgttgcgactgcatcgtgacgacttaaccgatgcgcctgtgttccggggtggccccattcaaaccgaacggggttttgtgttgcatgcgcccatggggcagggcggtgagtcggtttactcttccactttggtgattcctggcgacggctctggcctgaagggtgtggactggccaaactctgaaattcatgttgcgcttagcgtggagaccgatgacgatgcagcgccgtccgcgccgcctgaagccccaaaatatgggcctgcgcgcctagaaatgaccacctctaaagacgtgctggaggcaatggctgaaggcgcaggccctgctcgggtgttggtcacgttgggctatgccacttggggcaagggccaactcgaatcggagttggctgagaatgcctggctgaccgtgcccgcggacgagtcgattatttttgatacaccgcctgagcttcgctacagccaagccatgggtttattgggtttggatgcaggcatgctgcacggtgaggcaggacacgcctgatgtccatgcggccactaccgccagtgatcgcctccgatgtgcagttgttcctagcttttgattatggggagaagcgcaccggtgtcgccagcggtaaccgcctgacccgcagcgccacccccttgggcacgatcgccgcgcaaggggacgcgaagtggcctcagattgcccaatacctgaaagactggtcgccacaggccgtcgtgattggggtgccacggcacccagacggcgccgaccacgagaacacgcttgcggcgcaaaagtttggcagacaaatcgcgggtcgttttgccgtgactgtattcgaaaccgatgagcgctacaccaccaccgaagcgcatagcctcgctgcaaaggatgcagacgccgtggccgcttgtattattcttgagcaatttcttcggagcctaccgtgaccagccagtttgataacaccgtgcaggcagatgccttggacgcagagggtctctatcagcaactattgacggcgattcgccccttgacggcgacggctgacaagcccgtgcgtttagttggtatcgcctccggcggcgtgtggcttgcccaacgcctgcagaaggacttgggcttggcgggggagtcgggcgtgatttccagcagcctgcaccgcgatgacttttccaagcgtggcctcagctctatgggggtacaaacgaaattgccttttgacgtgaacggcgccaccgtgtggcttatcgacgatgtgctgtacaccgggcgcacgatacgcgccgtgctgaacgagttatttgactacggtcgcccagccgatgtgaggttggccgttttggtcgatcgcggtcagcgggagttgcccgttcaggccgatctggtggtggctcgttgctcggtgccgagcacgcagtcactggagctgtcgcaaacggacggcggtcgtctaacctttgggattgaaactgcgggttgaacgccacagaatcactttgcaccgccacactttattgccctagcgcccctatgcgaacacaacgtaacccccaactgaacgccaacggcgagctcatacacctgctctcaaccgaaggcctgtccaaagagatgttgacccacatcttggacacagccaccaatttcgtgagtgtcagcgaccgcgaggtcaagaaggtgcctttgctgcgcgggaaaagtgttttcaatctgttttttgaaaactccacccgtacacggaccaccttcgatatcgccgccacccggttgagcgccgacgtggttaacctagacatcgcgcgctcctctgccagcaagggcgagagcctgttggacaccattgacaacctttcggcgatggccgcggacatttttgttgtccgccacaacgagtctggcgccccctacctcattgcgcaacacgtggggcctcatgtgcacgtggtgaacgcgggcgatgggcgacacgcccatccgacccaagccctgctggacatgtacacgattcgccacttcaagggggacttttccaatttgagtgtggcgattgttggtgacgtggcgcactcgcgtgttgcgcgctcaaacattcacgccttgacgaccttgggctgccctgacctgcgtgtggtgggccccaagaccttggtgccgaatgacatggcacaaatgggcgttcgggtctgtaacgatttgcgctctggcatcgacggtgtcgatgtggtgattaccttgcgtctgcaaaacgaacgcatgagtggcgccttgttgccgtccgcgcaggagtttttcaagagttacggcctgacgcccgagcgcctgcagtgggctaagcccgatgccattgtgatgcacccggggcctatcaatcgaggggttgagattgcatcgtcggtcgttgacgggccacaagcggtgattttgtcgcaggtaaccttcggtatcgcggttcgtatggccgtgatgtctattgttgccagccacgagggctaatgactggccatggcgagtgcaccccaacaaccgacccctttaacccagtacgtgttttaaatcgcctgagcaccatatcgatatgaagattctgattcaatccggacgtgtcatcgaccccactagcgggctagaggccgttcaagaccttgccattgccgctggtcgcattgtggcgatgggcgcgcaggtcaaagacttttcgcccgagcgtgtgatcgatgccaccgactgtgtggtggcgcccggcttggttgatctgtgcacgcgcttacgcgagccggggttcgagcatgagtcaatgttggagtctgagatgtccgccgccgttgcgggcggcattacctccttggtctgtccgccagatactgacccggtcttagatgagccgggcttggttgacatgctcaagtttcgaaccaaaaagctgcgtcaagcacgcgtcttcccgttgggggctttgacccgtggcttggagggggaggtgctgaccgaaatggccgagctcaccgagtcaggttgcgtgggttttgggcaagcggatgcgccgatacagaacacgcaggtactgcaacgcacgtttcaatacgcggcctcgtttggttacagcgtctggttgcgtccgcaagattactggctgggtcagggtgtcgctgccagtggtccgctggccacgcgcatgggcttgtctggcgtgcctgtgtctgctgaggtgattgcgctagaaactatttttgagctgatgcgaggcaccccagcgcgggtgcacctctgtcgtattagcagtgcccgcggggtggacttggtgcgcgccgcgaaggccgaaggcttgtccgtgacctgcgatgtcagcgtgcacaatttgcatctcattgacgtggatatgggctattacgatgcgcgcttgcgtttgcaaccacccgttcggcaacagcgtgaccgcgacgccctgcgtgcggggttggcggatggcactattgacgccttggttagcgaccacaaccccgtcgaagcggatgccaaaaacctgccctttgcgcaagcagaaccgggcgccactgcggtggagttgttgctgagtttggctcttaaatggggacgtgaagaccaggtgccgttgcagcgcgtgatcgcggttttgacgcaagggcctgtcaaagttctgggtcaaagtctgggaagtttgcaagccagcttaggccaaatcacccttggtggtgtggcggatatttgtgtttacaagccggatgccgcgtgggtggtgggcgcagacacattgcgaagccaaggaaagcacaccccctttgcgggttatgaattgcccgcaaaagtagccaccaccattgccggtggctatattgcctttgacgcaggctgagcgcgatgcgagcaatccctgcggcttggcgcatgatattgggcgtgaatcacgttctgcgcggtctacgaaccattaacaaatactttgccacggcaacgcaaaccgagcgtgacgcgatggtgcaggcgtggtctctcgccctgcttgagctgctaaatgttgaattggtcaccgatggtgctgagcctgtacccggcttggtggttgcaaaccacgtctcgtggttggatatcttggtgatgaatgccgcacaccccgttcggtttttatcgaaatcagatgtcaagaagtggcccttactcggccgcctgattgcggggtctggtacgttatttatagaacgtgcaaagcgccgcgatgcgctgcgggtggtgcagcaaattacgacgtatttacgtgatggtcaccgcgtggcgatctttcccgagggcacgaccaacgatggtattcatgtgctgccgtttcatggcaacttgattcaatccgctatcgacgccgaggcggcggtgtgtccggttgggatacgctacatggacaaggccactggccaacgcagcttggcgcccgcctatattgatgacgacacgctggtaggctctatttggcggacgctacgcagtggtcgcatggtggcgcgggtgcgcttgggtgagccacaactaaacgtgggacgtgaccggcgcgtatgggcgagcgaccttcaacgcgcggtcgtcaccctgaccgctgagtaaatacgaggccgtgcgacg

SEQ ID NO: 19 - DNA, 30082 bp, Artificial Sequence
  Synthetic Oligonucleotide
  misc_feature (1)..(9997): n is a, c, g, or t
nnnnnnnnnnnnnnnnnnnnnnnnnnnnnnnnnnnnnnnnnnnnnnnnnnnnnnnnnnnnnnnnnnnnnnnnnnnnnnnnnnnnnnnnnnnnnnnnnnnnnnnnnnnnnnnnnnnnnnnnnnnnnnnnnnnnnnnnnnnnnnnnnnnnnnnnnnnnnnnnnnnnnnnnnnnnnnnnnnnnnnnnnnnnnnnnnnnnnnnnnnnnnnnnnnnnnnnnnnnnnnnnnnnnnnnnnnnnnnnnnnnnnnnnnnnnnnnnnnnnnnnnnnnnnnnnnnnnnnnnnnnnnnnnnnnnnnnnnnnnnnnnnnnnnnnnnnnnnnnnnnnnnnnnnnnnnnnnnnnnnnnnnnnnnnnnnnnnnnnnnnnnnnnnnnnnnnnnnnnnnnnnnnnnnnnnnnnnnnnnnnnnnnnnnnnnnnnnnnnnnnnnnnnnnnnnnnnnnnnnnnnnnnnnnnnnnnnnnnnnnnnnnnnnnnnnnnnnnnnnnnnnnnnnnnnnnnnnnnnnnnnnnnnnnnnnnnnnnnnnnnnnnnnnnnnnnnnnnnnnnnnnnnnnnnnnnnnnnnnnnnnnnnnnnnnnnnnnnnnnnnnnnnnnnnnnnnnnnnnnnnnnnnnnnnnnnnnnnnnnnnnnnnnnnnnnnnnnnnnnnnnnnnnnnnnnnnnnnnnnnnnnnnnnnnnnnnnnnnnnnnnnnnnnnnnnnnnnnnnnnnnnnnnnnnnnnnnnnnnnnnnnnnnnnnnnnnnnnnnnnnnnnnnnnnnnnnnnnnnnnnnnnnnnnnnnnnnnnnnnnnnnnnnnnnnnnnnnnnnnnnnnnnnnnnnnnnnnnnnnnnnnnnnnnnnnnnnnnnnnnnnnnnnnnnnnnnnnnnnnnnnnnnnnnnnnnnnnnnnnnnnnnnnnnnnnnnnnnnnnnnnnnnnnnnnnnnnnnnnnnnnnnnnnnnnnnnnnnnnnnnnnnnnnnnnnnnnnnnnnnnnnnnnnnnnnnnnnnnnnnnnnnnnnnnnnnnnnnnnnnnnnnnnnnnnnnnnnnnnnnnnnnnnnnnnnnnnnnnnnnnnnnnnnnnnnnnnnnnnnnnnnnnnnnnnnnnnnnnnnnnnnnnnnnnnnnnnnnnnnnnnnnnnnnnnnnnnnnnnnnnnnnnnnnnnnnnnnnnnnnnnnnnnnnnnnnnnnnnnnnnnnnnnnnnnnnnnnnnnnnnnnnnnnnnnnnnnnnnnnnnnnnnnnnnnnnnnnnnnnnnnnnnnnnnnnnnnnnnnnnnnnnnnnnnnnnnnnnnnnnnnnnnnnnnnnnnnnnnnnnnnnnnnnnnnnnnnnnnnnnnnnnnnnnnnnnnnnnnnnnnnnnnnnnnnnnnnnnnnnnnnnnnnnnnnnnnnnnnnnnnnnnnnnnnnnnnnnnnnnnnnnnnnnnnnnnnnnnnnnnnnnnnnnnnnnnnnnnnnnnnnnnnnnnnnnnnnnnnnnnnnnnnnnnnnnnnnnnnnnnnnnnnnnnnnnnnnnnnnnnnnnnnnnnnnnnnnnnnnnnnnnnnnnnnnnnnnnnnnnnnnnnnnnnnnnnnnnnnnnnnnnnnnnnnnnnnnnnnnnnnnnnnnnnnnnnnnnnnnnnnnnnnnnnnnnnnnnnnnnnnnnnnnnnnnnnnnnnnnnnnnnnnnnnnnnnnnnnnnnnnnnnnnnnnnnnnnnnnnnnnnnnnnnnnnnnnnnnnnnnnnnnnnnnnnnnnnnnnnnnnnnnnnnnnnnnnnnnnnnnnnnnnnnnnnnnnnnnnnnnnnnnnnnnnnnnnnnnnnnnnnnnnnnnnnnnnnnnnnnnnnnnnnnnnnnnnnnnnnnnnnnnnnnnnnnnnnnnnnnnnnnnnnnnnnnnnnnnnnnnnnnnnnnnnnnnnnnnnnnnnnnnnnnnnnnnnnnnnnnnnnnnnnnnnnnnnnnnnnnnnnnnnnnnnnnnnnnnnnnnnnnnnnnnnnnnnnnnnnnnnnnnnnnnnnnnnnnnnnnnnnnnnnnnnnnnnnnnnnnnnnnnnnnnnnnnnnnnnnnnnnnnnnnnnnnnnnnnnnnnnnnnnnnnnnnnnnnnnnnnnnnnnnnnnnnnnnnnnnnnnnnnnnnnnnnnnnnnnnnnnnnnnnnnnnnnnnnnnnnnnnnnnnnnnnnnnnnnnnnnnnnnnnnnnnnnnnnnnnnnnnnnnnnnnnnnnnnnnnnnnnnnnnnnnnnnnnnnnnnnnnnnnnnnnnnnnnnnnnnnnnnnnnnnnnnnnnnnnnnnnnnnnnnnnnnnnnnnnnnnnnnnnnnnnnnnnnnnnnnnnnnnnnnnnnnnnnnnnnnnnnnnnnnnnnnnnnnnnnnnnnnnnnnnnnnnnnnnnnnnnnnnnnnnnnnnnnnnnnnnnnnnnnnnnnnnnnnnnnnnnnnnnnnnnnnnnnnnnnnnnnnnnnnnnnnnnnnnnnnnnnnnnnnnnnnnnnnnnnnnnnnnnnnnnnnnnnnnnnnnnnnnnnnnnnnnnnnnnnnnnnnnnnnnnnnnnnnnnnnnnnnnnnnnnnnnnnnnnnnnnnnnnnnnnnnnnnnnnnnnnnnnnnnnnnnnnnnnnnnnnnnnnnnnnnnnnnnnnnnnnnnnnnnnnnnnnnnnnnnnnnnnnnnnnnnnnnnnnnnnnnnnnnnnnnnnnnnnnnnnnnnnnnnnnnnnnnnnnnnnnnnnnnnnnnnnnnnnnnnnnnnnnnnnnnnnnnnnnnnnnnnnnnnnnnnnnnnnnnnnnnnnnnnnnnnnnnnnnnnnnnnnnnnnnnnnnnnnnnnnnnnnnnnnnnnnnnnnnnnnnnnnnnnnnnnnnnnnnnnnnnnnnnnnnnnnnnnnnnnnnnnnnnnnnnnnnnnnnnnnnnnnnnnnnnnnnnnnnnnnnnnnnnnnnnnnnnnnnnnnnnnnnnnnnnnnnnnnnnnnnnnnnnnnnnnnnnnnnnnnnnnnnnnnnnnnnnnnnnnnnnnnnnnnnnnnnnnnnnnnnnnnnnnnnnnnnnnnnnnnnnnnnnnnnnnnnnnnnnnnnnnnnnnnnnnnnnnnnnnnnnnnnnnnnnnnnnnnnnnnnnnnnnnnnnnnnnnnnnnnnnnnnnnnnnnnnnnnnnnnnnnnnnnnnnnnnnnnnnnnnnnnnnnnnnnnnnnnnnnnnnnnnnnnnnnnnnnnnnnnnnnnnnnnnnnnnnnnnnnnnnnnnnnnnnnnnnnnnnnnnnnnnnnnnnnnnnnnnnnnnnnnnnnnnnnnnnnnnnnnnnnnnnnnnnnnnnnnnnnnnnnnnnnnnnnnnnnnnnnnnnnnnnnnnnnnnnnnnnnnnnnnnnnnnnnnnnnnnnnnnnnnnnnnnnnnnnnnnnnnnnnnnnnnnnnnnnnnnnnnnnnnnnnnnnnnnnnnnnnnnnnnnnnnnnnnnnnnnnnnnnnnnnnnnnnnnnnnnnnnnnnnnnnnnnnnnnnnnnnnnnnnnnnnnnnnnnnnnnnnnnnnnnnnnnnnnnnnnnnnnnnnnnnnnnnnnnnnnnnnnnnnnnnnnnnnnnnnnnnnnnnnnnnnnnnnnnnnnnnnnnnnnnnnnnnnnnnnnnnnnnnnnnnnnnnnnnnnnnnnnnnnnnnnnnnnnnnnnnnnnnnnnnnnnnnnnnnnnnnnnnnnnnnnnnnnnnnnnnnnnnnnnnnnnnnnnnnnnnnnnnnnnnnnnnnnnnnnnnnnnnnnnnnnnnnnnnnnnnnnnnnnnnnnnnnnnnnnnnnnnnnnnnnnnnnnnnnnnnnnnnnnnnnnnnnnnnnnnnnnnnnnnnnnnnnnnnnnnnnnnnnnnnnnnnnnnnnnnnnnnnnnnnnnnnnnnnnnnnnnnnnnnnnnnnnnnnnnnnnnnnnnnnnnnnnnnnnnnnnnnnnnnnnnnnnnnnnnnnnnnnnnnnnnnnnnnnnnnnnnnnnnnnnnnnnnnnnnnnnnnnnnnnnnnnnnnnnnnnnnnnnnnnnnnnnnnnnnnnnnnnnnnnnnnnnnnnnnnnnnnnnnnnnnnnnnnnnnnnnnnnnnnnnnnnnnnnnnnnnnnnnnnnnnnnnnnnnnnnnnnnnnnnnnnnnnnnnnnnnnnnnnnnnnnnnnnnnnnnnnnnnnnnnnnnnnnnnnnnnnnnnnnnnnnnnnnnnnnnnnnnnnnnnnnnnnnnnnnnnnnnnnnnnnnnnnnnnnnnnnnnnnnnnnnnnnnnnnnnnnnnnnnnnnnnnnnnnnnnnnnnnnnnnnnnnnnnnnnnnnnnnnnnnnnnnnnnnnnnnnnnnnnnnnnnnnnnnnnnnnnnnnnnnnnnnnnnnnnnnnnnnnnnnnnnnnnnnnnnnnnnnnnnnnnnnnnnnnnnnnnnnnnnnnnnnnnnnnnnnnnnnnnnnnnnnnnnnnnnnnnnnnnnnnnnnnnnnnnnnnnnnnnnnnnnnnnnnnnnnnnnnnnnnnnnnnnnnnnnnnnnnnnnnnnnnnnnnnnnnnnnnnnnnnnnnnnnnnnnnnnnnnnnnnnnnnnnnnnnnnnnnnnnnnnnnnnnnnnnnnnnnnnnnnnnnnnnnnnnnnnnnnnnnnnnnnnnnnnnnnnnnnnnnnnnnnnnnnnnnnnnnnnnnnnnnnnnnnnnnnnnnnnnnnnnnnnnnnnnnnnnnnnnnnnnnnnnnnnnnnnnnnnnnnnnnnnnnnnnnnnnnnnnnnnnnnnnnnnnnnnnnnnnnnnnnnnnnnnnnnnnnnnnnnnnnnnnnnnnnnnnnnnnnnnnnnnnnnnnnnnnnnnnnnnnnnnnnnnnnnnnnnnnnnnnnnnnnnnnnnnnnnnnnnnnnnnnnnnnnnnnnnnnnnnnnnnnnnnnnnnnnnnnnnnnnnnnnnnnnnnnnnnnnnnnnnnnnnnnnnnnnnnnnnnnnnnnnnnnnnnnnnnnnnnnnnnnnnnnnnnnnnnnnnnnnnnnnnnnnnnnnnnnnnnnnnnnnnnnnnnnnnnnnnnnnnnnnnnnnnnnnnnnnnnnnnnnnnnnnnnnnnnnnnnnnnnnnnnnnnnnnnnnnnnnnnnnnnnnnnnnnnnnnnnnnnnnnnnnnnnnnnnnnnnnnnnnnnnnnnnnnnnnnnnnnnnnnnnnnnnnnnnnnnnnnnnnnnnnnnnnnnnnnnnnnnnnnnnnnnnnnnnnnnnnnnnnnnnnnnnnnnnnnnnnnnnnnnnnnnnnnnnnnnnnnnnnnnnnnnnnnnnnnnnnnnnnnnnnnnnnnnnnnnnnnnnnnnnnnnnnnnnnnnnnnnnnnnnnnnnnnnnnnnnnnnnnnnnnnnnnnnnnnnnnnnnnnnnnnnnnnnnnnnnnnnnnnnnnnnnnnnnnnnnnnnnnnnnnnnnnnnnnnnnnnnnnnnnnnnnnnnnnnnnnnnnnnnnnnnnnnnnnnnnnnnnnnnnnnnnnnnnnnnnnnnnnnnnnnnnnnnnnnnnnnnnnnnnnnnnnnnnnnnnnnnnnnnnnnnnnnnnnnnnnnnnnnnnnnnnnnnnnnnnnnnnnnnnnnnnnnnnnnnnnnnnnnnnnnnnnnnnnnnnnnnnnnnnnnnnnnnnnnnnnnnnnnnnnnnnnnnnnnnnnnnnnnnnnnnnnnnnnnnnnnnnnnnnnnnnnnnnnnnnnnnnnnnnnnnnnnnnnnnnnnnnnnnnnnnnnnnnnnnnnnnnnnnnnnnnnnnnnnnnnnnnnnnnnnnnnnnnnnnnnnnnnnnnnnnnnnnnnnnnnnnnnnnnnnnnnnnnnnnnnnnnnnnnnnnnnnnnnnnnnnnnnnnnnnnnnnnnnnnnnnnnnnnnnnnnnnnnnnnnnnnnnnnnnnnnnnnnnnnnnnnnnnnnnnnnnnnnnnnnnnnnnnnnnnnnnnnnnnnnnnnnnnnnnnnnnnnnnnnnnnnnnnnnnnnnnnnnnnnnnnnnnnnnnnnnnnnnnnnnnnnnnnnnnnnnnnnnnnnnnnnnnnnnnnnnnnnnnnnnnnnnnnnnnnnnnnnnnnnnnnnnnnnnnnnnnnnnnnnnnnnnnnnnnnnnnnnnnnnnnnnnnnnnnnnnnnnnnnnnnnnnnnnnnnnnnnnnnnnnnnnnnnnnnnnnnnnnnnnnnnnnnnnnnnnnnnnnnnnnnnnnnnnnnnnnnnnnnnnnnnnnnnnnnnnnnnnnnnnnnnnnnnnnnnnnnnnnnnnnnnnnnnnnnnnnnnnnnnnnnnnnnnnnnnnnnnnnnnnnnnnnnnnnnnnnnnnnnnnnnnnnnnnnnnnnnnnnnnnnnnnnnnnnnnnnnnnnnnnnnnnnnnnnnnnnnnnnnnnnnnnnnnnnnnnnnnnnnnnnnnnnnnnnnnnnnnnnnnnnnnnnnnnnnnnnnnnnnnnnnnnnnnnnnnnnnnnnnnnnnnnnnnnnnnnnnnnnnnnnnnnnnnnnnnnnnnnnnnnnnnnnnnnnnnnnnnnnnnnnnnnnnnnnnnnnnnnnnnnnnnnnnnnnnnnnnnnnnnnnnnnnnnnnnnnnnnnnnnnnnnnnnnnnnnnnnnnnnnnnnnnnnnnnnnnnnnnnnnnnnnnnnnnnnnnnnnnnnnnnnnnnnnnnnnnnnnnnnnnnnnnnnnnnnnnnnnnnnnnnnnnnnnnnnnnnnnnnnnnnnnnnnnnnnnnnnnnnnnnnnnnnnnnnnnnnnnnnnnnnnnnnnnnnnnnnnnnnnnnnnnnnnnnnnnnnnnnnnnnnnnnnnnnnnnnnnnnnnnnnnnnnnnnnnnnnnnnnnnnnnnnnnnnnnnnnnnnnnnnnnnnnnnnnnnnnnnnnnnnnnnnnnnnnnnnnnnnnnnnnnnnnnnnnnnnnnnnnnnnnnnnnnnnnnnnnnnnnnnnnnnnnnnnnnnnnnnnnnnnnnnnnnnnnnnnnnnnnnnnnnnnnnnnnnnnnnnnnnnnnnnnnnnnnnnnnnnnnnnnnnnnnnnnnnnnnnnnnnnnnnnnnnnnnnnnnnnnnnnnnnnnnnnnnnnnnnnnnnnnnnnnnnnnnnnnnnnnnnnnnnnnnnnnnnnnnnnnnnnnnnnnnnnnnnnnnnnnnnnnnnnnnnnnnnnnnnnnnnnnnnnnnnnnnnnnnnnnnnnnnnnnnnnnnnnnnnnnnnnnnnnnnnnnnnnnnnnnnnnnnnnnnnnnnnnnnnnnnnnnnnnnnnnnnnnnnnnnnnnnnnnnnnnnnnnnnnnnnnnnnnnnnnnnnnnnnnnnnnnnnnnnnnnnnnnnnnnnnnnnnnnnnnnnnnnnnnnnnnnnnnnnnnnnnnnnnnnnnnnnnnnnnnnnnnnnnnnnnnnnnnnnnnnnnnnnnnnnnnnnnnnnnnnnnnnnnnnnnnnnnnnnnnnnnnnnnnnnnnnnnnnnnnnnnnnnnnnnnnnnnnnnnnnnnnnnnnnnnnnnnnnnnnnnnnnnnnnnnnnnnnnnnnnnnnnnnnnnnnnnnnnnnnnnnnnnnnnnnnnnnnnnnnnnnnnnnnnnnnnnnnnnnnnnnnnnnnnnnnnnnnnnnnnnnnnnnnnnnnnnnnnnnnnnnnnnnnnnnnnnnnnnnnnnnnnnnnnnnnnnnnnnnnnnnnnnnnnnnnnnnnnnnnnnnnnnnnnnnnnnnnnnnnnnnnnnnnnnnnnnnnnnnnnnnnnnnnnnnnnnnnnnnnnnnnnnnnnnnnnnnnnnnnnnnnnnnnnnnnnnnnnnnnnnnnnnnnnnnnnnnnnnnnnnnnnnnnnnnnnnnnnnnnnnnnnnnnnnnnnnnnnnnnnnnnnnnnnnnnnnnnnnnnnnnnnnnnnnnnnnnnnnnnnnnnnnnnnnnnnnnnnnnnnnnnnnnnnnnnnnnnnnnnnnnnnnnnnnnnnnnnnnnnnnnnnnnnnnnnnnnnnnnnnnnnnnnnnnnnnnnnnnnnnnnnnnnnnnnnnnnnnnnnnnnnnnnnnnnnnnnnnnnnnnnnnnnnnnnnnnnnnnnnnnnnnnnnnnnnnnnnnnnnnnnnnnnnnnnnnnnnnnnnnnnnnnnnnnnnnnnnnnnnnnnnnnnnnnnnnnnnnnnnnnnnnnnnnnnnnnnnnnnnnnnnnnnnnnnnnnnnnnnnnnnnnnnnnnnnnnnnnnnnnnnnnnnnnnnnnnnnnnnnnnnnnnnnnnnnnnnnnnnnnnnnnnnnnnnnnnnnnnnnnnnnnnnnnnnnnnnnnnnnnnnnnnnnnnnnnnnnnnnnnnnnnnnnnnnnnnnnnnnnnnnnnnnnnnnnnnnnnnnnnnnnnnnnnnnnnnnnnnnnnnnnnnnnnnnnnnnnnnnnnnnnnnnnnnnnnnnnnnnnnnnnnnnnnnnnnnnnnnnnnnnnnnnnnnnnnnnnnnnnnnnnnnnnnnnnnnnnnnnnnnnnnnnnnnnnnnnnnnnnnnnnnnnnnnnnnnnnnnnnnnnnnnnnnnnnnnnnnnnnnnnnnnnnnnnnnnnnnnnnnnnnnnnnnnnnnnnnnnnnnnnnnnnnnnnnnnnnnnnnnnnnnnnnnnnnnnnnnnnnnnnnnnnnnnnnnnnnnnnnnnnnnnnnnnnnnnnnnnnnnnnnnnnnnnnnnnnnnnnnnnnnnnnnnnnnnnnnnnnnnnnnnnnnnnnnnnnnnnnnnnnnnnnnnnnnnnnnnnnnnnnnnnnnnnnnnnnnnnnnnnnnnnnnnnnnnnnnnnnnnnnnnnnnnnnnnnnnnnnnnnnnnnnnnnnnnnnnnnnnnnnnnnnnnnnnnnnnnnnnnnnnnnnnnnnnnnnnnnnnnnnnnnnnnnnnnnnnnnnnnnnnnnnnnnnnnnnnnnnnnnnnnnnnnnnnnnnnnnnnnnnnnnnnnnnnnnnnnnnnnnnnnnnnnnnnnnnnnnnnnnnnnnnnnnnnnnnnnnnnnnnnnnnnnnnnnnnnnnnnnnnnnnnnnnnnnnnnnnnnnnnnnnnnnnnnnnnnnnnnnnnnnnnnnnnnnnnnnnnnnnnnnnnnnnnnnnnnnnnnnnnnnnnnnnnnnnnnnnnnnnnnnnnnnnnnnnnnnnnnnnnnnnnnnnnnnnnnnnnnnnnnnnnnnnnnnnnnnnnnnnnnnnnnnnnnnnnnnnnnnnnnnnnnnnnnnnnnnnnnnnnnnnnnnnnnnnnnnnnnnnnnnnnnnnnnnnnnnnnnnnnnnnnnnnnnnnnnnnnnnnnnnnnnnnnnnnnnnnnnnnnnnnnnnnnnnnnnnnnnnnnnnnnnnnnnnnnnnnnnnnnnnnnnnnnnnnnnnnnnnnnnnnnnnnnnnnnnnnnnnnnnnnnnnnnnnnnnnnnnnnnnnnnnnnnnnnnnnnnnnnnnnnnnnnnnnnnnnnnnnnnnnnnnnnnnnnnnnnnnnnnnnnnnnnnnnnnnnnnnnnnnnnnnnnnnnnnnnnnnnnnnnnnnnnnnnnnnnnnnnnnnnnnnnnnnnnnnnnnnnnnnnnnnnnnnnnnnnnnnnnnnnnnnnnnnnnnnnnnnnnnnnnnnnnnnnnnnnnnnnnnnnnnnnnnnnnnnnnnnnnnnnnnnnnnnnnnnnnnnnnnnnnnnnnnnnnnnnnnnnnnnnnnnnnnnnnnnnnnnnnnnnnnnnnnnnnnnnnnnnnnnnnnnnnnnnnnnnnnnnnnnnnnnnnnnnnnnnnnnnnnnnnnnnnnnnnnnnnnnnnnnnnnnnnnnnnnnnnnnnnnnnnnnnnnnnnnnnnnnnnnnnnnnnnnnnnnnnnnnnnnnnnnnnnnnnnnnnnnnnnnnnnnnnnnnnnnnnnnnnnnnnnnnnnnnnnnnnnnnnnnnnnnnnnnnnnnnnnnnnnnnnnnnnnnnnnnnnnnnnnnnnnnnnnnnnnnnnnnnnnnnnnnnnnnnnnnnnnnnnnnnnnnnnnnnnnnnnnnnnnnnnnnnnnnnnnnnnnnnnnnnnnnnnnnnnnnnnnnnnnnnnnnnnnnnnnnnnnnnnnnnnnnnnnnnnnnnnnnnnnnnnnnnnnnnnnnnnnnnnnnnnnnnnnnnnnnnnnnnnnnnnnnnnnnnnnnnnnnnnnnnnnnnnnnnnnnnnnnnnnnnnnnnnnnnnnnnnnnnnnnnnnnnnnnnnnnnnnnnnnnnnnnnnnnnnnnnnnnnnnnnnnnnnnnnnnnnnnnnnnnnnnnnnnnnnnnnnnnnnnnnnnnnnnnnnnnnnnnnnnnnnnnnnnnnnnnnnnnnnncctgctggaacccatcggaaacattccgccagttgaagccgaacaacgctactacgccatgctggacgaaccagccatggcagcataacttaaaccaaatagcctccgacaattccggggcggttcagatcgccaagttcacacctcaagagaacaaggtaatggcccccttaatttgtggggcaaactcgatgaagggaagtggcgtggaatttagatcagaaaaacaaaaggaattcttcagtcgcgtcgtgacacacattgccaagcccgacctgcctttactgctagaaggcgcaactggccttggcaagacacttccctatatgctggccgcgttgagatcgggcaaaagagtggcattagtctatccaacccaccagttgatcaatcaggcacttgcgtcttgggatttaaagaccgcactggcggatacgcctagaacactggtcgcgtttagacctcgtgcatatttcaacgatgatcagaaggcttatcaggataacaaacaagacgctttggcggccgatattatgttgtgtacctctgtctctgtgatcatcgatcagcgaatgggtggcggatataacgggtcgactgagcgagaggtcatcatattcgatgaggccgatcagctaccggcgtttgcagctttgacatctgatgtaacgatcacgcgccaggagctgcgcgatcatggtgtgactggagtgacgcccaagcagactgtgagcgatctgctgaagaagaagtcggtgaagggcgagttgcaaggtcgagctaaactgatctgcgaagcaattgaacaggacgtttggtttgcgaaggcaggcatgactgacgatggcggcgtggcagtgtattcgcgtctgccgggtcggctgctgaagaaagtatccaaccggccttcgaccgtatttgtttcagccacattgtcagtaggtggctcgttcaacgacttcaaacgtgccatgggtattggcgatcaaagtaaactgtccacccccagcattgaacctgttcatcacggtacgctgactttcgatttccgaaccgaatacgcagttgatacagacgaatggctgaccggagtggttgaagagatcaatggcgcagacggaccggtgctggtcgcgaccccttcgcacgctttggctcagaagttgggagcacggatcactgacgccgtggttcgtcaggccgacgagacaaccagcgaagccgtaaagcggcttggtaacacaagcatattgatcgctgctggcgcttgggcaggcctagatacacccgtagagtgggcgactatcgttgtgccgcgcgttcccttcacagggccgaagatggtctacgacgtctggcacgaagacgccgaagaacaggctgtcacaatcggcgaggcaatgacgcactatattgatagtaagaactcagctgcacggagaatgaagcaagtctttggccgtgggttgcgtcatccaaaagcaatttgccgtgtcgtgatttgtgacccacgcatcgatcaacttggcgatattgcgcccaagcgcttcaaggcagggttctgggaaggccgtaagatcgagcaaacccgcactgtgtcagaacgaaaccccgcattgcgtaaagatgcgctacttcatcacggcacggactgccaagcgtgcgatttcaagccagtgtcactgcgccaggtggaagttcaccacctcaatccgctggccgaccgggtggggggctatacgaagatagaagacgttgccgtgctctgccgcaactgccatggactggtgcattcggaggatccaccaatcccgctggaccggctaagaaaaacgaagaaagagcgcaagcctaaattctcaatctcaatggggtagcgcaccaagtgtacgccagatgtgctgtgacagccgacagattgtgacacatgcgatttgggcactgtggatgcgctggggcacggtatggtcgtttgtgccccatgtcgctcgtcattcataacacatcaaattggcgacggattgtcgttcgaaatgtgcattagaaagatcagcgcgttcccgcttcttgatggcatggccttgaatgaaaaatgggcctgctgcgtgcaggccagcgttctcaatggtacaatggagtgccgaaagaaacggcgggtaattcctgagcaggtcttcgtgggacactttgtcccttgaggatttttcggcgaagcgtagccaagactttacgaccggcccggcggtgttcttcaggcgagaggcaattgtcgaaatagtaattcaacccctatcctccggcacatcatctgaaatttcgaggaatctcatggaaggacaaactccatcatcaatacgttggcacttcggcccggaatggccggggcgtcgttgtggagccaggacgcgacagggaacgccctgccagaagcctgtattgcgcggaaggaaccgttgtcagttgcatggcggtcgtgccggggcaccacgtggcaaaaggcatggcaactacaagcatgggcggtacacgatcacagccacggaaaggcaccaagaggccatggcgcgcatcaggtatttattgctgctggggcgggcctgcaggatttttaattgaagattgccgggcaagaaatagatgccacatcacgacccccacccaaaatatagaagatagtacccctatgacccccagcccaccggcacaaaagggaaccgatttaaggtattttcatagtcaaaagggcaccgttagcgggttattggggcactggggatgcgttttttgacactggaggtgaagggcgtggccgtttcgtgccagccttctggcgtccggctttgtaccgggatagcgccgcatcagccgtgacttgattaaccgaatgccattcatccgtaggcggcgtatttccgacgggcagatacgtgagtcggtatgcctgcgggttcctgatttgtccgccgaatttgttgttcggttggatgatccgcaagaggccgagggcgtctccaagcttaagggagcgcgtgatgtcctttcgggacaaaccggcttcagccaattgcccataggaaacaaggaggttcccgtttgcggttccagcatgttgcaagtgctctatttcgatacgctccaaaatgcgcatcagcggcacgcttcgcgagcgccatgcggggctttgcagcatcgggagtcgatgcgcaacccacgccacgcctgcgagataattgctgctatttttcttcgccatttgtcgctccgttccagccgtacagcgggccgcaatgacggcattcacgttgcgaaacccctctgcgcaaggtatccccgcatttcgggcacttcgagccagaacgctgaattgacgttgcgcggactcgtgagggatatcgtggatcgacgggctttcccccatcgacgacgacttcggcttcggtgctcgccttgtgggtcgggcgaatatcgatggtgggcaattggtcaatccgcgccggaaagctttcaaggatagttattgcggatggaagatcttcggccttgagggcacggatggcggccatgagagcatcgcgagtaccaaagtagccgatattgtcccaacgcgctctaccgtgcctttttccggctcgtttctgcagaatccattgatgaccgtccggcgcttcgacgacacgaagtctgtcgtttatcttgcaaatcaaattcatgtcgttctcccgtttggccgatagatatcaacggtcgagagagcgacaacggctccggaatagaaaacagtgatccgcgctatcagtgccggtgccttattgtgacgagttgggaggaaccgaagttcccccacgtctggcacatagcatttccggtgccgcaaataggtttcagcgagggttccagcgatggggcgcgcagagcgccatatgctgtctgcggtggatgaccacgccaagcatttttgcgctaccgcgttcatgaaacttgctccggggaaagccggcatcggtcgtcaagccatttccttgcctcggcaattgagtaatttttttctcgcattactaagtccacgaggtcgccttcttctccactcccaaaatctttgaaccgcccggctcggtctccagcgacatgaacgcacaggcttccattgggtctataacgccaatcatccgcgttgttaaaatccctgttgggtttgccaagcaaggagcgcgaaacgtctcgtgcatgtggtgcatatctttccgtcaggtcacccatggtcatgcctcctctctattggatttggcagtttcagcgcggtcgctgtcaccggcatcgatgctcaatacacagcgtgtttccagccacacagtgatttccgattcgcgccaaccgattttgcggagaccgatccggatacgcttcgggaattctcctgccttttcaagtcgccatatttggctgcgggagaggggaataatgtcacgtaggtctttctgcgtgaggattcggtctgtccatggcggatgcataggctgctccttggctcgtgttgcgacgaacgggagcatacgtcacggtgggggcgatgcggaaatgtaaacttgtgcatcgcgagtaaagaccagcacatatataattggtaaatatctatagatagtttatattgatataaaaggaaatatatattagtaataataagtgtaaattacgttttggggtctattcctttgaaaagtccgtgggcgctaattggtcaactctccgatcatatcggggccaagctgatctatgcagcggtaccaaatgccaaagtcctgatcggcgacaaaggctatgacagcgacgagttccgagaggtgctgaacgcccgaaagatcaaagcctgcatcccaccacgatcaaaccggacagcgccaaggagttactccaaaagtttgcacaagcaacgtcataaggtggaaaacctgttcgcaaagctcaaagactggcggcgcatcgaacctgatacgaccgctctgcacatacattcatgtcggcaatctgcatcgcagcaatcatcatcttcttgatcaatcaatgagtcctgaccctagctacaaatcttttgaaccagtccgcttttctccagcgaatgatcgtactctgattcacaccacatttttttgcgagatcacggctgctaattgacgggtctcttcgcgcttctttggcggcacgatatttcttctcgctcatattcggtcgcggattcggaacggccaatcccgagtcgatttgcagctggataagtgaataaagggcgggcggtatggggttgccgatacggttgactatttcgagaaatgccaatgcgatgtccgctatgaggcttggactaatcaaatggcccgctcttacgcctgcttcgcttacattcttcctcgtttgcacgtcatttcggatgcccaagagaaccaatccgcttagctcctcgatgttccgcaaataaacaatgtcatcggcgaaatcgggattggaaccaaaaagtgcctcttccaagtcctctggtttgataccccattcgcggagacgatgtcgttttcctttgtcttcgagtttcactataaggcggccgactgcgtcttccaaaatcgctcgattccattcaaccaaatcttcggatagtccgagctgtgtatattcttccagcgttagccttggcttctgaaataattcgtcgtcagacatttcaaattagatcccgtgttcgatattggctggcagcgatcacattaccaaattagcgacaaacgcgccccaccgttctaacgcgtctttgcgctgatcgagataggcgtggcgctggtagacggcggctatgccggtcacggcaccagaactgtgatttaggatcttatcgaccacgacgggctcaataccgaggtcgccggtcgctatcgtcgcaagcgtccgacgcaggtcatggatggtccagccgttcacgccggacaatttgtccaaccgttccttaacctttgagaaacccgagatcggagtggtgccggtagtcgtgaacacatagttggaaccatttaagtgattgatgccattcagtgctgagactaactgtcgatgaaagatgaacatgatgagccttgccgttcttggcgcgctcgccgggtatcatccattccctcttttcaagatcaaactcagaccaacgagcacctgccacttcgttgcggcgctgacccgtcagaatcagagtttggatatatgggccaaaaggctgaccaatctgttccgttgcttcccagatcgctcccaattcagttggcgtgagcgtacggtcccggctgttctcgttcgccggcttctttataccgttcgcaggagacacggcgatgatgtcttgctcgaccgcccaattgaacattcggcgcaaataggccagcaaacgattggcgtggataggcgttccacgatcgacaacgcccgctagaagccgctggatgtcttgcttggtgatcgtatcgatgggcttgttgcccagcacaggacggacgtcacggaccagcgcacgacgtttttcggcggtcgatttccgtttctttgcagcctgatcacgattcaaccaatcttcgagcaccgtagtaaatataggagccgcctttggctttattatcgctccgacggtggcgatctgctcgaagagatcgcccgccttctgacgggctacggcaagcttgacgtcgggatagcgcccaatggttatgcgtttcatgctcccgtctacgcgtcgcatggcgaaccacgtcttcgtgccggatggggcaagccgcaggccgaggccccgctggacggtatcatagatatccttccgggcgggaggagctttcaggctgcgtaggaaagtgtcggtgaaagccttttcggtaagtttcggcataacgtcctcgaatgttgtgtgtcgcgcgtttgtgggttacacagtgggttacaaaatcgatgacacagagcgagacaacatgcaacagattgaggcagaaatatatccaagacattgttttttctgactttgttccgaacaccctgcaacgcgaagaaactaagcgaaaccaagtagcaccagattcctaatctgggggtcgcgcgttcgaatcgcgccgggatcaccattttccgatccactttccagaacgcgtgccgacctgtcagagcgtttttgcctgctgcttcctggtgcactttgcacctgaccgtgtatacttgcccccaggaaaaccgggagcaatcaatgcgaatactttttaccggcgggtcgggcaaggccgggcgccatgcggtggcctatcttctggacaagggtcacagggtcttgaatgtcgatctgacgcccctcgtccatcccggcgtcgacaaccgcatagccgacatcaccaatgccggacagatgttcgatgtgatggcgagttatgccgggttcgacgagctggagccgggcaccggcgttccccgcttcgatgccgtcgtgcattttgcagccattccacggcttttgttgacagccgacaacgaatgctaccggatcaacacattgggcacctacaatgtcattgatgcggcggtgaagcttggcgtcaggaagatcatcttcgcctcctcggaaacaacctatggcgtgtgttttgccgacggggaacgcaaaccggactatctgccaatcgacgaggagcatccggttgtgcccgaagacagctatgccatgtcaaaggtcgtcaatgaagtcacggcccgcagcttccagcggcgcagcggctttgacatttacggcatccgcatcaacaacgtcattgaaccaaatgaatatgtgcagaacttcccggcctatatcgccgaaccatcacagcgccggcgcaatatatttgcctatatcgatgcccgcgacctgggacatatggtggaccagtgccttgtcacggacggtttgggcttccagatcttcaatgcgtccaatgacgaccattcggtcggcctgtcttcagccgaactgattgatcgtttttaccagggcgttcccatccggcagatcggtgagcggcagaccttctattcaaacgagaaggcgaaaaagatgctgggcttcagccccaaatacaattggagaatgtatctgcacgacaatggcgcggtgaagtgatcacgcgctgttgccggcggcccagttcaggcccctgcgtgtcatgatacgcatttcaggaacattgaattcatctgccgtgtggcccagcgcattgaagaagacccgacccttgccgtgtttgcgcttccaaacgacaggcatcaccacaccgtcgatccagggtgcatgttcgccgctgaacgtggtggtcgccagcacgtcgttggccggatcgacatgcatgtaatattgctctgaatggtaatcgaaatcctctatgccatcggtaatcgggtcggacttgtcgatgatattgacccgataatcgataatatttccgggatgcgccacccattggccgccgaccatgaactgatagtcgaccgcctcgcgaaatgaatcgcccatgccgccgtgatagccgccaagcccgacgccggattcaaccgctgcgaccagattggaaatctcgtccttctcggccctcgactgggtgatgatcggaacaatcaggtcaagcttgtggatatcgggatttgcaaaggccttggtggaattggagatttcaacgtcgaaaccgtcctcgcccaacatcccggcaatcacttttgccccggcttccggcgtatggccttcccagcctccccagacgatcagtgcttttttcatctgccgttctcctcaccgctttatgccccacaggggcctggccggaacgcatggcgcgcagttctcctccgcagcgccgcgccctcaggcctgtgacaacgcatcaagtatacgcacccaggaacgaatgcccttgtgataactcgacaggtcgtatttttcattggggctgtgaatgcgattgtcaaaccggccgaagccgaccagcagtgcctcagcccccagtcgccgctgaaactcgccgatgatcgggatgctgccaccggttccggccaccgccgcctcggtctgccattcctcgctcagagcctgcagcgtcgccttcaggaaggcgccatcggtgggcatgctggttgccggcgacaggccgtggtcggcaaaggacactgagcaatcatcggggatcagggcgcggacatgcgcctgaaaggccgcacgaattttttccgggtcctgcccggccaccagcctgaaggatatttttgcgctggcaaccgctggaatgactgtcttgaagccgggttcggtataacccgaccacatgccattgatttcacaacttggccgtgcccagacctgttccagcacggagcggccagcctcgcctgccgggatggtcaggccgatatcactgaggaatttttcctgatcaaagggcaaacggtcccaaagcgccgcaatggcgggatccagatcgctcaccccatcataaaagcccttgatagccacgccgccatcgcttgtgcgcaggctggaaatgacatcgcccaggacctgcgccgcattgcgcgccgcattgccgaacatgcccgaatgcagatccctgtcggcgcaggtgatggtgatctcctggcccaccagaccgcgcagcatggtggtgacagccggtgtttcgcggtcccacatatcggtatcgcagaccagaaccgtgtcggcccgcaattcatctgccgttgcttccaggaatggcgccaggctcctgctgccgctttcctcttcaccctcgaacaggaatttcacattcagcggcaaggcgccgcgaatctcgacataggcccggcacgcctcgacaaaggtcatcagcgcgcccttgtcatcggatgcaccacgcccgacgatatgtgtctcgccatcgggctgtggccgcaggaccggctcgaagggctcggaatcccacagggcaatcgggtcggccggctgcacatcataatggccgtagaacagaacctgcggccccgaaaccttgggtgaatgggccactaccatcgggtgcccctgggtgctgcgcaccgaagcgtccagccccatgctcgccagatccgcagccagccattcggcggcccgccggcaatcatccgcatagccgggatcggtggacacggacgggatgcggatcaggtcgaacaatcgttccagccgcgtgtccagtgtggcgtccacgtggtcgagaatatcggaaacgtcactcatgtcatactcctgtccaaagcctcaatccgacggttgaaatcgtcggcaacctctatcgcctcggcaaccacccgcgcctgatccaatgtgtggacctcacgcccgcgcatcagccattgcccggccaccatcgtggcgcgcacatcgctggcattgagtgcaaaaaccaatgttgaatagatatcgtagatcggctgcacacgcggatcatccagcgcgatgcggatcagatcggcagatttgcccggctccagcgatccgatctggtcgcccatgcccagaacccgcgcgccctcgatggtcgccatgcggataagttgccgggccggcagcacggaacggctgtggccgagaatcttctgaaacatcgaggccggtgcaagctgcgcaaaaaggtcaagcgtattgccgctcatggccccgtcggtggcaatccccaccgtcacgcctgcagcacgcatcatttcaatgggggcaataccgcgtccggccttgccgttggaacgggcattatgcgccacaccgacgccatgctcggccaattgcgccgcttcggcctcgttgatatgcagacaatgcgccgcgatcagcccgggtcgcaaaagccccgctcgcgccaccacctcgaccggacgggcattgtggtgctcggcgcaccaggccatctcggcatcactttcagccagatgcatctgaaccgggttgttcgggtgggcctcggcccaagcggccacgcgggccatgatttttatgccggtggaatagggcgcatgcggcgcaatggaggcaataaccagcggatggccgtcaaattcctccaccaaagcatccgtcagagcaaaggcctcgtcaaatgtgtcatgatccggcgcatcaaaatcacccagggtctggccgacaatgccgcgcatgcccgattgggcaatcgcccggcccacttcagcctcgaaataatacatgtcggcaaccgtcgtcacgccaccgcggatcatctcgagtgccgccagacgtgatcccgccgccaccaccggcgcggtgacgcaatcgcgctccagcggcaggatatagcggtatagacggtcatcaatgtcctcgcccaagccgcgaaaaagcgtcatcgccaggtggcaatgggtattgaccatgcccggcatgatcagatcgccgcccatatccaggatatcattggcatcactggcatcttcggcaggcgcggcgccttcgcccagggctgtgatcacaccatcttggatacggatccagccgttggcgatttcccgcatctgcgggtcaacggtcaggatgcgggcattggtcaaaagggtcatgattcgaccggcagaacggcacattgatcatgctgcggaatcaggaaggcgtccgtccccggctccagcgggtcggacaagggaccattggcgataatctcgcccgctgcggtttcacagcgatactgataggcgcgcccaagataggttcgcaagcccagccgtgcgggaatgccatcgcccaaacggtttaccagcaggccatcggggcgggttgcaaacagaaattcctggccgggctgctcataacgctccttcggcagtttcaatatcgcgccgccagccatttcggcagtcaagcaatcatcgacctcaccgaccgcgcgcaatgagatgatgttttcaaaaccgacgaaattggccacaaatgcattggcgggctttgaataaagcacttccggcacatccagttgcaggatacggccggcattcatgatcgccacccgatcggaaatcgaaaaggcctcttcctgatcgtgcgtcacatagagcgcggtgcggccattgtcccgctgcagcctgcgaatttccacccgcatctcgacccgcaatttggcatcaaggttagaaagcggctcatcgaacattagcaaagggggatcaatcaccagagcccgggccagcgccacccgctgcttttgtccgcccgacagggcatcaggggttcgatcggccagggcattgagcccgacacgctccagcatttcattggcctgtttggcccgcgccgcagacccgatgccgcgctgcttcaatccgaaggcgacattgtcgcggatcgacaggtgcggaaacagtgcgtagttttgaaacaccaggccgatgtcacgggcgtgcgcaggcaggcgcgtcaggtcgcgatcacccaggtgaatggagccggccgttggccgcagaaaaccggcgaccagccggagtgtcgttgtcttgccgcagcccgatgcgccaagcagcgaaacgagctcgccttctgcgacatgcagcgacaggtcctccagcacttttgtcgtgccgtagtgggcggtaatgccggaaagggtcagtgagactgtcatggtgtcatttcgtcaggaaggtgagcccaagcgtcagttcgacaaccgccatcacacccaccgtcacgagcatcaaaagcacggaaacggaagcgatggtggggtcgaagaactgctccatatgggcaagaagctggatcggcagggttgagataccaggtccggtgagaaacagggaaatcgagacatcattgatcgaggtgatcagcgccaggataaaggcggcaatgacaccggcccgcacattgggcagaacgatgatgaaaaaggctttccaccgcgggcacccgagcgaaacggccgcctcttcgatggaaaaatcaaaggacgaaagcgccgccgagacgacccgcacgcaatagggcagcaccagcagtgcgtggccaatcaccagggacacaaagatcgggaaccccatggccgttgtcacggttttcatcagggaaaacccgagcacgatttcaggcaccaggataggcagcacaaagaccgtcgacaggaaactcggcaattgcacccggtaacgattgagcgcgtaggcggcaggaataccgacgatcagcgacaggcttgtgccggtgacggccaggataaagctcgtcaccatggtgcgcttgaacgccgaaacctcgaaaatattctcataccagtgcagggtcagcccctgcggcgggaaggtgagaaaggaggtgtcggaaaccgaagcaccgatgatgatcaccagcggcgccagcagaaagaaaaagaccaggcaggcaaagccgatcaggacagggtgtggtcttgtgagcatcagacagccgccggattgaggcgacgtgcaacgcggcccattgcaagaacgatgatgattgtgacgacggtcatgatcgccgcaatggtcgaggcgccggtccagtcgaaggtgaccatggcgcgttgccgcaggaatgtacccatcatcatctgttgttcaccacccagaagttgtggcgtcgcataggacgtgaacgatccggtaaagaccagcacggccccgacaatcaatcccggcatggccagcgggaagacgacctgccagaaggtcgcaaagggcgttgcccccagcgaggcggaggcctgcagcaggtcttcgggaatgccttcaagcacgccgacaattgtcaatatcatcagcggcacgaagagatagaccatcgcgacgatcaccgcgccctcggtatagagcatggacagcggttcggcgatgacgcccaccgacagcaaaatctgattgagaatgccgttcttgccgagaatgaccagccaggcaaaggaccgcacgacaacaccagtcaacaacggaaagacggcaataatgatcagcaggcttttcagcttcttgggcgcacgcgacaccacataggccgttgcaaaaccgatcagcagggatgcgatcatggtgatcagcgcaatttcggtggtgcgccacaggacggcgcggcgaaaccggctggcaaaaaatttctcgtaattcgacaagaaccccgtgctgtcggtgaaagtggtcgaaaatgtatcaaacacgggtatgcccagaaacattgcgaccgccagtgtggcgggcaagacgagcaaccagccgggctgacgaaaggtcatgctgcagctttccagatgggggtggccgtgtgccaccccgcagaagtcttcaaatcaagccgccttggcggcgccccttacgaaccgaagatttcgttccaacggtcgatccagtcaaccttggcagcattcagcttgccatagtcgacacggttcaggctggaaattgcttccggtccataggtccagatggccgcttcttccggcgtcaggacgacatccttgttgaccggcgcatccacaccctgtttggcctcgatggtctgcacttctgtcgacaggacaaaattgatgaacttgtgggccagatcaacatgtttggcgcccgtgggaatgttgatcgtattgagcgtggcaatatcgccatccgtcagcgtggcattgaccatgctgggtacagccgccgtcagcgaagcaaaggtaaagtcctgcgccacggcaacacttgcctcaccggtggagatcaggttcaccatttcagaacccgtattgtagttcttgacgatattgggcttcatttcttcaatggcggcaaaggcaccgtcggtatccgtataggcgtcgacaccggcatgcgcagcgccgcgcagcaccatcatcgggccggctgttgtggtaatgccgggcaaggtcacggaattggccaggtcttcgcgccacagatcgttccagctggtgatcggagcaaccttgtcggcatcataaacgatggacacacgaccgatggaataggcaggaccatattcaccctggggcgcctgggccagatcatagagtttttcgatattgggaaccttggcccggtcaaccttctggaaaatgttcttttccacaccgatttgcgaatagctgtcggtcaggaagatgacatcgatgccttcacccttgcgcacgaccagcttgttcaggcggtcggcattgttgcctgtttcaaattcgatatcgcaatcgcacatggccttgaacggttcaatgatattggcattcagcttttcgccattgtagccccaccatgaaatggtgaaggtgtccttggcctgggcaacgccggccgataatgcgaaaaacaacacactggacgtaagaagtgctttcatgactcaaatcctgctttttgggagggtgatgggctaaaggcaagagcctaccgatgctgttcatgggtagtcaagtcgggtttgaaaattcaaccctaaaatatcactgaattgcgcactttgcccaaaacagccaacaccgggcgcgaatccgcgttggcaaaccggctttgactgtggcatttcatatcccatcggcaaaaatgcaaggtcatacaggggtcttcgttgagcgaaccggacatgaatatttccgccaggggcgaaagcgccatacgaaaatgcctgattcaggtggccttgggccgcgccccggccgacaggctggtgcgtgtgggccggatttttgacaccggatcacgcacctggatagacgatgccgaaattgccttttgccaggggcgcgtagcctttctgggtgcaaggggcagcttttccggaacagcgcaggagacttttgaccgcagcgccttcagcgctgtgccggggctgggcgaagtacacaaacatatcgaaagctcgcatattacccccgagtgggaggcggcgctggtgctgccgcgtggcaatacatggacctgcgaggccagccatgaattctcaaatgtggtgccgcgccatacgctggatttttggctcgccgcacgaaaggcgggctccccgctgaaaatattcccgctgcccggttccgctgttccacccaccgcctgggaacacggcgcgcatctggatggcgcggatcaaagccggtttttgcaggccagcctgatgacagccggactggacgaggtgatggactggccggcggtgcgcgacgccgacaatccggcgcatgcacgcctctggtcaatgatcgaggcgacctttgcggcccgcgccgtggtcgagggccatgccgccggtatccgcgacctgcccggcatcaacgcctttgccgcctcgggcattgcctccgatcacgaagcctggacggcgcaagaggcctgggaaaaactgcgccacggccttttcatcgaaatccgcgtgcacacaatgcccgagatcattgccggactgcttgagcgtggcctcgaagactggtcacaggtcgccgtgaccaccgatgaccgcagcgcatccgacacgctgaaactgggggcgagcgaccacaatgtgcgcaccgccatcgcggcgggcctgtcgccggagatcgccgttcaactggcgaccatcaatccggcccggcatatgcgcctgacgccctgggtcggctcactggcgcccggacgctttgccgacatggtgctcctgtcggatatggaccggtttgaaattgccgaggtctgggccgatggataccaggtgtccgagggaacccgctatctgccgcaggtgccgaaaatcaattggccggaatgggcgacgcagacaatccatatcggccgcgaattgtccgccaccgactttgccattgccgccgaacccggccgagacaccatgcaggccgcaatcctgcgcccctttcactggaccgatgactttctgaccatggaactgccggtggaagaggggctggttcagcgtgatgcggatcgcaatatcaccaagttttccattgtcgaccgttactcgggcaagggcgccgtttcaaaaatgttctggatcggctgcggtccgcgtgaccccgacacggcgctggcctgttccatgggccatgacaagcacaacatctggtgtgttggttcctccgacgctgccatggcgcaatgtgtgaatgcgcttgcagagatgggcggcggctgggtcctggtgcatcgcggcgtggttgtggcgcgcgttcgctacgaaatcgccggcctgatgacctgccgtccggcagaggccaatgacgccgaaatgcaggcgctttacgccgctgccgacaaggtcgactggatgtatgagccaagctttcatccgcgctggcagccgggtttccccgagcgccttgcggtggcgacgctcacctgttctccgtggcgctggaatctggtcgcgcccagcgatcacgcgcctgaagggctggtccatgtcgccacgggcgagacgcacccggtggtcttttgatgcccgttggaaccatgctgatgaaccccctgatcgtcgataccgatggcggcgtggacgacgcccaggcgctgatgatgctgattgccaatggacgcccacccatggccatcaccaccctgttcggcaatgtcagcctgcatcaggcgacagacaatgtgctggccaccctggccatcgcgcgcgctgatattcccgtccacatgggggcagagaaacctctgaagcaggccacgcttgatgcccaccagatccacggtgaagatggcctgggcggcgttgacaggcccgatgttacagcccggcctgccagcgacgatgccatcggatttctcgtcaaagcgctgggcaaagccgccgctgccggcgaaaggatcgacctgctgatgatcggcccgatgagcaatctggcccgcgccatcaccatcgatcccgccattatcgagggccttggccaactcacaatcatgggcggcacactccatggccgcggcaacacgaccccggctgccgagttcaacgtctttgccgacccggaagccgcccgcatggttttcgcggcctccatccagacaatcgtcgtgccctgggagccctgcatgacccataacatcaccggccccgcctatgatgcagtggtcgccgatttgcccgacaccccgcaaaaacgcttcatgaccggattggccgcccatgcccgcactgtaacgcaaggctacggccacccggatctcttccgcttcgtcgaccccttcgccgccgccgtagtgctcgatccatccatcgtcacaagcagcattcaggcctccgtcgatgtatcactggccgaaggcatagcgcgcggcatgaccgtggtcgacccaaccggccgcctcggcacaccgcctgtgacattggtcgaaacaggcgacctggacgccatgacgaggatgctggttgcagcagtaggttatgatccggatgcgtgagaataggggctatgtgtcgctgttgggatgtactttaaggaacgaagaacaaaattgctgacgctgtttcaagtttcctccaacccgtgcggcggtactgacgtcttcaggtccggatgcgacatcgatgcaatggctttttgatgctttaggagctcagtagcgaatagtttggattcggtctctgaccgagggtatttatgccatttggcaagagaactgatgcgcaattttcggatatctttctcgaaaaaacggtagacgattttttcgagtgacgatgataaggcaattagatcttgacgtatgacaatgcctacgttcgggaataaatcggacgggacatcaactagcgtctggtagagagtgttcatatagtcttgaacgaaattcgcttctctctttgcttccgttgtttgccatggggaactggaaaccgatcctgtcgtaaattttgtgaaccaatgatcgaaatggtctcttgatatcataatgtgaggtgtcctcagaggctgaccgttttcgtcctccaggccgaggacaaccatgacgcgaagctccattgcggactccaacaagtgttcgtgtgcttgaatgcgtcgctccgcgattttttcccagagctttaaggaatggtcttgcctgcgcagtagccatgcggttgcaagggagattagtcctgtgctgagtgcgcccgctaacgcaaatactgcgctcgaattgttatttaggaaggtggcaaagtccatttggctctgtgtgtccgatgaagctgaataagatgcccttattcatatacagaaacatgacgggcgtctaagggcattgccttacggcattcggatttgaaaaagaatcttagtattctatttcaggcttgcagtgctcggtacaacgtcgagcgaactatacccagagatacggcgacagatgaaggacggtcaccagcatcgaccagctttcgggcatgtttatctaggcagcagtaagagcgggaggacgccctacctttaccccatgacttcgcgccgctttgagacctgcttgcgttcgttcaacgatcaatagccgttcaaattcggcaagagcgcccatcaggtgaaacctcatacgaccttgcgcggtcgtcgtgtcgatgccttccgtcaggctttggaagtgggcacctttggcatcgagattgcgcactacttcaatcagatgcgtcagggagcgcccgacgcgatccatccgccagacggtgagcacgtcacccgtttgcaaaccagaaagcagcttgtcgagtttgaggcacttggcagacgcaccggacacttggtgagtgacaaccttttcgcatcccgccgccttgaggcatcgcgttgcgaattggcgttttgatcgacggtagagacgccagcaaatccgattttcatgcggagtttttgcgacatccaagcctttgaatttacttgcccacaaaaaccgttgcaaaaactatcacctataaaatagactataattagctaatatttaattagacaagctaatgaccgtgcctatccgcttgacgcccacacccactacatctagcttggcttcaaacggataggaggtgactgtggacgttctcgaccgagaggaccttccgtttccggaatcgctcccggg

SEQ ID NO: 20 - DNA, 30082 bp, Artificial Sequence; identical to SEQ ID NO: 19
  Synthetic Oligonucleotide
  misc_feature (1)..(9997): n is a, c, g, or t

SEQ ID NO: 21 - DNA, 28601 bp, Artificial Sequence
  Synthetic Oligonucleotide
  misc_feature (1)..(1839): n is a, c, g, or t
nnnnnnnnnnnnnnnnnnnnnnnnnnnnnnnnnnnnnnnnnnnnnnnnnnnnnnnnnnnnnnnnnnnnnnnnnnnnnnnnnnnnnnnnnnnnnnnnnnnnnnnnnnnnnnnnnnnnnnnnnnnnnnnnnnnnnnnnnnnnnnnnnnnnnnnnnnnnnnnnnnnnnnnnnnnnnnnnnnnnnnnnnnnnnnnnnnnnnnnnnnnnnnnnnnnnnnnnnnnnnnnnnnnnnnnnnnnnnnnnnnnnnnnnnnnnnnnnnnnnnnnnnnnnnnnnnnnnnnnnnnnnnnnnnnnnnnnnnnnnnnnnnnnnnnnnnnnnnnnnnnnnnnnnnnnnnnnnnnnnnnnnnnnnnnnnnnnnnnnnnnnnnnnnnnnnnnnnnnnnnnnnnnnnnnnnnnnnnnnnnnnnnnnnnnnnnnnnnnnnnnnnnnnnnnnnnnnnnnnnnnnnnnnnnnnnnnnnnnnnnnnnnnnnnnnnnnnnnnnnnnnnnnnnnnnnnnnnnnnnnnnnnnnnnnnnnnnnnnnnnnnnnnnnnnnnnnnnnnnnnnnnnnnnnnnnnnnnnnnnnnnnnnnnnnnnnnnnnnnnnnnnnnnnnnnnnnnnnnnnnnnnnnnnnnnnnnnnnnnnnnnnnnnnnnnnnnnnnnnnnnnnnnnnnnnnnnnnnnnnnnnnnnnnnnnnnnnnnnnnnnnnnnnnnnnnnnnnnnnnnnnnnnnnnnnnnnnnnnnnnnnnnnnnnnnnnnnnnnnnnnnnnnnnnnnnnnnnnnnnnnnnnnnnnnnnnnnnnnnnnnnnnnnnnnnnnnnnnnnnnnnnnnnnnnnnnnnnnnnnnnnnnnnnnnnnnnnnnnnnnnnnnnnnnnnnnnnnnnnnnnnnnnnnnnnnnnnnnnnnnnnnnnnnnnnnnnnnnnnnnnnnnnnnnnnnnnnnnnnnnnnnnnnnnnnnnnnnnnnnnnnnnnnnnnnnnnnnnnnnnnnnnnnnnnnnnnnnnnnnnnnnnnnnnnnnnnnnnnnnnnnnnnnnnnnnnnnnnnnnnnnnnnnnnnnnnnnnnnnnnnnnnnnnnnnnnnnnnnnnnnnnnnnnnnnnnnnnnnnnnnnnnnnnnnnnnnnnnnnnnnnnnnnnnnnnnnnnnnnnnnnnnnnnnnnnnnnnnnnnnnnnnnnnnnnnnnnnnnnnnnnnnnnnnnnnnnnnnnnnnnnnnnnnnnnnnnnnnnnnnnnnnnnnnnnnnnnnnnnnnnnnnnnnnnnnnnnnnnnnnnnnnnnnnnnnnnnnnnnnnnnnnnnnnnnnnnnnnnnnnnnnnnnnnnnnnnnnnnnnnnnnnnnnnnnnnnnnnnnnnnnnnnnnnnnnnnnnnnnnnnnnnnnnnnnnnnnnnnnnnnnnnnnnnnnnnnnnnnnnnnnnnnnnnnnnnnnnnnnnnnnnnnnnnnnnnnnnnnnnnnnnnnnnnnnnnnnnnnnnnnnnnnnnnnnnnnnnnnnnnnnnnnnnnnnnnnnnnnnnnnnnnnnnnnnnnnnnnnnnnnnnnnnnnnnnnnnnnnnnnnnnnnnnnnnnnnnnnnnnnnnnnnnnnnnnnnnnnnnnnnnnnnnnnnnnnnnnnnnnnnnnnnnnnnnnnnnnnnnnnnnnnnnnnnnnnnnnnnnnnnnnnnnnnnnnnnnnnnnnnnnnnnnnnnnnnnnnnnnnnnnnnnnnnnnnnnnnnnnnnnnnnnnnnnnnnnnnnnnnnnnnnnnnnnnnnnnnnnnnnnnnnnnnnnnnnnnnnnnnnnnnnnnnnnnnnnnnnnnnnnnnnnnnnnnnnnnnnnnnnnnnnnnnnnnnnnnnnnnnnnnnnnnnnnnnnnnnnnnnnnnnnnnnnnnnnnnnnnnttcgaagtcgagcccgatacccgattggatgcggtcacgcggttgctaaaccactaccaacccacctccaccgtcgcgttttgcaacacccgggtgcaatgcaacgatttggtgcaaattctgcgtgcgcatggcttctcggccctgacgctgcacggcgacctcgatcagcgcgatcgcgatcaagtactgattcaatttgccaaccacagttgttcggttttagtggccaccgatgtggcggcacgcggtttggatattgccgatctcgccgctgttatcaatgtcgacaccacgcctgacccacaggtctacacccatcgcattggtcgtaccggtcgcgcaggcgcgactggcttggctttgagtctggtcaccatgcccgagatgagtcgcgtggcacgcatcgaagaggtcaacaaccgtccagcgcggtgggcgaatttgtcaacgcttcaagcgacgggcagcgctttgaaggcgccgatgcgcaccttgcaaatcgcgggtggacgaaaagagaaaatccgtgcgggcgatattttgggcgccctaaccggcgaggcggggttcgataaatccgaagttggcaagatcagcttaggcgaattttcaagctacgtcgcggttgcggtgcccatcgcccagcgggcttgtgacgccctcaacgcgggccgcgtgaaaggcaagcgcgtgaaagtgcgcttgctcgataactgatctcaggcggctggccagtcaaacatcaaacccaggttttgcaccgccgccccgctggcgcctttacccaagttgtccaagcgggccaccagcaggctgtggccatgcgtgtcgttgccgaacacgtggatctctaggtcgttggtatcggccagcgccaatgcatcgagcttgccggtgtcggcggcatcctcgtgcctcacgacccgcacaaagcgactgttcccgtagtgcgcctcgaacaccccagccaagcgggccttgtcggtacccgctgccagttggtcgcggtgcaagggcaattgcaccaacataccttgtgcaaaattgcccacgctggggacaaataaggggcgcgtttgcaagcccgtccactgcatgatctcggggatgtgcttgtggctgagtcccaacgcataaagctcatacgcgggcgcactgttggcttcataagcctcaatcatggtgcgaccgccgccactgtagccactcacgctgggcaagcaaaccggcgttgtcgccggcagtacgccagcgtcaatcagggggcgcaacagggcgatggcacccgtggcgtagcaacctgggttggccacacgttccgcctgctggacggcggcggcctgcgacgcacacaactcagggaagccgtaaacccagcccggggcgacgcgatgcgctgtcgaggcatccacaatccgcggtgctttttgacccgccgctttcagctcgtccaccaacgcgaccgtctcgcgggcggcatcatcgtgcaggcacagcaccaccgcatcggcctgcgccaacagggcgcgtttggcagccacgtctttgcgcaaagcggggtcgatttgcagcaactgaacgtgcggcatcgtcgccagacgctcgcgaatctgaagtcccgtggtgccggcttcgccgtcgatgaaaatattagtcatggctgatatttggggttgcggcccgcgtcgccgtcagtttggtgaaaaatttctgcactgcaacatgatacagtctacggttggtaatttcctctgactggcctagcagggttgcccccgtttttgccataaaagggaagtgatttgtccctactttgagagccctgacatgaagatccacgagtaccaaggcaaagagatcctgcgccaattcgaggtgccagttccccgcggcatccctgcctttacagtgcaagaagcggttgaagccgcacaaaaattgggcggccctgtctgggttgtcaaagcgcaaatccatgccggtggccgaggcaaaggcggcggtgtgaaattggcccggtcaattgacgaagtcaagcaactcgctggcgagattttgggcatgcagttggtcacgcaccaaaccggccctgagggacaaaaagttcgccgcctcttgatcgaagacggcgccgatatcaagaaagaatattacgtgtccgcggtcaccgaccgcgccagccaacgcgttgccatcatggcttccagcgaaggcggtatggacatcgaagaggtggcgcacaagacgcccgagaaaatcatcaaggtatttgtcgaccccgcaaccggcctgaccgccgcgcaagcgaccgagctggcaaacggtattggtgtgccagcggcatcaaccgccgctgcggctgatgtgtttcaaaaactgtacaaatgctacatggacaccgacgcctcattggtcgaagtgaaccccctaatcctcgaaggcaacggcggcatcaaagcgctcgacgccaagttcaactttgacagcaacgccctgttccgtcatcccgaaatcgtcgcgtaccgtgaccttgacgaagaagacgcggccgaagtcgaagcctctaaatttgacctcgcctacatcagcctcgacggcaacatcggttgcttggtgaacggcgccggtttggccatggccaccatggacaccatcaagttgttcggtgccgagcccgctaacttcctagacgttggcggaggtgccacgcctgagaaagtaactgaagccttcaagatcatgctgaagaaccccaaagtgaaggccattttggtcaacatctttggcggcatcatgcgttgcgacacgattgcacagggtgttatcaccgcgtgtaaggcggtcaacctgggcgtgccgttggtggtgcgcatgaagggtaccaacgaagagctgggtaagcagatgttggcagagtctggtctgccgatcatcagcgccgactccatggccgaggccgccgaaaaaattgttgctgcggttaaagcctgagcgaaaaggaataagcatgtccatcctgattaataaagacaccaaagtcatcacccaaggtatcaccggtaagaccggtcaattccacacggaaaagtgccaagagtacgcaaacggcaagaactgtttcgtcgccggtgtgaaccccaaaaaagcgggcgaaagcattttcaacatcccgatttacggctctgtgaaagaagcggccagcaccaccggtgcaaccgtatctgtcatctacgtgccgcccgcaggcgctgccgccgccatctgggaagcggttgaagccgacctcgacttggccatctgcatcaccgaaggtattcctgtgcgcgacatgttggaagtgcgtaaccgcatggccgccaaagaagccgccggtggcaaaaagaccttgctgttgggcccgaactgccctggtttgatcacgcctgacgaaatcaaaatcggcatcatgcccggccacatccacaagaagggccgcattggcgtggtcagccgctccggcacgctgacctacgaagcggtgggccaattgaccgagttgggtctgggccaatccagtgctgttggcattggtggcgaccccatcaacggcttgaagcacatcgatgtcatgcgcatgttcaatgacgaccccgacacagacgccgtcatcatgatcggcgaaatcggtggtcccgatgaagccgaagccgcccgttggtgcaaagaaaacatgaagaagccagtggtcggctttatcgctggtgtgaccgcaccggctggtaagcgcatgggccatgcgggtgccttaatctctggtggtgaagacaccgctgaggccaagctggccatcatggaagcttgcggtttcaccgtgacccgcaacccgtccgaaatgggtaagctgctgaagcgcttgctgtaaaccggatcggcagcgtcagcatgccgctggcgcgtgttcgtgcaaaaatggcaacgtgttccatgcgttgccattttttttgatacgttcaatcgaaagaaaataaccggtgcttgagtttttaacccctgaattctggatcgcggtgggtcaaattatcttgattgatattttgctcggcggcgataacgcggttgtcatcgctttggcctgtcgacagctgcctgaaaaccagcgcatgcagggcatcatgtggggcactgtgggcgcgattggtttgcgggtgttgcttatcgtttttgcgctaacacttctgaccatcccttatctgaaaatcgttggcggtttgttgctggtgtggattggtgtgaagctcatgatccccgatgaggaaggagaccatagcgtcgtcgatgccagtgacaagctctggtcagccgtcaaaacagtcatcttggccgacttggtcatgagcatcgacaacgtcatggccattgctggcgccgcgcagggtgctgccgagcatcaacaagtgccgctggtaatttttggcctgctggtcagcgtgcccatcatcgtatggggcagtcaattggttttgaaaatcatggacagcatgcccattgtcatcaccttgggtgcaatgttgttgggctggattgccggcatcatgatttggaccgacccggtgctggtcgatgtgctgccgtctgagcccctgatgggtttgtctttgcgccattgggcggggtttgtcggtgcttgcttggtgtgggtgattggtcgtgcggtcatcgcaaagcgccctaaacccttaggggcttgacgttatctctgagcgccttagacaccgtgcatcgttggttcaactttggaaacaacccggacactcattcatgcaactttccagcaaccgtaaccttggcttcaccttgattgaattgatggtggtggtggccgtggtgggcatcttggctgcagtggccattccgcaatatcaaaactacacccaacgcgcgcggtgggccgccaacctcggcgccattgccgcgttacaaggtacggtcagtgagtgcctcggccaacaagccaacgacatcacgttatgcgacacgtttggcgaacttggggtcaccagtggcctgaataccgacggcgtcatgccgttgccccatggcacggttgccgtgcaagccagcggtgatgccaccgcgattcgggttgttttaacgggcgctgccaatgcgggtaattgcatcatcacagccagcttgacgcccgcagaaggagcccaaatgctgcaatgggccctcacgcgggacaccacacaaactaaatgtaccgctgccaacacgggcgttgacgcagcaggctgattcgggcgtaagatgcggctttaatttttggagcccagcatggcaaaaggtcagcaaaaaacaaacaaggaatccaaaaagcccaagaaggccgccgccgccgcccctgctttgaacagtgcgcaagaacccgtgcgtgccgtggtcaccacatccgtgatgcccaaaggcaaggctaaaaataaaccggccttctaatatttattagctatttattttaaaaattaaacaataaaagagtacttattgactattatgttgtgaagtaatcgacttgccttccgcaagccgttgattcacacatggggcaggctctgcaaacattcactcgacgggcgacgctcaaaaccccggtcatcatgcgggggtacctcacgcttgatgcactgctgatggcggagttggtcactggcgacgtctcgcacttactcaagcgagatgcgcagttgtactacgccagcgccgcctttttggtggacccgcttgaggaaaagcaaaaggcatcatttgttgccagcatgcggcccgagcaccacccggagctccgcgagctcatcgcccccaacacgcacacacccaacgcgccaccgcttttgcacacgcatcggtcgcgtggcaatgtcaacgacgtggcaattggacgcgctcgccgcaaagaagcgggcaacatcctcaaccaatacgtggcccacgctgctgcagccgtcgagtggtatgccaccggccatgccgagcaggtctggcaggttgtgcaagacatcgcatttattggcaaaaagcgatcagcgggctacggcgaaatcgacgcatggcaggtgatccccggccaccttgatggcctcaccgatgacttcggagagcccttgcgccccgtgccggttgagcgatggccaacctccgcgacgcttattccctccgaggccgcatggtgcgccccgtattgggatattcgaaaccgaaccaaatgctacacgccggagccacgatgaacggcgccgacttcttaatgcaacacatcggttatcggttattgccgaaagcgatgcacaccggcgatgccgtcaccgatgccaacgcgctattcagcatcagtttgcccctacacaccggaaaaacactccggctttccagttgctggtgggtgatcacacccgatgcaacgtacaccagctttaaggccatccccgagaccggcgccattcaggggcagttgcggcaggccgtcatcttgtcatccctaaaaacgggattgcccctcttgatcctcgcgattggcaagagccccatttacgcacgcgacctctttgtgacctacgacccacgcgcaacgcgctattgcagcgatcgcagtttgcgcaccgttgattcaactctggagaagtggtggacaccttaatcagcaagcccatccagctgtgcggctatgcgctgcaccgcttggttgcgcaacatcaaaacggtgcgccagcgctctggcgtgacgagggtgacaccgtgcgaattcgctcgcgtgacgcctgtccgcccacctacgtcacagggcaactgttgggctttgtcacattggcgtgtgtgtcgtttggtagcaaacaccggtacctgccggtcgccgattggcgtggtcgcaaagcgtggctggaggcacagggcatcaaacacggtttcgaggtggttggggtgcacgcccagggtggcatgcaaaccgtgaccacccatgacggtcgccacttcaccattgatgccacgcaattcacgggcttgctgcgcgtcacccagcctgcgccattcaacgactgtctgctcaacggcatcggcaaagtaggcaaagcctttggcctcaacttactcgtcgttcattaacccaacgcttaaaaacgcttatccggagttcaccaccatgcaagacgttcgcatcgatatcgccatcaacacgattcaacccatcaccttcacccatcacggcatcgacgggttgcccaccatggttcgcggcgttgacatggagggtcatcccctgcgcaccgtttacattccagccgcgcagtttcgcggtcggctaaggcatgaggcggcgttggcaaaaatgcgtaccgcacacggccccatcaagttggcggaagcctacatgctggccttggggcaaaacatcgacaccaaagaagacgaggctgatgagaaagtgcggttgggcgagctactcgctttacgggcggccaaccccttcattgatctcttcggaacgtggcgcatggacagccggctttacgtgtcgcacctgatgccggtcgtcaacgtcaagcccgacacctttcaccacatccgccgcgatctagacaccaacgacgcgttgtttgccgacttacccgaagccgagatcgacgtcttttacgaaaggcaagacggacagtcgcaagcctctcaagcggagagtctgattaaggtggccacccgcgaactgcgcaaagccaaaaaagaaaacgacctcgccaaatgcgacgagttcgaagccaagatcgaagaactcaaagccctcaagaaggcgcacaaagccggtgacgaatcgggcaacaccaaacacttggtggcgatggaggccgtccctgcgggaattcaattgttgtgcaaactcatcataaagcgggccacgccgctcgacctcagcatgctcacgggtgcgcttaacgcgatcagcgaattccccatgatgggtgcccagcgggcccgtggctgaggcaaggtgagtggcgccgcaaccgtctgccacacccagggtgaggtgttggcgcaaatcgccttcggtggttttttgccagctgcactggagtggaccgatgcgggcaccgcgttcatgactggcctcgaaacggttgccgtcgccgcgtgaaaggcccttaccgcagcccacagcaggcgcaatacgccaagctcatcgagcgcgctgtcagcaaacccggtgcgcccctgttggcgggtgctgcgcccgggctcggtaagacacacggctacgccatcccgttgttgtgcagtggcaaaaaagttgccatcgccatgagcacgcgccaactgatcgatcaatttatggcgagcgatgcactcgccgctgcgcaagccgcactagaggccgaggggcggcccgctgccaccgttgtcgccttgcaaccccgccgtcaatttgaaacggcggtggcctacagcgcgcacaaaacggcggcgcttgatgccgacgtcttggtgctcacacacatgggcgtgctcatcgatacccacatcccagcctacgcccagttgcgtcagcgcgctgtcttgttgtttgacgaagccgatcttttggccgatgccgccgacttgcgcagcacctatcgcattgaggctgaggccttagcccgcgcaggcgtcgaaaacgccacaccgacaaaggcggttgaaaccatcattaaaaaatccgatgaccccgaggaaaaagcagtcgccacagccatccaacgcgctttggcagagccggcttggtacaaagtgatcggtaaagaagacaacggcgatttggtgctgacccaccgcatgccggggcgcatgttgcgcaccctcatcaatgacatgccgcggtgcattttcaccagtggcaccctcacggtatcggggcgttttgaccactttgtcaaagccatcggcctgaccgcagtggcacccgaaagccagcacattgaccccgtgcaacacggccaactgcgcgttgaggtggccagtgaggccctcaccccagaagcacaagccgaacgcatcatgcacgcggcgacaccggtattggtgctgaccaccagccacgcgactacggcggcgttgggctctttgtgccccggtgccatctgccgcgcacccggtgaagccctcatggatgcggtggcgcgatgccctgatgatggcatcttgatcgccgctggcgcctggtctggcctcgatgcgccgcgcctgcggtggcaaaccgtggtcatccccaaaacaccgtacggcaaaccactcatccttgacgcccagcagataagcgcttacgtggacagcaaggttgttgccatcaggcgcaccaaccaagggttacaccgtgggctgcgcaccaccgatgccacctgcaccttgctgttactcgatccggatagccgtcgtgccgatttacgtcaagccattccccgtcgtttcttggtggattgggacagcgtggccgagggctcgttggttttgcgcacgcacttcgcccgtgaacgaaaaaaaggtctgcgtgaaaaaaccctgagccggcgcgggcagcactgcgaacaccccggctgtacggccacccaagagcatttgctggaggtgcaccacctcaacccgattgccaacggcccccgcgacacagttactgatgacctgcgggtgctttgtaaaaatcaccacgcggatgcccaccaagccatgcgaaaagctgattttttaaaagtgaaaacaactgaaaagcgtgcagaggcagacacttaggccacagctggtcaagctacgccgtaaatgcgtagttactggaacttcgcgcgagtgcttagataggcttccatcggtcaagctacgccgtaaatgcgtagttactggaacttgcgtgtggtatcagttcagcgtggatcgggtcaagctacgccgtaaatgcgtagttactggaacgaagttcacgttgacactgccttggatacgggtcaagctacgccgtaaatgcgtagttactggaactggtagcggctgcttgttaagtaaggccgaggtcgtctggggtcaagctacgccgtaaaggcgtagttacttttagcagccagttttgctggttttaagcggtccaatggcccgacttgccgcccatcttttcaagcaggcgcacgcccgtcatggtcatgccgcggtcggcggctttgcacatgtcgtagatggtcagcaagccgacttgtacggcggtgagggcttccatttcaacacccgtggggccggtggtttcggcggtgacggtgcaatgaacgtgggggggctggtcaccggtggtgaaggctacgcgcacatggctgagcgccaagggatggcacaggggaatgaggtcagcggtgcgcttggaggcttgtatagccgccacgcgcgcaatgcccaacacatcaccctttttggcgttgccatcgcgaatcagagccaaggtgtcggcgtgcatttcaatgcgcccttctgctgtggcgctgcgcttggtgttggctttgtcacccacgtcgaccatgtgggcttggccttgtgcatcaaagtgggtcaggggtgaagggggctggctggacacggtgcaatctccgaaactttgcaaaacttagggcatcatacccatatgccttcccccttgtttgttgctcgccgtcgccctcgtttggcgtgggcgttgccgtgggctttgggtgccgccctgctgctggggccaaccacactcaccgttgcgcaaccccgcgcggccttgcccaacttgggtggtggggtgtcgttaacgttgggggatgagcgtcggctgggccaacaaatcatgcccagcttgcacaacagtggcttggtggtggaagacccgctgctcaaccaatacctcgcagatctgtggcgccctgtgtttgcaacggcgcgcgcgcgcggtgatgtgcccgatgacatgttgcagcagtttgcttggcagttgtggttgctcagccccaaagccatcaacgcgtttgcattgccggggggttactttggctttcacttggggctgttggcatcggccacggatgacgctgcactggcgtcggtgttggcgcacgagttgagccatgtgacacagcgccatattgcccgcatcattcaagcccaagagagccaagcgccttggctgattggcgccatgattttgggtgccgccaccatcgccgccagccccgatgcgggtgccgcgctgattgtgggtgggcaggcggcgtccattcaaaaccagctcaacttctcgcgggacatggagcaagaggcggaccgccaaggtttggtggtgttgtcggaggcggggtttgattcgaaggggtttgtgcgcttatttgaaaccctgcaaaacgccaaccgcttgaatgacgatggtgcctttccctacctgcgcagccacccgctcacgaccgagcgtgtggcggatatgcaaggccgcttgttcagcgtaccggccgagcccaacccggtgggcgatggtgcggtgcagatgcgcgaccccgatgcctctgctttgttgcgcgtgcgtgccgccgtcatcgcctcggctgatgaggtggatgtgttgcaaggttggggtgcggcgcccgccgccactgggtcagtgggcagcgccacccgcccggcagaacaatgggcgagcgactaccggcgcgcactggccgcgtgggcactgaagcgccccgatgtggcatggacgcgcctgcgccaattgatgaccgaggcggctacgcaacccgccgtgtcgcaggtgctgcgcgagacggcgttggcttggctggccagccccgctaagtttgagccgatacccgctgcaacggtgcaggcttgggttgaggcggccttggccgatgcccaagccggccggcgctcggcgctgctgctgttggcgggttatgcggccagcgccaattcaacggtgccgaatgagcagcgcgcgcaggtggtcggggccttgcgtacgtggttggcgacccaccccaatgatgcgttgggttggcagttgttagcccgtttgagtgcgcaacaaggccaagccttggtggcgttgagggccgaggccgaggcctttgtggcgcgcgagctgtggcaaggggcgcttgaccgtttgtctgccgccaagcgcctgattgcggaggctaaaacccgtttcagtgaagccgacattgcgattatttacgcccgcgaaaaggcagttaatcaagccatggcatttgcacggtctgagcgccgttgagcgcgcaccggtacactaagtcccccatggcagtcatccacatctctgacatcgagtcggccatcaactattggcggacacaaaaaccttcacccgacggtgtgacgctgtgcgccgaggtgcgcgccttggccgaggtttatgcgctgctggtgtactaccacgagaccgaggccgatgaggccagtatgccgtttgatgcctatgcggcctgggaggcttggttcgacacgacacccgatacgccgtgtatcgcgatctgctcaaccagccagggcgatgacctgtgtaaaggttgtggccgtacctttgaagaggtgcagtactggaccgaaatgcagcccgccgaaaagcgcgcggtttggcgtcgcatcaccctgcatggcgatgcgtggcgctttaaccgctaccgcgaacgggcgatcgagaacgcggcgtaaccgcgtgccgtcagcctttggcggcgcgcaacgccaattcggcggctttaccgacgtaggtggcaggcgtcatggccaacaaacgcgctttgtcggcgtctggaatagccagtgactgaatgaggccgtgcaaggcttcacgcgtgacggttttgccccgtgtgacggctttgagttgctcgtacgcgccatcgataccgtagcgccgcatgacggtttgaatcggctctgccaacacttcccacgcgttgtcgaggtcgtccgccaaggcgtccgcgttgagttcgagtttgcgcagacccaccgccatcgattgatacgccaacaccgagtagccaaacgcgacgcccatgttgcgcaacaccgtgctgtcggtcaggtcacgttgccagcgcgagatgggtagcttttcactgaggtggcgcagcaaggcattggccagccccaagttaccttcggcgttttcaaagtcgatcggattgactttgtgcggcatggtggatgagccgatctcaccgtctttgaggcgttgcttgaagtaacccaagctgatgtaaccccacacgtcacgcgcaaggtcgatcaagatggtgttgacacgggccatggcgtcgaacagctcggccatgtaatcgtgtggctcaatttgaatgctgtagtcctggaacgttaagcccaagccattgggtgcgggtgaggccaccacgcctttggcaaaggcctcccaatcgacgtcgggccaggcgctcatgtgggcgttatagttaccaaccgcgccgttcattttggccatgatggcgacttgctcaatgcgcaaggtggcgcgttgcaggcgcacggcgacgttggccatctctttaccgacggtggtcgggctggcggtttggccgtgggtccggctgagcatgggcacgtgggcgtactgctcggccatgcccagcagcagattcacgacgtcgcccaacatgggcaacagcacttcgcgtagcgcggcttgcaattgcagtgcgtggctggtgttgttgatgtcctcgctggtgcaggcaaagtgcacaaattcgcctgcacgctcaagctcttcgcggaccgctgggctaagacggtcatttcggaaagcgcgtttgatccaatactcaactgctttgacatcgtggttggtctcgcgctcgatggccttgatgtcggcggtgtcggcttcgctgaattgctgaaccaagccccgcaggtaggcggtcgcctcggccgataaggcgggacactccaccagaccggcttgcgtgagggcgataaaccacgtgatctcgacttgcacccgcttgtgcatgtagccatgctcgctcatgatgggtcgcaaggcagccagtttgccgctgtagcggccgtcaagcggggatagggcggagatggtgtagaggtcttgagtcattgggggcggggcgcgatgtgcaccaaaatagatagccaatattgtaggcgcccagccaaattaaacctttggctgtatacaggtttgatgagcttaaaagcgaccaggattccttttggcgcccgtgttttggggctttctgtggctagaatcattgctcgatcaaccattattgaaacccatgaaactcatcggctctccaaccagtccatatgtgcgcaaggttcgcgtcgtcttggttgaaaagcgtctcgagtacgagttcgcaaccgaagatgtgtggtcggcggataccctgatcgcagcggctaatccactcgggaagatcccctgtttgatcatggacgggggtgaggccatgtttgattcgcgcgtgatcgtagagtacctcgatggcttgtcgccggtgagtcgtttgattcccgcaagcggccgcgagcgtgcggaagttaaaacctgggaggccttggctgacggtgtcatggatgccgccatcttggctcgcttagaggcttcatgggctgggcgcaccgaggcccaacgctcaccggcttggattgaccgccagttgggcaaagtggagttggcggtggctgccatggccaaaggcttgggcgacaagccttattgcagtggcattcatttcagtttgtcagacgtggctgtgggtagcgcgttggcgtatctggagttccgctttccacaaattaattggcgcgaaacgcatcccaatttgtccgcgttgttagaccgcttgatgcagcgggccagctttgcaggcacggcgcacgcctgatagcccatcgctctgcggggtttatcccgcgcgctttttgagccagcgcatgagggcgccgatgacggggagcttttcatacagctcttccgcagcgtcccagtagtcgcggtgaaacaccaccaagccctgcgcgtcgaagcgcaaatggctggcaccccggatggtccaggggcgaccgcccttgccgccctttcggcctttggtgctgaatagaaaatcccaagttaaaaagcagtcatcaccctgttcaatggccgtcgtgaccacgaagcgcggttgttcaaggcgcttgaacatgtcatcgaagatgtgctgaacttgcgccaactgcgtgacttcgttgaaagggtctttgaaaaagagcggatcggcgtagtacgcacccatgcgcgtcacgtcagcggcttgcaggttttcaaaccatgccaataacgcttgtgtgcgggccgatacctgatgacgggatgcgctcatagtcgggtgagttttttgatgagcgcttgtgcccagcgatgcggcaatacgcgcagcaatttgagtcaccaggtgaagcgtttgggaaagtggatgtcaaagaggccatcagcccaaccagccaaaatttcggtggctgcaacatcggtggtgatcaacgcaggcatggtgaactcgttctgcgcggtgagtggggtttctacaaagccggggtggatggcgctgatacccagccccttgcccgccaagtcgtaatgcagtacttcagcgaaatgggtgagcgcggctttggtgggaccgtatgccaacgagttgggtaacccgcgccagccggcgacgctactgataaaactgaggtgaccaaatccttgttgcaataaggtgggcaaggtggcatcgaccaagttataggcgcccacgacgttgacgtcgagatgttgcttcatgcgtgccaagtcaaaccggtaggcgcgcaggggcttgtaaatcccggctgcaaacagcaccagatcgagccgcccttgcgcctgcacaatgtgttgcaccgtgttttgcagcgcgggcaagtcggtcacgtctagtgggtaggccgccgcactggggtgctgtgttgcaaattgctgcaggggctcgctttggcgtgccgagaccattacccgggcaccgcgttgtgccaactgctcggcaacggcgtggccaatgccggtggaggctccaacaatccacaccactttgccagaccattccgtcagcggtgggttcatgggtttgaacaagcgggccatcaggcggcagtcattggtttttcgagcgtgaactggatcacgtccgtgttcgactccatgaaggcggcttcacagtaggccaagtagaactcccatgtgcggatgaaaggcgtgtcaaaacccagcgcgcggacggcgggttcctcgtgcaggaatttgtggcgccatgtgcgcagggtctcggcgtaatcgagaccgaatgccttctcattgacgacacgcaaaccagcgcgcccagcagattcgcggaattggcgtggactgggtaaacagccgccaggaaagatgtactgctgtatgaagtccgtgccttggatgtagcggctgaacaggtgatcggcaatcacgatggactggatacaggccttacctccgggtttgaggcgcttggcgatggtgtcgaaataggtgggccagtaggcgcgcccgaccgcctcgatcatctcaatcgagcaaaccgcgtcgaatggttcttcggggctgaccacgccaatgtcacggtaatcctgcaaccgcaagtcggctaactgtccgttgggggttgcagcgagtcgcttgttggcccagtcgagctgttctgtggacagcgtcaggccgaccatttcgctttgaaattcgttggtagccatttctgccaaggcgccccagccgcagccgatctctagcaagcgttggccgggcttcaagtccacctcttgcagcgcgcggcgcaccttttcgttttgcgccatggccatgtctgtgatgccattggcatacaacgcgctggagtagttcatggtgttgtctaaccacaaacggtaaaagtcgtttccgaggtcgtagtgcgcgtgaatatttttgcggctgttggctttggtgttgcggttcaaccagtgcttcacttggtaggcaaaacgcccaatggggtgaccgtatacggctttctcgatggcgtcgcggttttgaatcagcacctgcaacaagtgggcgagttgcggggtgtgccagtaaccggcaatgtaggtttcggcgaagccgatatcaccacttttaatggctgccgaaaacacacgccaatttttcaggatgatgtagccctgcaaaccaccaggtttgccgtagaccagccaggtgccgtcagggcattgaatgtgcaactccccatgcgtgattttggtgagcagcttgagcagtcgcttggccgcgaaggggactttgacgtgggcgagggctgccgcggtggtggtgtctcgttgcatgggtcgtcgaatgaaggctaggtaatgaactcggtgggtggcgcaggttttctgaaaaacggtacacgcttcagaaacaataacagggcttgccaatgaatgcgcgccatcaccccaaaggtcatgagggggtaggcccatagcgcgcgtcggcggctgcgcgcgtttaggggttcgagcgtaccactcacgctggtgcacagcaaaggaccgtccgcccattgggtgtcggtgtagtcaatgcgggcgaccacgcggtttggcaccccctgccccgtttgtttttggtgcatgaagttgaaccggtaactgccccgcacctcgcaaaagggggaaacatgaaaaaccttttcagtgcgctgctgtacacccagggttacgtggtccagtacgtagatgtgccgctcgccaaatgtgttgttgacctcgacgaccacggcttttagttcgtgcgcggcggtgtagcagtaccaaaaactgacgggcttaaaaacgtagcccaacacgcgtgggtaggtgtgtaaccacacttccccggtgcagtcggtgatgccctgctcgattagcaaggcatcaagccaagccaagctgtcggccccgccgacgccgtggtcactgtcgtaaaacgacaagggtgcccatcggttgcgcggaatggcctcgtcgaaggctgcagggtcttgcgcgccttggcgcatcggcagccaaacaaagtagttgccgtacgcaaattgatgcggggctggtcgggtgcgggtgtgccgcaccacgccaaatccaatctggggggaggccgtcacgcgctcgtccgttgggtggccgccatgtcaaggtgagcgcgcaacgcgttagctgcacgcagcccggactgcagcccgtcttcgtgaaaaccatagcccgtccacgcgccacagaagtaggtgtgttgggtgccctgtagcccggcaatttggcgttgggcgtcgatcgccgccaaatcaaaaatggggtgatcgtagtgataggtgcccaataccgactcgggcgcgatggcactgaccgggttcagtgacaccaccacgggctgcgtgaagggcagcggctgtaattggttgatgaggtagtgaaggcagacgcgggcgtcttcttgtgccaaagcgggtgcgcgttcgtagttccaggccgaccacgcttgacgagccgagggcaagaccgatgggtccgtatgtaaaacagccacattgggctggtagcggatcgcgcgcaaggtgctcgtttcggcgggggtcgcgtccgcgagcatggccaaggtttggtcggggtggctggccacgatgacgtggtcaaagggctcgataccccgtgctgtggtgatggacaccccattggcgtcacgggtgatgcggctaacggggctgctcaagcgcgcatcaggaactgttttgaggatggcatccacgtattggcgcgcgccaccggcaacggtgaaccatttagggcggttcgccacttgaagcagcccgtggttgtcacaaaactgtaccaaggtggcgacggggaacgccagcatctgagcggttggacagctccatatgctgcccagcatggggaggaggtaccagttgatgaatggctttgaaaaacggtgagcctctagaaaggtcgagagtggctggttttcttgatggccccgcgcctcagggggcgtgcgggcaattgcggtggcgattttgttgaaccgcagaatgtcgcggagcatgcgccagaagtcgggtcgaaacaggttggtcttttggctgaacaccgccccgagtgtggtgccactccactccagtgtctggccgtttccccgtgcattgggcaccttgaccgaaaacgacatgtctgagggcgccagcgggatcttgagttcggcaaataacgccaacagaccggggtaggtgcgctcattgaggaccaaaaagccggtgtcgatgccccaggtttgttcgccggtgggcgtgggcagggtgacatcaacggtgtgggtgtgtccaccgaaatagtcattggcttcgagcagggtcacgtgagcggtgtcacgcaacgcatacgcagcggacaaaccggcgatgccagagcccacaatggccacgcggggccgtatgccggacaaaggtgtttctgttgattgcgttaaagttttcatgcgcaggttggacaaaaggtcattattgggggtatgtccacaggtagataccctaggttgcccaaaaagtacttgccaaagtaacgatctggccgatactaacttgtcttagacaaaagacaaatttatttttacacccttacggttccaatttatatgacgtggatatacaccatctcggacatcgagcgcgataccggcatcgctaaagatcgtttgcgcgtttgggagcgccgatacggcttccccctgcctcagcgggatgacacccaagagcgggtctatgacgaagaccaattactccgattgcgcctcatcaagcggttgttggatgttggcatgcgcgccgggcgtgttgtgcccatgccgcttgaggtactgcagcgagaggtggaaagcgtaaccacccccatcgtggcgcgcgtggctgcgcaagaggatcaggcgctgctggcccatttggtctcgctgctcaaagccaccaatcgccgcgctttgcaccagacactcatgcaaatcattgcagaacggggtttggcggacgccatcgaggaggtcattgcgcccctcggcgcgcaggtgggtgagttttggctgagtggccaaatggccatttaccaagagcatttgtttaccgcagtcgtcaaaagcgtactgatgcaagccatggaacagttgccgttgcaagcgaacggaaaaccaccccgggtgttactggccacgttatcgacagaacgccacgaggtgggtttgttgatggcggagtccatgtttgcgcaagccggttgtgaacggttgtcgttgggccccagcatgcccctaaccgaggcggttacggcctgcttggcggtcaagcccgatatcttcgccctgagcttctccagccagaatgcgcccaaagaggtgctcagccagttgcgacagttgcgcggcatgttgccacccgagaccgaaatttgggtgggaggcagcgccgtcgcattgcgtttaattccagacgccaaagtcgccaaagtgttcggccgagccaaagatctgcgggacgctatcgaggcgtggcgtatcgagcggcactagcagaagccctttaaccactgagggggtctatgcgcatcatttttacgaggggcatgagcccccgtaaaatgcggtgatcgaaccaagttgcgcaggagtagtggatgctgtaccccgagttgttcaaacaactggaagcggtgagatgggacatggacaaggatattccttggaaagactttgacccctctgccctgtccgatgaacaggcccaaaccatcaagatgaacgccattaccgagtgggctgcattgcccgccacggagatgtttctgcgcgacaaccgcgatgactctgatttctccgcgttcatgtccatttggttttttgaagagcaaaagcattcactcgtcttgattgagtacttgcgccgcttccggcctgacctcgtgccaactgaagccgagttgcacgccgtgcgcttcgacttcgaccccgcaccggcactcgaaaccttgatgttgcatttctgcggcgagatacgactgaatcattggtaccgtcgcgcggcacagtggcacaacgagcctgtcattaagcacatttacaccaccctcagccaagacgaggcacgacacggcggtgcgtatttgcgttacatgcgccgtgcgattgagcgtttcggtgacgatgcacgcgccgcatttgccaaagtcggtgtgctcatggccagcgcgcgtcggacggcgcaggctttgcaccccaccaacttacacgttaacaaaacgctgttccccaacgacaccgtgcaaagccgaatgcccgaacccggctggttagagcattggttggatggtcaaatccagtttgatgtgacgtgggaaaccaaagtggtcgagcgcattttgcacaacctgggtttgttgtttggccagcggtttgatactgtgcaggcgctcaaccgctaccgcaaacagatcacaccggcgaccgcttaagcggtctcgaatacgctgttccacagggccaatatggcctctcggtatgcggctgcatcatccagcggcacttgggtgggtgcttcgtcgagacgcgcgcggtgttggatttgtcgcagcgaccggtaggcgtccatcgctgcctcactcacggttggcggcagtaaaccgcaggtttgcgcaattcggatcagcttgatattccctaaattgggaatcaattctgggtgctgagcgctgtgtgccagcagcaggtattgcacaacaaactcggcatccaccatgccgcccacgctgtgtttgacatcgaagagcccgtccggtacgtgatgggcttggcgcacgcgctcgcgcatgttcatgatttcggttttcaaggcggtggtgtcacgcggagccaccatgacgctgcgccggacggcgtcaaactgcgcctctagctccggctgccccatcacgaagcgcgcccgggtgatcgcttggtgttcccaagtccacgccgcgttgctgccgcgttgcgcttggtagtcggtataggcctcaaatcgtgtgaccaacatgcccgagttgccattggggcgtaacgcggtatcgatctcgtacaagtcaccctcagccgtcttgacggtcaaccagttgatcagcttgcgcaccagcgctgcgtaaatggtttgggcgtcatcgtggtcatcgtcgtaaacgaaaacgatgtcgagatcgctgccgtaaccgagttctttgccacccaatttgccgtaagccaagatcgcgatgcgtggctctggggcgtggcgttgacgcaagcgctcccagcaccattgcaaggtgacacgcaggatgctgtccgccagtgcactgaggtcgtcagcaacaaactcgacggtcaagcgtccttcaacgtcgcgcgcgagcgtgcgaaacacctcactgtgatgggcgcgacgcaacagatccaatagggcctcgtcggtgtcttcaccggttcgcttgagcgctgcgcgacgggcttgaagctcggcctcaaactgctgcccattgaagcgctcggagaagagctcggggttggccagttcgtcaatcacactggggtgttgaatgagataccgtgccggccacttcgccgcactgaggatgcgcagcatgcgctcatggatggcaggccgctcttggagcaaggccaagtagctgtcccgtcgcatcaagggttcaagccagtcggcgaaccggagcgctccgacttcggatactttgccgtcatccatccaggcctgtgttcgttgcagcaggcgagccaagcgggtgcgtgactcatcgcgcaggcccagaatacgaggttggtctttccaggttgcaaggtgttctttgagtgggctgtgcagcccatctagaacactgtcgaggtcagtctcaagccgcttttcgccgttgcaattggtacagggttgttcgccacccaacaggatgtcgaattcatgtgccaccacttcgcggtggctactgagggcgcataaaaacgcggcgaccgtgggaaagcccatggttgtggcgacccattccaaatcggcgtcatctgtgggcaggatgtgcgtttgctggtcgtcaaggtattgcgcacggtgttcaacgcgccgtaaaaactcgtaggcatcgcgcaaagcgtctgctttgtcggcctgcatgagccccgcttttgacaggcgcgtcagcgcgtcaagcgtgggccgcgtacgcaattcagggaactggcctccgcgcaccacctgcagcagttgcacggtgaattcaatttcacggatgccaccgcgcgatagcttcacatcgttggcgcgctcgggatggcccgcggcacgctgtgctgcgtgggcgcgtatttgctggtgcaagcggcgcaggccctcaaagacgttgtagtccagatagcgcctgaatacgaagggcagcaccacatcgcgtagttcgtgtacgcgcgtgcttcggcgcgccgatgtcggggcgaccacgcgacttttgagccatgcaaaacgctcccattcgcgcccttgaatcaggaaataattttctagcgcgtccaatgcgattgcggccgggccgacgctgccattggggcgcagggccaagtcaaccctgaaaacgaagccgtgctctgtcgtctcgccgattagttgatagacctgtttaaccaccttgccgaaaaaagcgtggttggagatacgttgcagaccattcgcgttacccgttgttttgccgtcgacgtcgtagacataaatgaggtcgatgtcactggagacgttgagctcacgcgcgccgagtttgcccatgccgacgatccacagggttgcctccacgggctctgcggtcggcccctcgggtggctcgatgatgggggtgccgtgaatttccttcagggtggccacggcgtgcgtgacggcttggtccagtgtgaactcagccaagtgggtggcggccagtgtgacatcgcccaccgatgccttgcccgtgcaatcaagggtggcaaggcgctcaatgaccagctgtcgcaagatacgcaagcggctgctgaggtcatagccttgctcggtcagcgcgtcgcaggtttgcgccatgtccgccagcgtgggtacccccggtgccagcagtggcagctgctcggcgtagcgccggcggacgcgctgaacaaaccgggcatgtgcgaccaagtcggtgcctgtggcttggttatcaaaaccagtcacgctgtcatgggaatcaggggcggtcgaggtcataattaatccatgggatcgtcagcacaaacgccagtcatcaaatcaagccgtatccgcacggctttgaaatggctattggtggtttggttaattacctgggccctcattggtagcgtgtatgcgttgatccacgtggcgattgtgcctcgtattgacaattggcgtgcagacctcgaaaccaagctgactgaaacagttggtctacccgtccagatcgcgcagctgcggggcgcggcgagtggttggaccacgcgttttcagattgaccagatccaaattcaagcgcgcgatggcggctctgcgctgtcgatcggcaacatcgatgtgcaattctctttggcatcgttgtggcagttgcaacttgaaaatttacaagtcaacaatgccgatgtattggttgagcgagatggcataggccagtggtcggtcgcaggtatcggtatagccgccgacaccgaacaatcggtacccgcttggctggattgggttttggcacagccgcgcatgggggcgcaaaacgccactgttcgtttggccgatcgcatgggagagtctcaggcttggacttttgaggccatcgatgccaacttgatcaatgggcggcgttcgcatgacatcagcctctcgatgacgccaccggcggctttgggtgatcggctcaacgtggctgcccgcatgcgcagcagttacttcgagaactcgctgaccgacttcgcggcttgggagggccagattgacacgcagctgccgcgtgtgcaattccaggccttgcgcgccatgctggtgcagctgttgccgcctgatagctggccgacacaagacaaattgaagctacccgaacagtgggtcaatgggggcgaggggagctggggtctgtctttggtggttgggcgcggtttacgcgtgcaatccgtgcgtaatgacatcggcatgcgtgatgtcgacgtccaattgggcgagaccttagagccgattcgcctcaaacaactggcgggtcaggtcgagtggtcggaaaccgatctcaactggactttgcgcacccgtaatctggcctttgaaaccgcagatgggctgaaatggccgggcggtaatgccgaattaacgtggcaggcgggtacggcaacgacaccggctgtttggcagttactggccgaccgggtggacattgagctggtcaatgcgttggccagtcgactgccggttgacgaagccgtgcgccgtcagctgatcgcgctgatgcccaagggccgcgtaaataaagcgtccctgagctggtcgggcgacctggctcagcctacgcagttcaagaccgaaggtgaagctacggggctggcgtggcgggcgttgcccgaccccaagggggatggtgcgttgggtcgtcccggtgcggaaggcgtcagtctcaagtggcgagccgacacccaaggcggcgaggcgagtttggtttttgaccaaggccgcctgagtttgccgggcgtgtgggtggaccctgtggtctcgttgtcgtcggggacggcatcggtccgttggaaagcaccaagcggcgccaattcagagtggcaagtggcgattgagaaagcacgcttacaaacccccgatggtttattggtgggagatgccacttggcgtgccgatgggtcgccgaatggtcatctgaaactcgcagctcaagttgatgcaatggcggtcactgctctgccccgctatttgccggccagcctgccggaggtacgtgcctatctggccacccatgttttgtcgggtcagatcaagaacacgacggtgttgtttgatgggcgcttggctgattacccgtttaagtcgcgagaggcgggggtattcgacgtcaaggcggatgtggttaacgcgacctacgactatgcgcgcacattaggtaaagaccaagactggcccgccgtggcgcagttgaacgggcgttttgaactcagcgacaacgcgattgagttgcggcaggtgagtggtcgtttgttgcgcgcgcctgccatcgtgttgcgcgaaagccgtttgacgtggcccgacttcacaagcgacagaccgctcaaagtcacgctgaccgcagccggcccgcttgccgtttggttgaacgagttgaaccgtacgccgttgggggtgcgcaccgaaggcttgctgaccaagtggcgcagcgagggcgacgcttcggtgtcattggctgtgaccgtgccagtcgctgcaaatgacaacgggtcggtacagattgcaggcgaggctaacctgaataatgtgacgctcagtttggttgatgggttgccgcccctgcagcgcttacaaggcaatgttcggtttcccgacaactcactggatttgacgcgcgcgaaagctgat

SEQ ID NO: 22 - DNA, 27817 bp, Artificial Sequence
  Synthetic Oligonucleotide
  misc_feature (1)..(4504): n is a, c, g, or t
nnnnnnnnnnnnnnnnnnnnnnnnnnnnnnnnnnnnnnnnnnnnnnnnnnnnnnnnnnnnnnnnnnnnnnnnnnnnnnnnnnnnnnnnnnnnnnnnnnnnnnnnnnnnnnnnnnnnnnnnnnnnnnnnnnnnnnnnnnnnnnnnnnnnnnnnnnnnnnnnnnnnnnnnnnnnnnnnnnnnnnnnnnnnnnnnnnnnnnnnnnnnnnnnnnnnnnnnnnnnnnnnnnnnnnnnnnnnnnnnnnnnnnnnnnnnnnnnnnnnnnnnnnnnnnnnnnnnnnnnnnnnnnnnnnnnnnnnnnnnnnnnnnnnnnnnnnnnnnnnnnnnnnnnnnnnnnnnnnnnnnnnnnnnnnnnnnnnnnnnnnnnnnnnnnnnnnnnnnnnnnnnnnnnnnnnnnnnnnnnnnnnnnnnnnnnnnnnnnnnnnnnnnnnnnnnnnnnnnnnnnnnnnnnnnnnnnnnnnnnnnnnnnnnnnnnnnnnnnnnnnnnnnnnnnnnnnnnnnnnnnnnnnnnnnnnnnnnnnnnnnnnnnnnnnnnnnnnnnnnnnnnnnnnnnnnnnnnnnnnnnnnnnnnnnnnnnnnnnnnnnnnnnnnnnnnnnnnnnnnnnnnnnnnnnnnnnnnnnnnnnnnnnnnnnnnnnnnnnnnnnnnnnnnnnnnnnnnnnnnnnnnnnnnnnnnnnnnnnnnnnnnnnnnnnnnnnnnnnnnnnnnnnnnnnnnnnnnnnnnnnnnnnnnnnnnnnnnnnnnnnnnnnnnnnnnnnnnnnnnnnnnnnnnnnnnnnnnnnnnnnnnnnnnnnnnnnnnnnnnnnnnnnnnnnnnnnnnnnnnnnnnnnnnnnnnnnnnnnnnnnnnnnnnnnnnnnnnnnnnnnnnnnnnnnnnnnnnnnnnnnnnnnnnnnnnnnnnnnnnnnnnnnnnnnnnnnnnnnnnnnnnnnnnnnnnnnnnnnnnnnnnnnnnnnnnnnnnnnnnnnnnnnnnnnnnnnnnnnnnnnnnnnnnnnnnnnnnnnnnnnnnnnnnnnnnnnnnnnnnnnnnnnnnnnnnnnnnnnnnnnnnnnnnnnnnnnnnnnnnnnnnnnnnnnnnnnnnnnnnnnnnnnnnnnnnnnnnnnnnnnnnnnnnnnnnnnnnnnnnnnnnnnnnnnnnnnnnnnnnnnnnnnnnnnnnnnnnnnnnnnnnnnnnnnnnnnnnnnnnnnnnnnnnnnnnnnnnnnnnnnnnnnnnnnnnnnnnnnnnnnnnnnnnnnnnnnnnnnnnnnnnnnnnnnnnnnnnnnnnnnnnnnnnnnnnnnnnnnnnnnnnnnnnnnnnnnnnnnnnnnnnnnnnnnnnnnnnnnnnnnnnnnnnnnnnnnnnnnnnnnnnnnnnnnnnnnnnnnnnnnnnnnnnnnnnnnnnnnnnnnnnnnnnnnnnnnnnnnnnnnnnnnnnnnnnnnnnnnnnnnnnnnnnnnnnnnnnnnnnnnnnnnnnnnnnnnnnnnnnnnnnnnnnnnnnnnnnnnnnnnnnnnnnnnnnnnnnnnnnnnnnnnnnnnnnnnnnnnnnnnnnnnnnnnnnnnnnnnnnnnnnnnnnnnnnnnnnnnnnnnnnnnnnnnnnnnnnnnnnnnnnnnnnnnnnnnnnnnnnnnnnnnnnnnnnnnnnnnnnnnnnnnnnnnnnnnnnnnnnnnnnnnnnnnnnnnnnnnnnnnnnnnnnnnnnnnnnnnnnnnnnnnnnnnnnnnnnnnnnnnnnnnnnnnnnnnnnnnnnnnnnnnnnnnnnnnnnnnnnnnnnnnnnnnnnnnnnnnnnnnnnnnnnnnnnnnnnnnnnnnnnnnnnnnnnnnnnnnnnnnnnnnnnnnnnnnnnnnnnnnnnnnnnnnnnnnnnnnnnnnnnnnnnnnnnnnnnnnnnnnnnnnnnnnnnnnnnnnnnnnnnnnnnnnnnnnnnnnnnnnnnnnnnnnnnnnnnnnnnnnnnnnnnnnnnnnnnnnnnnnnnnnnnnnnnnnnnnnnnnnnnnnnnnnnnnnnnnnnnnnnnnnnnnnnnnnnnnnnnnnnnnnnnnnnnnnnnnnnnnnnnnnnnnnnnnnnnnnnnnnnnnnnnnnnnnnnnnnnnnnnnnnnnnnnnnnnnnnnnnnnnnnnnnnnnnnnnnnnnnnnnnnnnnnnnnnnnnnnnnnnnnnnnnnnnnnnnnnnnnnnnnnnnnnnnnnnnnnnnnnnnnnnnnnnnnnnnnnnnnnnnnnnnnnnnnnnnnnnnnnnnnnnnnnnnnnnnnnnnnnnnnnnnnnnnnnnnnnnnnnnnnnnnnnnnnnnnnnnnnnnnnnnnnnnnnnnnnnnnnnnnnnnnnnnnnnnnnnnnnnnnnnnnnnnnnnnnnnnnnnnnnnnnnnnnnnnnnnnnnnnnnnnnnnnnnnnnnnnnnnnnnnnnnnnnnnnnnnnnnnnnnnnnnnnnnnnnnnnnnnnnnnnnnnnnnnnnnnnnnnnnnnnnnnnnnnnnnnnnnnnnnnnnnnnnnnnnnnnnnnnnnnnnnnnnnnnnnnnnnnnnnnnnnnnnnnnnnnnnnnnnnnnnnnnnnnnnnnnnnnnnnnnnnnnnnnnnnnnnnnnnnnnnnnnnnnnnnnnnnnnnnnnnnnnnnnnnnnnnnnnnnnnnnnnnnnnnnnnnnnnnnnnnnnnnnnnnnnnnnnnnnnnnnnnnnnnnnnnnnnnnnnnnnnnnnnnnnnnnnnnnnnnnnnnnnnnnnnnnnnnnnnnnnnnnnnnnnnnnnnnnnnnnnnnnnnnnnnnnnnnnnnnnnnnnnnnnnnnnnnnnnnnnnnnnnnnnnnnnnnnnnnnnnnnnnnnnnnnnnnnnnnnnnnnnnnnnnnnnnnnnnnnnnnnnnnnnnnnnnnnnnnnnnnnnnnnnnnnnnnnnnnnnnnnnnnnnnnnnnnnnnnnnnnnnnnnnnnnnnnnnnnnnnnnnnnnnnnnnnnnnnnnnnnnnnnnnnnnnnnnnnnnnnnnnnnnnnnnnnnnnnnnnnnnnnnnnnnnnnnnnnnnnnnnnnnnnnnnnnnnnnnnnnnnnnnnnnnnnnnnnnnnnnnnnnnnnnnnnnnnnnnnnnnnnnnnnnnnnnnnnnnnnnnnnnnnnnnnnnnnnnnnnnnnnnnnnnnnnnnnnnnnnnnnnnnnnnnnnnnnnnnnnnnnnnnnnnnnnnnnnnnnnnnnnnnnnnnnnnnnnnnnnnnnnnnnnnnnnnnnnnnnnnnnnnnnnnnnnnnnnnnnnnnnnnnnnnnnnnnnnnnnnnnnnnnnnnnnnnnnnnnnnnnnnnnnnnnnnnnnnnnnnnnnnnnnnnnnnnnnnnnnnnnnnnnnnnnnnnnnnnnnnnnnnnnnnnnnnnnnnnnnnnnnnnnnnnnnnnnnnnnnnnnnnnnnnnnnnnnnnnnnnnnnnnnnnnnnnnnnnnnnnnnnnnnnnnnnnnnnnnnnnnnnnnnnnnnnnnnnnnnnnnnnnnnnnnnnnnnnnnnnnnnnnnnnnnnnnnnnnnnnnnnnnnnnnnnnnnnnnnnnnnnnnnnnnnnnnnnnnnnnnnnnnnnnnnnnnnnnnnnnnnnnnnnnnnnnnnnnnnnnnnnnnnnnnnnnnnnnnnnnnnnnnnnnnnnnnnnnnnnnnnnnnnnnnnnnnnnnnnnnnnnnnnnnnnnnnnnnnnnnnnnnnnnnnnnnnnnnnnnnnnnnnnnnnnnnnnnnnnnnnnnnnnnnnnnnnnnnnnnnnnnnnnnnnnnnnnnnnnnnnnnnnnnnnnnnnnnnnnnnnnnnnnnnnnnnnnnnnnnnnnnnnnnnnnnnnnnnnnnnnnnnnnnnnnnnnnnnnnnnnnnnnnnnnnnnnnnnnnnnnnnnnnnnnnnnnnnnnnnnnnnnnnnnnnnnnnnnnnnnnnnnnnnnnnnnnnnnnnnnnnnnnnnnnnnnnnnnnnnnnnnnnnnnnnnnnnnnnnnnnnnnnnnnnnnnnnnnnnnnnnnnnnnnnnnnnnnnnnnnnnnnnnnnnnnnnnnnnnnnnnnnnnnnnnnnnnnnnnnnnnnnnnnnnnnnnnnnnnnnnnnnnnnnnnnnnnnnnnnnnnnnnnnnnnnnnnnnnnnnnnnnnnnnnnnnnnnnnnnnnnnnnnnnnnnnnnnnnnnnnnnnnnnnnnnnnnnnnnnnnnnnnnnnnnnnnnnnnnnnnnnnnnnnnnnnnnnnnnnnnnnnnnnnnnnnnnnnnnnnnnnnnnnnnnnnnnnnnnnnnnnnnnnnnnnnnnnnnnnnnnnnnnnnnnnnnnnnnnnnnnnnnnnnnnnnnnnnnnnnnnnnnnnnnnnnnnnnnnnnnnnnnnnnnnnnnnnnnnnnnnnnnnnnnnnnnnnnnnnnnnnnnnnnnnnnnnnnnnnnnnnnnnnnnnnnnnnnnnnnnnnnnnnnnnnnnnnnnnnnnnnnnnnnnnnnnnnnnnnnnnnnnnnnnnnnnnnnnnnnnnnnnnnnnnnnnnnnnnnnnnnnnnnnnnnnnnnnnnnnnnnnnnnnnnnnnnnnnnnnnnnnnnnnnnnnnnnnnnnnnnnnnnnnnnnnnnnnnnnnnnnnnnnnnnnnnnnnncgcgcggatccttgatttcgcccaggcgctcttccagattcttgtgttttttcctcgccatttcttccgctcaaaagacgagagtaggccagaattacagcgagtccacaagacgtatgcataagccgttgagtgtaaacgaatattttgttggccaaatgtcaaatagctttatgtcgtgcgagtgtcttggccctggaggtcaaaggtctgccctgcatggatcaggaatgccccgcgataccgcgtcggccatgtgcggttttcgatcggcttcaagttgttggcaatgagccacgcccacggctggcgaacagatagtgccttcatcagcatggcatttccttgtattccacaccctcaatacattcgcccgcgctctttcttccaacgcgcagtacattttcatccccctccaggaaggcggcagcattgttgccgtcatggaagccaccggccagcgatacccagccgccacggactcgcgggttgttgagctggtcgttggtggcatcccgccctggaatccactcgccccactgcttgaagaagaacgtcacgtgatttgtgacgcactggtcacgcaaagccttaacccaagccgaatgcatcggcctcgctttggggcccgattccccgccaacaacgacccaatcgaggcgcgtttcaggcgtcatttcgatgcagccgtcacagcgacagagaatgtcgccggcaggcgtggccaacaggtccaccgggccaagcaatggctccatgctgacccaatgcttagcggcgggcgttttcatcagcagaggaatgcgctcgttggccgtcgcctgcgtaccggcggtaacgcctacccatacatgggccagcggccacttcaggtatttgccctccgggatcggcgctccgcgccctcgggccatgcgttctgcacggccttccacgtaggaggcacggtgatcgtcagacagatagcgttgcatacgctcggcccgcttcgtgagcacttggaaggtatgttgggggctgagagccatcaccgcaaagacttggtcgatgaaatcgtccgggacatcgtcatggaacagatcggacatcgagcaaacaaaaatcagtcgtggacgcttccaacggatcggctggtcgagacgatcctcgtgacaggcaacatccgtgaattcacggcctgcgtaggcggcaagatgcgtcaggcggtgccagtcgcgctcggcatagcagtgcgtacattcaggcgtcagcttggtacagccggaaaccggattccacgtcgcatttgtccacgaaatgccagagttgtcgcccatgcacatcaccaaaccgagtaactagatgaccaatcgtcgcacaggccgcacaccgcgcaagcccccttttgagaagaggcagcaagcaagaatccgctggataaatcacaacaactgccgccttgaacttcgccggcactcgcgcatgcttattggcgacgccaccaacaaattggaagctcatgtttgaattcatgcgcaagcaccccgtagaaatcaccgtcgccctgttgctgatcgtggtccttttgcgagcagcgttttcagccagacgatacaagtacgaggcaaagccgttgctgaccaacaacgaactccagttttatctggtcctacgcgatgcgctgccagagtttgcgattttcccccaagtggccatgaatgcattccttcggccacctgcaggaatatctccaaaggaatatgcgcagactcgcggaacgttcgcccagaagcacattgatttcctgatctgtgagccacaatcacttgaaatcatgtcaatcgttgaactggacgatcggtcgcattcggctgagaaagacattgctcgcgatcgaatcaccggcgcggccggattcaagacgctacgctttcattccaaaaacaagcccggcaagtcaaaaattcgtgaggtggtttcaacagttctgaatgccgcgccaggcacccgcgtcattgcttattgacagtgctaaccggcgcaattcttcaaaagcattctggaaatcaacaactgctgcggctcgaaaccgcagatatcgttcgaaggtaatagatatgaaaaagcacgatgccgaatggccagcaagcggattgaaggcggttgaaatcgttgagaacggtggcgcatggtatgtcagctacgagggcgacgatggacggcgagcttttcttcgaaaatataacgggcggcacaaagggtttcgcaacattggtgagctcgtgtatctgctccgcgtcgttcgcaacgtggaaagattttcggttgcgcaccagagcgcctcgagatccgcataaaacattgtggaatgaagaattgccatgcaaggcagcagcagcagatcacaaccgatggcatacgagaaaatgcggccttgaattccgcgcatgttgtgagactctgtatcaacagtatgtcatcagtgctatggggcattgaaactcgctcaagtattggaaggaaggacaacggatggacaaaatcaaggtaaccgcgcacctgctatcgccaatcgtcaccggcggcggctacatgacgctcgacggtctgctggcggccctcctgttcgacgaactgcaggacgtggaagccgcacatactgccgtcccaattcgccagacagacggcctgcaccacgccagcgcagcaatcatggaagcgactcgggaacgcatttcgttcatcgcgggcctgcgtcctggtcatagcatcgaccctgacctgatcctcaagaacaagcatgggcagttgcaccgcaagttcgactcgtcactgaccaatgtgttgaacacctacgccttgctgaccgcaccgactgtcacttggtatggcgagggcgacgccgatcagatcacccgtcttgtttcccctgtgcagttcatcggcaagcgtcgggcatccggttttggccgcgtatcgcactggcagatcgagccggacgacctcgacggcatcgaagggccattcggtgagccgctgcgccccgtgcctgtcaccatgttcaagggcgacacctcacaccctgtggtcgatgcagcatggcgaccggcctactggaatccgcatcaccgcaccgcctgttacgcgccggtttaaggagaaacgatgatgctccatttcttcaacgacaacttcggacgccatctggtcgagcaaaccgacgactcagcagccgatgcccgacacgccctgtcatccggtcacaccatgaaaaaaggcggcgcagcgcagcgcattgcctccggttgggcagttatccggcccgtccaatcgaccatgcagttcgaacttgccgcgaccggcatcgcctacagcaagcagacgcgctacgaggcatttctcgcggaactggagaactgggatcagacaccgcgcattttcatcgagttcgccaagcgccctgtgccggtcggaaacctatttcgcacctttgatctgcgccaggtacgcatttgctcgtccgcaggcgtcgagacattcgacttcaccaaggcacccgagaaggatggctgcaagatgcacaagattctttggaaaatgaaagaagggagcaagtaatggatttcgtaatgcaaaaaccaccgagcgttcgcggctacgcactgcaccggattgccgctggtctggccgatggcgacaaggtgctgttcgccgactgtggcgaccacctgctgctgcgctccaacaaggcactcgatgtagcgcagcgcccggttcgcaccatcgccgccgacgacatcatcggctttgaacttcgcgcttgtgtcggcaagaaggttaaaggcaagcatcgctacttcccgaccgccgactggcgcagcaggcacgagtggctagagcgtcagggcgaactacatggtttcgtgatcatcaccgtgcattgcacggcgcagatgctccccgtcaaggctggcgaccggcaattcacggtcgatcagacggacttcacgggcgtcctgaaggtcacggatgtcgagcgcttcaacaacgcggttgccagcggtatcggtaacaaggcccgagccttcggcttcggcatgttggtcatctaaccaaggattatcaccgtgaaaacaattgtcatcaacgccaccatcatcaccgtcggccccttgtcgatcgctatgccagtgggagaaggccagctatccaacaggatcaacaacttcccgattgtcacgcgcggcatcgacgaggatggcaacaagctgcagaccggctatctgccagccaccacgctgcgcggcttcctgcgtcgtgcgatcgtcaccgcgcagatgaaagtcgccgcagctgccggtaagcactacaccctgcagaaagcctacgctgacctgatcgggcaggatgccgcgtccgaagcgaaggacgacattgatctgctcaagctgcgccagactcgtgaggacaacgctgttctcgacctgttcggctctggccttggcatcaagtcgcgccttctggtatcgcacttcctgcccacgcacaacgtattgccagaaatgatgaccggcgttcgcaaggatcttgaagataccgacggcatcctcgatctgctttccgacgcggatcgcaatacgtatctcgggcgctccggcgccaacagcaaacgtgccgccgcccagtcggtggtgaaggggctggagggcaagattcgcaaggcaaagcaagcaggcgaggacatcatcgaactggagaccgcactgaaagaagcgcagggcgtcgtggatcgctacgttgccgacatgggagacatgaccaactcgtcacgaacgctgaccagctattttgtactgcctgcagggattgaactcaaggggcgcctagttatcgagaacgcacgggagcgtgatctaccgatgatcgaactggcgctcaacgaactctcgaaacgtccgattctcggcgcacaaagcgctcgtggctgcggggaaatcgaaggggcctttgatgtgcaggtcgatggcgttctcgccaaaagaatcacgctgggtgcttggcaggcggcggtcgtgacagatttctatgaagcggattcggtgaaatcggctgcatagtcagtgtgttgcagttgggcagatcaagccactctttaaacgggtggttactggaacattggcttgctttgccgctaccaggtcagcgatcaagccactctttaaacgggtggttactggaactcgagggagatcagaatcaccgtcagcaacgatcaagccactctgcgcatgggtggttactggaactacgtcacctggaagggcgctaagtttgtcgatcaagccactccgtaaatgagtggttactggaacacgcgtgggactttcgcgcaaaagcacgtaggttaagccactcggtaaatgggtggttaccgaaacacccacagaacgggcctgctgacggcaaaggatcaagcctccaaacccgttttttgctaattgaaatagggtaagagaatgtttcgctcaacagaacaatcaaacgttgcagtaatcgttgccaagcacatgaccgttgatgatgccactctgttgctccaaggcggtacgggcatcggaaagacccgtgcctacctgtctgcgctaattcgatctggccgacgggtcgctatcgtcctacccactcatccgttgattgaccaattgcttgcatcaaacgatctggcggtaactcgaggcgaggccacaatcgcagcgttccgcccggcacgaatgtttgacagcaaggttggatacgaacaaaacaagcgagaggctattgccgctcaagtgatgctctgcaccgccgccagcgtgattattgaccaacgcttggatggcgaatacaacggctccaccacgcgttcctatatcttgttcgacgaagctgaccaactaccggacatggcagccctacaaagcgatttcaccatcacgcaggccgaactcacagagatgggcatccgcctgacgaccgtgagggaaaccttgcaggcgattctcgcgaagaaaccgcgcatcgtcgaacccgaaatcagggccgccgcacggatcattctcgacgccatcgaggaacctgtgcgatatcaatctgccggcatcagcgacgacggcgacatcatgctcacgcacaaactgcctgggcgactgttgaaacaaatcagcaaccggagcaacgtggccttcgtttctgcaacgctgaccgtcgggggttacttcagggattttcagaattcgatgggcatcgccagcatcagccgcctgtcggctgcgattgaaccggagcagcacggtacgctcgattttcacataatcccgatggaagtcgacacgccggaatggatggccgctgttatgcaaatggccaacgctgcacccaggccactgctgatcgccaccacttcgcacgacctgtcgagcctgctcggtgagcaactggtaggggcagtgatccgcactgccgaagaaacagcgtcacaggctgcagcgcgagttcctgccgatggaatattggtctccgctggcgcatgggccggtctggatacccccctgcgctggcgatcggtcatcgtgccgcgtgtgccgtacagccagccggttgtggtcgatggcgaaatcacgaccagctatcttgacgcaaaaaacacggcagttcgccgcttgcggcaggtcatcgggcgtggactgcgaacaccggacgccgtgtgcagcgtctatgtcgtcgatggccgcgccgagaaattgggctccttcgttccggagcgtttcgctgcggcatgggatggccgaacctatctggaaggcgcaaagaaagaactgcagatctccaagtccgaacgcgatccggcaatacgtcgggccgcgctcaaccactacggacggaagtgcatggccactggctgcggattcgtgccgaaggtcgattcgcaactcgatgtccaccacctcgacccgattgccgatggtgtgcgtcccaccaaactgaaggacgtggtggttttctgtgtcaactgccaccgactagcgcactcagccacgcccccacttctactatgttgaacgtgggcaagagcaatcaacggcgcgggccaaatcaccacgcaacaaattggctggactaggccgacccaccctggcaccctcagcgcgcttgcgcgagcagggcgtccaggcgcatcgacgccgcatcgcgtgaaacacctttcggcaacagcggctccgggctgtccatggcttcgcgcaagcactcaatcacgtccttgcgatcggctggcttccgggcgaggcgacaggacatggcgaggccagcgagcaaggcccgatcatcctggggtaagcgcaagacgtcaggccacaccagctccagcttctcaatgtcggcatgcgcctgctcatgacctgcccactggccaacggcagcagccaaggcggtggcgatgaggccggagatcaaaaggatgcgttggaattgcgtcatcgaggtctttgttgagcaggcagttggggctgaaatatatcatggcccccaatgcgcagcctgcagcgctggggacagctcaaatcccgccgcggaacgaaagcgttcggcagacgcgcggatgtagtcgagtatccactccgcagtgatccacttgcgaccgagctcctcagcggcctttgccgtggtcagtttgcctccgaaaggatcggcaatcagatcgcctggctcggaaaggaagcggatcaggaagctggccagcgagagcggaaacggcgctccgtgtgcctgcagaccgagcgcggcggcatctttgcggtactgccgatgatcggggcagctgtgcccaaggctgagcacgtttcgcggaattctccctgccgtcggattcccatagcttccggggcggatgttgtacgcaccatcagcgaagctcgccgcgcgcttctcgccgccggccgcaatcaacgcgagatggcgcgccgaatgaggctccagcacccgacgattgtcagacttaaccagctgcgggtcattggtgagccaatacaccgttctcccacgcaacgttaagctgcacccgctctttgctcgcccattgaatcgggccaggaggtttcgacttgttgtgccagaccaagcggtccatcagatgaagacccaagcggtcatgaagcgccaacagcatcctttccagatagagcgatcgggcgggcgtacccgtctcgaaaatgtcattgctcacattcagacagagcgaaccgccaggggcgagatttgcgaccacgggctcaagggtccgacatatgaaatcgacgtattcgtgttcgcctggatttccgtaggcacgaggttttcgcagaggatagggcggactggtgatcgccaaaacgataggcgtatccagtctcggaaaaacacgctgacagctgccccagatggcgatgccaaggtcagttgagaaagccagcatcccgacgtcgggcagggcacgccgcagtttcttttcgccgaggtcggtcaggcgccacagcccgcgctcaccgtcgacgtgctcaatcagccccaggtgcttgagcgtctgttggtgccagcgaattttccgcttgagcagactgtgttcctgccggcttctcccgatggggacgcggctggccaattcatcgcaactgatcccggcccgactggcgacggtttggtacagggtcttgttgcccagccgaccgtcgtgcgtggaaccataggttgaggagacgtggtcgaagaggtcgagttgggaggatggcccggcgggaatcggcgaggaggctgcgaactttaaagggacttgcacgctcaactccagatttcagtgactttgtgtgacatcacgatatccgagcgcagctgcaaaaccagtccccaaaatgcgccagcgggaatcgatcggcggcggttcttgttgtttggttgctgcctaccggcaggacaacaacggcaaagccatcgaaacggcggtcaaagacgctgccgaccaaccagccgcacaaaggcctcagcggacgccgcaggaatcgtcgtcccaagaatcgcctgcttccaaccctttgccggcggccaggccacgccgagcaattccagctgggccttcgaccatccccccttggcgctcatcccggcttcgagcaggtcggcggagacaacaacgaggaagtgcggggcggacgattccatgctgcgacgcgacctgatgagaaaaagaaaacaataccatccggcatggggtttgcgcgcagccgagagaacgactcttcattggtgttcttcctgccggaatttcctatgcggatcgccatcgagagaaacaaaccgcagtcgggcgccaaattgcgggagtgcgcttgcatctcggcgatcatcatcatgcgcagcgaatttcggaatctggcatttgcccccttgcgtgctccgcaaggagtgggacaattggagcttaccttgagaacgaaaaaaaaaatggctttgtcgaaactcacacttgccgatcaaagcgtccttagcctgatgacaaaggggacgatcatattccgtgggcaccgcgggtccgctcgtccgttaggaaaagtaatcacggcccaaggtgcgtttattgaggtgtcatccatgatgctgcatcggttcgaaaacgcgggaattccaatggagacctaccaaaacaacgccactacgggatgggaaacggtcattcctcagaagaatcgtgatgcagtcgcggcgatgattgaagccgcctcatatcatgtcaccatgtaacgatacggaaaagacgggcctacatgaatccagacgacttcaacgaacgcaaactcaaaccccgcccgatcactgcctccggtcgggcgctcctggcgcttatgcgcctatccgacatcacggaaaatcgcttgcaggaaaaggttagggctctataccttcagcgggagttgcatgaagtgtcgtcagcccttatgaggccatgccccgatgcagcccgattggtagttgcgtcggagtacgaacgactgaccgatgccgttgttttccgagaacgtaatgggtatttcgagccatgctactcgattaaagatttgggcgatccgtctcccatggacacagcgtgtctcataggcgcttcgttcctagtgcgcgcccagcgtagcgatttgactgaaccggaagtcatcgatatttcggcccaaatgggtcatgagatcgtcaaagcgattagcggcctgagtgcttggcaaattgattttcccgtccctgatgcgttctggcatggtgaggcatttcctggcaacttgaaactgaatgtcctgtttgaactgatggctctggggtcatccgctcaactgcaacaacgatccgtcttggacgtcgtacggcatctgcggcgtgagatgttggagaggcggaatgcagatccgctggatcggtccctatcgttgccggtgactctgtttggttatgcgcgccggcggaatatttctgagcgtgggacggctgcgctggaatacgccacccacggctttgaggctgaactacaagagagcattgaggatatagaacggaagtgcaataacatcgacctcaacggctatccagtctcattcatgcgtctggatctattttcagcggctcaagaaacagccgaaacggtgtcccgcgggtctcacttcctctcactccttgatacgtcgcgggagcgcgcaacgacagacccgcttgttgtttccgccgtcccgatctcgcgcggcgacctggagttacgtctggatgctctcaggattggcgtatggcgggactcgggcgcttttgtgtatgggacggaatgggtgactaaaccgcgtgagacgatgcagatgctcaccaacatgctcacggatatcggtcaaagcgaaaacataccagtttgcgttcatccgcagatattgagcaaagaagtcccgacggcggtgaatgcaaccctgtatccgacacgctccggcgactggctcgatccaaaggtcgcccaagcgggtgctggcgcccatcttctcaagacggtgaactggacatatccaggtcttgacgatcttgatgaggcgaggatgcgcaacctgccaatgcctcgccgttttctggcggcaggcctggtcgagatgatccagcaacactatgtcccggatgtctaccgaaaactcaaggagcttctttcggatttatcgttctctgatgagttagtgacggatgaattggtcaaggcattccccacctttgcggaattgctccataacgctccgcatggcgcgctgccgacggatgcagagatcagcgccttgcgatggcactggacaaaatcgcctctcttccttatccgcccagaattgacagagcgtttgcagctaaccgatctggggctcgatgtagaggcgagttttgcgatcatgccctatcccctcttctatattcattttcccggcgggcgctcggacttgtcttgggttgatgtcagcgaagaatctttgaaggtgaccggtgcttttgtgcatcaacatggaatggcatcggctgaacctggcaggccgagaatcctggacattctcttttgtgctgattcgaccgatccgcaatcggaggcctgggggttcgtggatcttcgtctgacaatcgaagatgaggccgaaactctcgaacaagtcttccagcggtgggtcgcttctaacaagcctgaagagatggacgatgagtgggtcgctttctcgcggatactcatcgatgaggtgcttaaaattctcgtctatcttggcatgcgtgatgcgcgtaaggaagatcggccggagcgcacgaaattcctaaagacggccagcaacaagacaccggggcagcggctaactactgcggccaaagctcgttggctcttcgattacatctacgttggacctgaagaaagtgtcgataatattgccgccacaggtctgacgaaccgcaaggtcaaaccgcacttcaggcgaggccaccgccacacggtatgttacggtcgagggcgcgagcagcggcgccttgccttgtatccgccagtcattgtcaatgccgacatgatcggccacggcgtcgagatcaggccgaaggattacattgttcgatgattcgacaaggaaaagacgatgaatgtggtaagtgattggcggtaccgatcggacgcgctctactagggaaccacggaaccatgtgaggcatgggaggcgtccggaaacatcggcggtcgtactccatcgagccagtccaattctgcggaaaaaccggaaaacatgatggcttcaaagaagcgggcaagcaaaggtgatacttgggatgatgtgatggacgatatttcgcagatcatgcctatcccgttgttcgtcattttgatcatcgctggtgtagttggccgcatcttcggctatatctgatcggaaagaagctcatgacggcagtagcaaatgacgaagcctgcagcggttgcggttgtgatcgcaaagaaggctgtctgcgccacgccgttctgcgaggggatgtgccgtgcttcccagtggccgacaatatttgcggccaaggcagcgactacgctgcttttgtgcaatggaaccggatgggtagaccgatggcgacccccggcctcttccaatagagagggaaagacgctatggataagcagcaagccaaggacaagatcgtggcatccgaaaaggccagcatgacggcgctcgctggcatgaggaaggccggaaacgctctgctggtcaatgtgcctgtcaacggcttcggcgtgattcgcgaccatcaagcaatgcgccgccagcttgaagttgcacagtcaccaagttgcccgagaagcatcgtcgttaagggcggtgagggatagggcaggatctttgttcgcacggtcaaccccaacggtaactgtacgttaacacagtatgagacgttgcacgaagatcgtcagaaccctccgccagcgtgtcaaggacaagcacgcgcgcgtcctcggggagatggcccgggacgttaacctgacgtggaatttctgcaacgaactgtcgttcaaaatcctcgaacgcgaacaccgcttctgcaattccgccgaactccagaagtatctgaacggcgcgagccgcgaaggtctgcgtgtcggttcggctgtcttccagcaggtggcggatgaatacgtcacccgtcgggtacagcacaagaaacggcgcctgaactggcggcgatctggtggatcgcggcgctcgctcggctggatcccgttcaaggatcgcgccgttcagtaccggaacggacagatccatttcaacggacacgccctcggcctctgggacagttacggactgccccaataccgcctgcgctccggcaatttctccgaggatagtcgcggccgctggtatctgaacgtgacggtcgaattgcccgagctggtcgggccgcgtcccctgaagccaaccgaactgggcattgatctgggtctcaaggagttcgccggcttctccgatgagggaatcgacaatgtcgaagcccaacgcttctatcgagagctcgaaccggccctggcgatcgctcagcgggcggggaagaaacagcgggtgaaggcgatccatgcgaagatcgcccaccgtcgaaaggatcatcagcatcaattgagcaccgccctggttcaacgatacggggctatcttcgtcggcaacgtgaacgcctccggcctgtccaagacaggcatggccaaatccgtcctggatgccggctggagtcagttcagaaactcgcttcggtataaatgcgctgacgcaaaagtgagtttctcggaagtcgacgaagcgttttcaacccagacctgtagcgtgtgtaacagccgcaccggcccgaaaggacgggaaggtcttggaataagggaatgggtttgcccggagtgtggatcgacgcaccagcgcgatcgtaacgcggcaaagatcattctcgcggcgggacgtcgccgtctggcagcaggaatcctcatcgcttcagggtgaggaggacgtcaattatcaaggactcgctggccgtgatggatgcggtcgattggccgaccgacgcagactactgcgagtgaaagcggagatttctgcgacagcggcgcacggcggggcaagttggtaaaacgggacccgttgcaacaatcccgacgtgtccggtaatatggaggtacgccagctggggctcaaactagcattccacccagcctcactcgcggcaccgccctccacacaagcatcacccgaagacccatccctatgtccgcaacggcatcggcatgggcctttgcgctctcagttcttctcgccctctgtggcagaacggtagctggaatctaccgggcggctcatcagccaaatccagcagtcccaatcaaccctctcgggattctctcccgcagttggggagactccgacctttcatggagaccacaatgcccgcaacccaaccgcacccgaagatctacttcgcaaccgtggatctgaacgaacaggtgcacatgcaggcgctcggattcacctctcagttctacaagtacgtatgggcggaaacgtccagccaggccgaagaagcagtcgctctctgggcagccaatcaaggctgcaacgttcgtcgcgtccgcgcgcaatcggcggtgaagcagggggtgcaaacctacaccttcccggagcagattctgaatttgccgaaggaagccctgttggccgaatacgaccgacgtgaatacccggacgcactccgtgccgaagggcaatacgtcgtgatgcggcaggcagcgtaggcatcaagcaggaccaggtagcaattcacaaacgcaacgtgagctcttcttggccggttcgccggtcttaaccacaacgccccgttgggattcgcctcccgacaggggggcgccatggggctcttcttcaggagcatttcatgagcaccacactcaagagtttcgcagtccacctgttcacgcaagttcggatcaaggttgtcggcgtccaggctgaaagctcggcggaagccatgcagaaggcggacaacgcggtcaatttccacgccctgttcgatcatccgcactttcgcgcggccacttccggtgggatgcaaatcgaggccatcgcgtgggcggaagatgtcactgcctgcgcactggtcgacccgctgacggacgttggcgaggtggacgacgaccacagtgaatggcttgacggtaacgctaacccgctcattgacggcaagacgcccgaagagcgcaaagccgccagctgcgacaaggccgacgcgttcttccaagaactgttgggttcagtggaaactctgtccggcattgcggaagaacacggcgtgcgaacgctggccgatctgatgtacctccagaccgcgatcatgaaggatagcttcattgaccactatcctgatgaatccaaggttctcgacattgcccttgcgctgccttccggcgagcagtgggccaagttcatcaaggttgagtatctggcgtcaccggtacctgaagcggcctaaaacaggacgctccgaccaccggtattcaagcaaaccacccgacgggctcctcccgtttgggcgggactcttcgggtatacctcgaggagtgacaagcatgccccagaaacaaatcaaccctgcgcaacccgggggccacctgacactgaccggctactacgcgggccagccgatctgtggcgccgataccaaaacggaaaacgacgcccatgcgacgtacgcgcccttggacaaaccggaataccgcgaaacgcggtgcccggcctgtctgaaggcctacgctgagagcttcgatgccgacgagcttgaaacggcccccgcttgggtccgcgagcatcaccaagcagcgcaaccggcctgactcaggccaacaccatcaacccgaagcgggaacgcatccccgcttcggggggctccgcgactatctccaggagcatgacaatgatcacgtttgaccaaggcggcacctctgtcgccaatccgttcctctcggaatgcggacgctttgacgttgcgccttccgaatacgggttcgaggcggccgacaccggagggggcgcaaaggccctcatcaagatgttgccggaaggtgacgccatctggatcaccgacgaaagcggcatgtccatcccggataccgctgacgacgcgtggatcggttacttcgacgccgacgggcaacagcgggcgttccacaaggtgccgactgaatcggatatcagcgagtttcagaaccggcgttatctggcgcggtggggcgacgagttctccacgccgggtatccagatcgtcgagatctcgttcttctcgacgaaaaacggctatgagatcgccgatacggtggcgatcgcccaactgctcgactgcgaagtctggaaaagcacgacctaccagacccacaccgtcagagtgcgccggccattcgaggcggagttcgcgaactatgatgacgagctgccggtgtttgggccgtttctcatcgatacgagctatcgcaatgatgcctgcccgtcgttcacctggaaagacgagaaggatccggatcttggcgactgccgcatcgtcctctggtgcgacttcaatgccacggatcttcgcgaaacaggcagcgaggcagccgagcgcttcaacctggtagttcatgatcgcgcgtcagacgatccgctgtgctcgccagtgtccgccgcaaccatcgacgaactgcgcgagcagtgcaatcgctggtatgaggaaaacgtcggctaccgaccggataccgaagaggatgacatcccgatcggcaagctggtcatgaacatcggccagatggcattcctgcacgcggcgaaccacgctgacaagaaccaagagaacgccgcgtccgaacaggacaaggtctatccgaagtgcatcgttctttgcacaaactccaatggagctcctgagtttcacacctgctgccccgaggtgacccaggaacagtacgacaacggcgagcactacgaactggccaagcaaaacgccgagttcaacggttacgagcgtccgatgatcgcgttcgacgccaaggatccggcagccaagcagttgggtgcaatgctgacctggctgtagcaagcaacacccaatgcgatcccttcgggggtcgcattccatagaggatgcggagcgccctctactgaatgcgactgcaccaagattttctggcgcaagccgaaacggtagctgtcgtcaccggacactttgtctaagacagcaatacatcaacccgccggggaacctatccccgtccggggcatggttcatccggcaactcaaggagaagactatgcatagcaccatcgcaatgcccagcagcaccctccagcagaagggcgggcaatcatgctgatcaactggaccgacccagccatccagtctgcaaccatccagacgattggttctgcggtatcaacgctgatcgccgccatctgcgctgccgtcatcggcaagcagatcgccggccgcaagcgcctgcaggaaaaactcgcggactcccatcgcgatatcgacttcctgttggcggtcgaggccgagcactgccaaaagcacatcgacaacggcaccgaatccaacaagattcgcgtccgcaaccaggtgcgggagaagggtctcacgtggtctgggcggcacacgcccgggcgccgttaacgtcactaaaccaggcttcaccacaagctggagacagcaatcacgccctgccagaattctggtggggcgttttccattcggagtggcgccacgtggccacgcactggggcgcccaggcgcctcgcacgcaaccctcctcttttggcctggcctggcacgccagaagcgctcgccggcaattgcatccggccgccagtccgctgtatgattaccaaagctagctggggctcaatctagcatcgcaatatcagccgcacatcagcggcaatcaccctcaagaattcccataggactcagcccaataccatggcggtatcggactgggcctttttgcgcctgccttcctcatcgcccgttcgcacaacggggcggcaaacagactttttggcgtaagccgaaacggcagctggcataccgagacatcacgtctgagccagcattttcacaaccccacggggacacttcctccccgcctcggggatcggtgtctccactcctggaggaatcgatatgcaacagcagcagcaagtagccgccggcctgattattcaaggccgcaacccgcgcacctactttgatcccgccgaaatggccgaaatggaggaatccgttcgtgccaaaggtgttctccagccgatcctcgttcgcccctcgggcgaaaagttcgagatcgtcgccggtgagcgccgctggcgggccgcaatcaaggtgcacggcacggaatacccgatgccggtgatggttcgcgagatgaccgatgaggaggctgatgaagccgccctgatcgaaaacatccagcgcgccaacatgagcccaaccgaggaagccgatgctgcagccaagatccttggccgcaataatggtgaccgcgatgaggctgcacgccgcttgggctggtctcgttccacgctcgataagcggcttgggctgatgaactgctctgagagtgtccgcaaggcgctcaacgaacggcgcatccagctcggcatcgctgaacttttggcggctgtgacgaaggacaagcaggatcaggtgctcgaaaagctcctgtcctcgccaaaccttccgagcatctccgacctgaaaagcatgctcaatcaaattgcccgctcgctcgagtcggcaatcttcgacaaggctgaatgcgcggcatgtccgcacaactcagccacgcaacaagcgttgttctcggaagccattgccacaggcaactgcaccaatggcgagtgcttcgacaagaagaccgagagcggactcaacgcgaaagcggagggtctcaaggaagactatccggtggtgcgcatcgtacgcgccggggaaaacttcacgctgctcaaactgcaggcagacggcgccactggcgtcggcgaagaccaggcgaaagcctgccgcgcatgcagcaacttcggtgccgctatttccggcgtaccggggaaggtaggcaacgtctataaggacttgtgcttcgacgcgccttgcaacagcaagaaggtcgccgaacgcatcaaggccgagaaggcggaagccgaagcaaaggccaaacccactccgcccaaaacggatggcaaggccgcgaccaagcccgcaaccgctccggcggccaagcgtgaggtcaaggtggaagtgcaggactctaaccgtgtgaaggaataccgggtgaaagtctggagaaaggcactcaatcatgtcctgatgaaagatccgggcaagaatctgattgccctggtttccctcggcatgagcggcaacgcatcaaaggtcgatggggccaagatgcgcacggcgttccagaaggtgaccggcaattccgccgagtcgatggatgtcggcaagcttgctggacagctcgagtcggccggcgaagagatcatcaccacaatgcatcgtggcctggtcgcttccgcagctggcggtatcgaagagcgcacgctggttcagttcctcaactggctgaaagtgaacctcgcggatcactggacgctcaacgaggattacctgaccctcctgacgaaatcggaactcgaggcaatcgcagaagaaatcggactgaaagcagccatcggcaaggatttccccaagctgatgacgggcaaaaaggacgaactcatcaaggcgctgctcaaggtcgaaggtttcgactacaagggcaaggtgcccacgcaactgcactggactgtgtcctgattggtgcctcacaagggcgctgacagaatcgttcggcgcccaacgctgtaaatcactcaacccctgcggggaacccgattcccgcaaaggggacgggtttctccgcgcaatccaggagaaattcatgttcaagcaactcgccagcctgctggccaacaataccgctgtcacgttgatcctgactggcagcgctgaaaagatgaccgtcactgtcatcccgaaggcttcgaaaacggtccagggacaggatgctctgtccacaccgctggtcttgaccggtagcgccgacgaactcgacgctggcttcgccgatctggtgaccggcttcagcgacaagcgcaagagcctcgccgagcagttcgaagcgacggctgcggtactcgaagctgccaagaaatcatcggccgagagcgccgccaaggggatcgccaaaaccgcgaaagcggcgacggggacttccaaggcgacaccgccggccagtggcgacgacgacgaggacgaaagcttgggtggggacagcagtcctgtcttgcccgaggggtccgaatcgacgcctacgaccaacctgttcgattaaacggagggcgacatggcactgactgctaccgcagcaattcgctgcttcaacttcaacggggtggatttgcctgaccccgggcccgcaatgagtaccgaggatgtgcgcgatctgtatagcgcaacgttcccggaactcaccacggcaaccgtcgaaggtcctgaagtgcgcggcgaccggttggtttacaccttccgtcgcgccgctggcaccaagggctaatccaatggccacgctccgggaacgtctgcagttgcaggcaaggggtggggccgcaacaggcgggggggaggagactctctcccgcattgatgcggaggaagaactatgcgctcacgcactgcaaaggctcgtcagtttgagccaggtggcgacctcaggggaacggctgttgccgccctcagaagccatcgttttgatcctctaagcctcccggtctttgaccaacaggcgattcaggatctgggaacctcgaaagaggccgctttcgcacttcactggctcgatgccggctatctcgacgaatcgatgtccgatctatcggcaacgacactcgtgaaaatcggctttgagcggtggatcgagaaatggctgggagaaacgccgtacctgtgctcgatggtttttgcatatacgctatcgggcgacatgtatagccacaacgagcgagagcagccggacgattggttgttctcaatcgatcaggatgcacccgactcgcgtttcctcgagccacgtttcaacgtcatcgagcaaaaagcgccggggctgttccaaacggcgatcggcgtctacgaaagcgtggtcggccggatcggacttgcaggcacaccggaaacggtgcgctcaatggccggatacgagttgtggtgcggcacagacacccacgaagacttcgtggaggaactgaacgacatgggctattcggaggaagacatcgaaacgatgttgacgccgaatgactaccggagttctttgccggcctggctgctctgcccgcagcccagcgaagacgaaacagaaccgcaagtactgcggccaatgctcaccgacgacgcgcttaccgcgctcgccgaaacgagcgacccggaaattgccgacatcgccacaagcgtgttggcactcaaggggtgcaaagaagcgctcgatgacgccgtcctcaacgtcgacgctgcaccaatctacttgttttcgctactgcggtggaatgaagacgaccaagttcggcgggcctacgacgatatcgttcaacgggccaacgaatgcggtgacgggtacagctccgaactgaccgaagagtgggtcgggagcgacagcgaatccttccagcaatggcgggagcgctacgaatctgtgtttacggcactgaagcaagccaacaagctgattgagctgttatccgttccggacgacagcgattaaccaacccgcgccggggattcttaccccggacggggaagtaaccggcgctttcaaggagtccatcatgaaagtgcacaacggtgatcacgcgccgacgctcagttcggcgatcttgctatataaaaaatcgggaccacaagggaacggcggcgcatttgccaccgttcacccggtgcgaactgacgatgcaggggtttcgaccattggccctggcacgccggcgtcgcggcaaggcgttctcgccgcgctgcgcgaactggcggaagacagaatcaaaccggaactcatcccggctcacatcctcgcaaagggctcggaccacctggtctggtaccgccctgcgttaaagcgtgttgtgtggttcaggtgcaaggatctgggtgagcgcactgcgctcgttccgcatccggcaacgctctggctggtcaatccggccaccgggtattgctctgtcttcgcactgcgcgatgacacgagaccggacaaggatacggggctgtaccaagccccgtactacaacgtctgggatacggggcaaatctgtactggcaatgccggcgtcccgaaaggggcagaggcgctggtgccggaaaactgggaaaggatgttttacgactcctggttctcgcacccgaatacaccgaaacttgtcaggcacaaggaaggcgcaatggctttctggaagaacctgctcgacggcaagcaccgcgtgtttccgaaggccaagctgttatcggccagaacgacactcggacggcagtttgcacgcctgtgtgcggaaccgaagtgatggatccgcgcgacgtggttttgcagacgctgactccgacggtgatggtgccgaagtttggtgccttcaaagcgctggagaccccaggccaccgattcttggtggcagctgacggcctctggctagaaatccggcgtgcgtggctgtatgcgcgcatgcccatcaccacgaaacggggcagcgtaccaatcccgtgcggcgaactgacgccgtgtctggagctcaagttcggcaaggtgccgcgcgcgctgctgagtaaattcgtggaacaggcgaaagccgacctcccgaacgaatcagccgcggcgatcatctggaacgaacgtaccgaggaaatgcgcctgcagcctctcgaggctgtgcgcgcagggccggggcacatcaccttcaaccagccgtccctggaagacggcgagcatctggtcgtggatctgcattcccacgcaacgacgcccgccttcttttccggaaccgacaaccgcgatgaccgaacggccatcaaggttgccggcgtcgtcggcgatctcgacaaacaggacccgacctacgcgtttcgtctttgcgcgctgggaacgttcatcactctctgaaaggggcaacaacgatgtat

SEQ ID NO: 23 - DNA, 24923 bp, Artificial Sequence
  Synthetic Oligonucleotide
tgcaagcccgcctcatgagccaagccctgcgcaaattgacggccagcattaaaaaggccaattgcacggtgatcttcatcaaccagatccgcatgaagatcggtgtgatgttcggtagccccgagaccacaacgggtggtaacgcactcaagttttactcatcggttcgcctcgatatccgccgtatcggacagattaaaaagggtgacgagttgaccggtaacgagacccgcgtgaaggtggtcaaaaacaaagtggcaccccctttcaaaaccgccgagttcgacatcatgtacggcaagggcatcagtcttgagggtgaaatcatcgatttaggcgtgttacacagcatcatcgacaagtcgggtgcttggtatgcctaccagggtgaaaaaattggtcaaggccgcgacaacgcccgtgacttcctgaaagaaaaccccagcttggcgcgtgagatcgaaaacaaggtgcgtgccgctttgggtgtacccctgcgtgaggccatcgagcccgccaaggcggcaccagcgcccaccggcaaagccgccaaggccgcggccgcagcagcggcagcgccagcgccagatatcgatttaggtatctcagaggacggtgaaattcccgcgtaaaggcccgcttggtgtctgtgcaaagtctctcgctcaagggccgcgtgttgcggctcttgagccagcgggaacactcccgcaccgaattggctcgtaagctcgccaaactcgaaaccgaggacggcgagctggccaaggtgctcgacgacttcgttgccaaaggcctgatcagtgaagagcgcctggcgcaaagcgttgtcaaccagcgtgcctccaagctgggcgccatgcgcctgcgggccgagttgcagaccaaaggggtcgaccccagccatatccaatccgtcattgccgagctcaaacctacagaggccgcacgtgccaaggcggtgtgggctcgaaaattcaaccaagcccctgaagacgccaaagccatggccaagcaggtccgctttttggcggcgcgcggttttgacagcgcggctatccgcgctgccgttccgcccattagccgagtaagcctcagcgaagacggtgcgcaagcgccgcaaagcgttgacgattacttggataatggggaatgaacaaagacacaaccgcctcgccatcgttatccgactgggccacattgcccatcgacccggcgcaacaaagcaacctcgccgccttggggttcagcaccatgacaccggtgcaagccgccacattgcccctcagcttggcgggaggcgacctcatcgcacaggctaaaaccggtagcggtaagacggccgcctttgcgattccgttgctgcaaaaactcaatgtgggtcaattggcggtgcaaagtctcgtgctgtgtcccacgcgagaactggccgatcaggtatgcgccgagattcgccgtttggcccgggcctatgacaacgtgaaagtgctgccgctgtgcggcggtgtggcgttacgcggccaaacggccagtctcgaaaatggtgcccatatcgttgtgggcacgccgggacgggtgctggatcacctgcaacgtggcaatttggcgctgtcgacgctcaccaccttggtcctcgacgaggccgatcgcatgctggacatgggctttgccgacgatattcaagccatttccaagcaaacgccagccacgcgacaaaccctgctgttttcggcgacctatcccgataccatcgccgcactgtcggcccggctgatgcgtcaaccgcagatagtgaaagtcgacaccacccatgacacccatgccatcgaggagtggtttttcgaagtcgagcccgatacccgattggatgcggtcacgcggttgctaaaccactaccaacccacctccaccgtcgcgttttgcaacacccgggtgcaatgcaacgatttggtgcaaattctgcgtgcgcatggcttctcggccctgacgctgcacggcgacctcgatcagcgcgatcgcgatcaagtactgattcaatttgccaaccacagttgttcggttttagtggccaccgatgtggcggcacgcggtttggatattgccgatctcgccgctgttatcaatgtcgacaccacgcctgacccacaggtctacacccatcgcattggtcgtaccggtcgcgcaggcgcgactggcttggctttgagtctggtcaccatgcccgagatgagtcgcgtggcacgcatcgaagaggtcaacaaccgtccagcgcggtgggcgaatttgtcaacgcttcaagcgacgggcagcgctttgaaggcgccgatgcgcaccttgcaaatcgcgggtggacgaaaagagaaaatccgtgcgggcgatattttgggcgccctaaccggcgaggcggggttcgataaatccgaagttggcaagatcagcttaggcgaattttcaagctacgtcgcggttgcggtgcccatcgcccagcgggcttgtgacgccctcaacgcgggccgcgtgaaaggcaagcgcgtgaaagtgcgcttgctcgataactgatctcaggcggctggccagtcaaacatcaaacccaggttttgcaccgccgccccgctggcgcctttacccaagttgtccaagcgggccaccagcaggctgtggccatgcgtgtcgttgccgaacacgtggatctctaggtcgttggtatcggccagcgccaatgcatcgagcttgccggtgtcggcggcatcctcgtgcctcacgacccgcacaaagcgactgttcccgtagtgcgcctcgaacaccccagccaagcgggccttgtcggtacccgctgccagttggtcgcggtgcaagggcaattgcaccaacataccttgtgcaaaattgcccacgctggggacaaataaggggcgcgtttgcaagcccgtccactgcatgatctcggggatgtgcttgtggctgagtcccaacgcataaagctcatacgcgggcgcactgttggcttcataagcctcaatcatggtgcgaccgccgccactgtagccactcacgctgggcaagcaaaccggcgttgtcgccggcagtacgccagcgtcaatcagggggcgcaacagggcgatggcacccgtggcgtagcaacctgggttggccacacgttccgcctgctggacggcggcggcctgcgacgcacacaactcagggaagccgtaaacccagcccggggcgacgcgatgcgctgtcgaggcatccacaatccgcggtgctttttgacccgccgctttcagctcgtccaccaacgcgaccgtctcgcgggcggcatcatcgtgcaggcactgcaccaccgcatcggcctgcgccaacagggcgcgtttggcagccacgtctttgcgcaaagcggggtcgatttgcagcaactgaacgtgcggcatcgtcgccagacgctcgcgaatctgaagtcccgtggtgccggcttcgccgtcgatgaaaatattagtcatggctgatatttggggttgcggcccgcgtcgccgtcagtttggtgaaaaatttctgcactgcaacatgatacagtctacggttggtaatttcctctgactggcctagcagggttgcccccgtttttgccataaaagggaagtgatttgtccctactttgagagccctgacatgaagatccacgagtaccaaggcaaagagatcctgcgccaattcgaggtgccagttccccgcggcatccctgcctttacagtgcaagaagcggttgaagccgcacaaaaattgggcggccctgtctgggttgtcaaagcgcaaatccatgccggtggccgaggcaaaggcggcggtgtgaaattggcccggtcaattgacgaagtcaagcaactcgctggcgagattttgggcatgcagttggtcacgcaccaaaccggccctgagggacaaaaagttcgccgcctcttgatcgaagacggcgccgatatcaagaaagaatattacgtgtccgcggtcaccgaccgcgccagccaacgcgttgccatcatggcttccagcgaaggcggtatggacatcgaagaggtggcgcacaagacgcccgagaaaatcatcaaggtatttgtcgaccccgcaaccggcctgaccgccgcgcaagcgaccgagctggcaaacggtattggtgtgccagcggcatcaaccgccgctgcggctgatgtgtttcaaaaactgtacaaatgctacatggacaccgacgcctcattggtcgaagtgaaccccctaatcctcgaaggcaacggcggcatcaaagcgctcgacgccaagttcaactttgacagcaacgccctgttccgtcatcccgaaatcgtcgcgtaccgtgaccttgacgaagaagacgcggccgaagtcgaagcctctaaatttgacctcgcctacatcagcctcgacggcaacatcggttgcttggtgaacggcgccggtttggccatggccaccatggacaccatcaagttgttcggtgccgagcccgctaacttcctagacgttggcggaggtgccacgcctgagaaagtaactgaagccttcaagatcatgctgaagaaccccaaagtgaaggccattttggtcaacatctttggcggcatcatgcgttgcgacacgattgcacagggtgttatcaccgcgtgtaaggcggtcaacctgggcgtgccgttggtggtgcgcatgaagggtaccaacgaagagctgggtaagcagatgttggcagagtctggtctgccgatcatcagcgccgactccatggccgaggccgccgaaaaaattgttgctgcggttaaagcctgagcgaaaaggaataagcatgtccatcctgattaataaagacaccaaagtcatcacccaaggtatcaccggtaagaccggtcaattccacacggaaaagtgccaagagtacgcaaacggcaagaactgtttcgtcgcgggtgtgaaccccaaaaaagcgggcgaaagcattttcaacatcccgatttacggctctgtgaaagaagcggccagcaccaccggtgcaaccgtatctgtcatctacgtgccgcccgcaggcgctgccgccgccatctgggaagcggttgaagccgacctcgacttggccatctgcatcaccgaaggtattcctgtgcgcgacatgttggaagtgcgtaaccgcatggccgccaaagaagccgccggtggcaaaaagaccttgctgttgggcccgaactgccctggtttgatcacgcctgacgaaatcaaaatcggcatcatgcccggccacatccacaagaagggccgcattggcgtggtcagccgctccggcacgctgacctacgaagcggtgggccaattgaccgagttgggtctgggccaatccagtgctgttggcattggtggcgaccccatcaacggcttgaagcacatcgatgtcatgcgcatgttcaatgacgaccccgacacagacgccgtcatcatgatcggcgaaatcggtggtcccgatgaagccgaagccgcccgttggtgcaaagaaaacatgaagaagccagtggtcggctttatcgctggtgtgaccgcaccggctggtaagcgcatgggccatgcgggtgccttaatctctggtggtgaagacaccgctgaggccaagctggccatcatggaagcttgcggtttcaccgtgacccgcaacccgtccgaaatgggtaagctgctgaagcgcttgctgtaaaccggatcggcagcgtcagcatgccgctggcgcgtgttcgtgcaaaaatggcaacgtgttccatgcgttgccattttttttgatacgttcaatcgaaagaaaataaccggtgcttgagtttttaacccctgaattctggatcgcggtgggtcaaattatcttgattgatattttgctcggcggcgataacgcggttgtcatcgctttggcctgtcgacagctgcctgaaaaccagcgcatgcagggcatcatgtggggcactgtgggcgcgattggtttgcgggtgttgcttatcgtttttgcgctaacacttctgaccatcccttatctgaaaatcgttggcggtttgttgctggtgtggattggtgtgaagctcatgatccccgatgaggaaggagaccatagcgtcgtcgatgccagtgacaagctctggtcagccgtcaaaacagtcatcttggccgacttggtcatgagcatcgacaacgtcatggccattgctggcgccgcgcagggtgctgccgagcatcaacaagtgccgctggtaatttttggcctgctagtcagcgtgcccatcatcgtatggggcagtcaattggttttgaaaatcatggacagcatgcccattgtcatcaccttgggtgcaatgttgttgggctggattgccggcatcatgatttggaccgacccggtgctggtcgatgtgctgccgtctgagcccctgatgggtttgtctttgcgccattgggcggggtttgtcggtgcttgcttggtgtgggtgattggtcgtgcggtcatcgcaaagcgccctaaacccttaggggcttgacgttatctctgagcgccttagacaccgtgcatcgttggttcaactttggaaacaacccggacactcattcatgcaactttccagcaaccgtaaccttggcttcaccttgattgaattgatggtggtggtggccgtggtgggcatcttggctgcagtggccattccgcaatatcaaaactacacccaacgcgcgcggtgggccgccaacctcggcgccattgccgcgttacagggtacggtcagtgagtgcctcggccaacaagccaacgacatcacgttatgcgacacgtttggcgaacttggggtcaccagtggcctgaataccgacggcgtcatgccgttgccccatggcacggttgccgtgcaagccagcggtgatgccaccgcgattcgggttgttttaacgggcgctgccaatgcgggtaattgcatcatcacagccagcttgacgcccgcagaaggagcccaaatgctgcaatgggccctcacgcgggacaccacacaaactaaatgtaccgctgccaacacgggcgttgacgcagcaggctgattcgggcgtaagatgcggctttaatttttggagcccagcatggcaaaaggtcagcaaaaaacaaacaaggaatccaaaaagcccaagaaggccgccgccgccgcccctgctttgaacagtgcgcaagaacccgtgcgtgccgtggtcaccacatccgtgatgcccaaaggcaaggctaaaaataaaccggccttctaatatttattagctatttattttaaaaattaaacaataaaagagtacttattgactattatgttgtgaagtaatcgacttgccttccgcaagccgttgattcacacatggggcaggctctgcaaacattcactcgacgggcgacgctcaaaaccccggtcatcatgcgggggtacctcacgcttgatgcactgctgatggcggagttggtcactggcgacgtctcgcacttactcaagcgagatgcgcagttgtactacgccagcgccgcctttttggtggacccgcttgaggaaaagcaaaaggcatcatttgttgccagcatgcggcccgagcaccacccggagctccgcgagctcatcgcccccaacacgcacacacccaacgcgccaccgcttttgcacacgcatcggtcgcgtggcaatgtcaacgacgtggcaattggacgcgctcgccgcaaagaagcgggcaacatcctcaaccaatacgtggcccacgctgctgcagccgtcgagtggtatgccaccggccatgccgagcaggtctggcaggttgtgcaagacatcgcatttattggcaaaaagcgatcagcgggctacggcgaaatcgacgcatggcaggtgatccccggccaccttgatggcctcaccgatgacttcggagagcccttgcgccccgtgccggttgagcgatggccaacctccgcgacgcttattccctccgaggccgcatggtgcgccccgtattgggatattcgaaaccgaaccaaatgctacacgccggagccacgatgaacggcgccgacttcttaatgcaacacatcggttatcggttattgccgaaagcgatgcacaccggcgatgccgtcaccgatgccaacgcgctattcagcatcagtttgcccctacacaccggaaaaacactccggctttccagttgctggtgggtgatcacacccgatgcaacgtacaccagcgttaaggccatccccgagaccggcgccattcaggggcagttgcggcaggccgtcatcttgtcatccctaaaaacgggattgcccctcttgatcctcgcgattggcaagagccccatttacgcacgcgacctctttgtgacctacgacccacgcgcaacgcgctattgcagcgatcgcagtttgcgcaccgttgattcaactctggagaagtggtggacaccttaatcagcaagcccatccagctgtgcggctatgcgctgcaccgcttggttgcgcaacatcaaaacggtgcgccagcgctctggcgtgacgagggtgacaccgtgcgaattcgctcgcgtgacgcctgtccgcccacctacgtcacagggcaactgttgggctttgtcacattggcgtgtgtgtcgtttggtagcaaacaccgctacctgccggtcgccgattggcgtggtcgcaaagcgtggctggaggcacagggcatcaaacacggtttcgaggtggttggggtgcacgcccagggtggcatgcaaaccgtgaccacccatgacggtcgccacttcaccattgatgccacgcaattcacgggcttgctgcgcgtcacccagcctgcgccattcaacgactgtctgctcaatggcatcggcaaagtaggtaaagcctttggcctcaacttactcgtcgttcattaacccaacgcttaaaaacgcttatccggagttcaccaccatgcaagacgttcgcatcgatatcgccatcaatacgattcaacccatcaccttcacccatcacggcatcgacgggttgcccaccatggctcgcggcgttgacatggagggtcatcccctgcgcaccgtttacattccagccgcgcagtttcgcggtcggctaaggcatgaggcggcgttggcaaaaatgcgtaccgcacacggccccatcaagttggcggaagcctacatgctggccttggggcaaaacatcgacaccaaagaagacgaggctgatgagaaagtgcggttgggcgagctactcgctttacgggcggccaaccccttcattgatctcttcggaacgtggcgcatggacagccggctttacgtgtcgcacctgatgccggtcgtcaacgtcaagcccgacacctttcaccacatccgccgcgatctagacaccaacgacgcgttgtttgccgagttacccgaagccgagatcgacgtcttttacgaaaggcaagacggacagtcgcaagcctctcaagcggagagtctgattaaggtggccacccgcgaactgcgcaaagccaaaaaagaaaacgacctcgccaaatgcgacgagttcgaagccaagatcgaagaactcaaagccctcaagaaggcgcacaaagccggtgacgaatcgggaaacaccaaacacttggtggcgatggaggccgtccctgcgggaattcaattgttgtgcaaactcatcataaagcgggccacgccgctcgacctcagcatgctcacgggtgcgcttaacgcgatcagcgaattccccatgatgggtgcccagcgggcccgtggctgaggcaaggtgagtggcgccgcaaccgtctgccacacccagggtgaggtgttggcgcaaatcgccttcggtggttttttgccagctgcactggagtggaccgatgcgggcaccgcgttcatgactggcctcgaaacggttgccgtcgccgcgtgaaaggcccttaccgcagcccacagcaggcgcaatacgccaagctcatcgagcgcgctgtcagcaaacccggtgcgcccctgttggcgggtgctgcgcccgggctcggtaagacacacggctacgccatcccgttgttgtgcagtggcaaaaaagttgccatcgccatgagcacgcgccaactgatcgatcaatttatagcgagcgatgcactcgccgctgcgcaagccgcactagaggccgaggggcggcccgctgccaccgttgtcgccttgcaaccccgccgtcaatttgaaacggcggtggcctacagcgcgcacaaaacggcggcgcttgatgccgacgtcttggtgctcacacacatgggcgtgctcatcgatacccacatcccagcctacgcccagctgcgtcagcgcgctgtcttgttgtttgacgaagccgatcttttggccgatgccgccgacttgcgcagcacctatcgcattgaggctgaggccttagcccgcgcaggcgtcgaaaacgccacaccgacaaaggcggttgaaaccatcattaaaaaatccgatgaccccgaggaaaaagcagtcgccacagccatccaacgcgctttggcagagccggcttggtacaaagtgatcggtaaagaagacaacggcgatttggtgctgacccaccgcatgccggggcgcatgttgcgcaccctcatcaatgacatgccgcggtgcattttcaccagtggcaccctcacggtatcggggcgttttgaccactttgtcaaagccatcggcctgaccgcagtggcacccgaaagccagcacattgaccccgtgcaacacggccaactgcgcgttgaggtggccagtgaggccctcaccccagaagcacaagccgaacgcatcatgcacgcggcgacaccggtattggtgctgaccaccagccacgcgactacggcggcgttgggctctttgtgccccggtgccatctgccgcgcacccggtgaagccctcatggatgcggtggcgcgatgccctgatgatggcatcttgatcgccgctggcgcctggtctggcctcgatgcgccgcgcctgcggtggcaaaccgtggtcatccccaaaacaccgtacggcaaaccactcatccttgacgcccagcagataagcgcttacgtggacagcaaggttgttgccatcaggcgcaccaaccaagggttacaccgtgggctgcgcaccaccgatgccacctgcaccttgctgttactcgatccggatagccgtcgtgccgatttacgtcaagccattccccgtcgtttcttggtggattgggacagcgtggccgagggctcgttggttttgcgcacgcacttcgcccgtgaacgaaaaaaaggtctgcgtgaaaaaaccctgagccggcgcgggcagcactgcgaacaccccggctgtacggccacccaagagcatttgctggaggtgcaccacctcaacccgattgccaacggcccccgcgacacagttactgatgacctgcgggtgctttgtaaaaatcaccacgcggatgcccaccaagccatgcgaaaagctgattttttaaaagtgaaaacaactgaaaagcgtgcagaggcagacacttaggccacagctggtcaagctacgccgtaaatgcgtagttactggaacttcgcgcgagtgcttagataggcttccatcggtcaagctacgccgtaaatgcgtagttactggaacttgcgtgtggtatcagttcagcgtggatcgggtcaagctacgccgtaaatgcgtagttactggaacgaagttcacgttgacactgccttggatacgggtcaagctacgccgtaaatgcgtagttactggaactggtagcggctgcttgttaagtaaggccgaggtcgtctggggtcaagctacgccgtaaaggcgtagttacttttagcagccagttttgctggttttaagcggtccaatggcccgacttgccgcccatcttttcaagcaggcgcacgcccgtcatggtcatgccgcggtcggcggctttgcacatgtcgtagatggtcagcaagccgacttgtacggcggtgagggcttccatttcaacacccgtggggccggtggtttcggcggtgacggtgcaatgaacgtgggggggctggtcaccggtggtgaaggctacgcgcacatggctgagcgccaagggatggcacaggggaatgaggtcagcggtgcgcttggaggcttgtatagccgccacgcgcgcaatgcccaacacatcaccctttttggcgttgccatcgcgaatcagagccaaggtgtcggcgtgcatttcaatgcgcccttctgctgtggcgctgcgcttggtgttggctttgtcacccacgtcgaccatgtgggcttggccttgtgcatcaaagtgggtcaggggtgaagggggctggctggacacggtgcaatctccgaaactttgcaaaacttagggcatcatacccatatgccttcccccttgtttgttgctcgccgtcgccctcgtttggcgtgggcgttgccgtgggctttgggtgccgccctgctgctggggccaaccacactcaccgttgcgcaaccccgcgcggccttgcccaacttgggtggtggggtgtcgttaacgctgggggatgagcgccggctgggccaacaaatcatgcccagcttgcacaacagtggcttggtggtggaagacccgctgctcaaccaatacctcaccgatctgtggcgccctgtgtttgcaacggcgcgcgcacgcggtgatgtgcccgatgacatgttgcagcagtttgcttggcagttgtggttgctcagccccaaagccatcaacgcgtttgcattacccgggggttactttggttttcacttaggtttgttggcatcggccacggatgacgctgcactggcgtcggtgttggcgcacgagttgagccatgtgacacagcgccatattgcccgcatcatccaagcccaagagagccaagcgccttggctgattggcgccatgattttgggtgctgccaccatcgccgccagccccgatgcaggcgccgcactgattgtgggtgggcaggcagcgtccattcaaaaccagctcaacttctcgcgggacatggagcaagaggcggaccgccaaggcttggtggtgttgtcggaggcggggtttgatccgaaggggtttgtgcgcttatttgaaaccctgcaaaacgccaaccgcttgaatgacgatggtgcctttccctacctgcgcagccacccgctcacgaccgagcgtgtggcggatatgcaaggccgcttgttcagcgtaccggccgagcccaacccggtgggcgatggtgcggtgcagatgcgcgaccccgatgcctctgctttgttgcgcgtgcgtgccgccgtcatcgcctcggctgatgaggtggatgtgttgcaaggttggggtgcggcgcccgccgccactgggtcagtgggcagcgccacccgcccggcagaacaatgggcgagcgactaccggcgcgcactggccgcgtgggcactgaagcgccccgatgtggcatggacgcgcctgcgccaattgatgaccgaggcggctacgcaacccgccgtgtcgcaggtgctgcgcgagacggcgttggcttggctggccagccccgctaagtttgagccgatacccgctgcaacggtgcaggcttgggttgaggcggccttggctgatgcccaagccgggcggcgttcggcgctgctgctgttggcgggttatgcggccagcgccaattcagccgtgccggatgcgcggcgcgcgcaggtgatcggggccttgcgtacctggttggcgacccaccccaatgatgcgttgggctggcagttgttggcccgtttgagtgcgcaacaaggccaagccttggtggcgttgagggccgaggccgaggcctttgtggcgcgcgagctgtggcaaggggcgcttgaccgtttgtctgccgccaagcgcctgattgcggaggctaaaacccgtttcagtgaagccgacattgcgattatttacgcccgcgaaaaggcagttaatcaagccatggcatttgcacggtctgagcgccgttgagcgcgcaccggtacactaagtcccccatggcagtcatccacatctctgacatcgagtcggccatcaactattggcggacacaaaaaccttcacccgacggtgtgacgctgtgcgccgaggtgcgcgccttggccgaggtttatgcgctgctggtgtactaccacgagaccgaggccgatgaggccagtatgccgtttgatgcctatgcggcctgggaggcttggttcgacacgacacccgatacgccgtgtatcgcgatctgctcaaccagccagggcgatgacctgtgtaaaggttgtggccgtacctttgaagaggtgcagtactggaccgaaatgcagcccgccgaaaagcgcgcggtttggcgtcgcatcaccctgcatggcgatgcgtggcgctttaaccgctaccgcgaacgggcgatcgagaacgcggcgtaaccgcgtgccgtcagcctttggcggcgcgcaacgccaattcggcggctttaccgacgtaggtggcaggcgtcatggccaacaaacgcgctttgtcggcgtctggaatagccagtgactgaatgaggccgtgcaaggcttcacgcgtgacggttttgccccgtgtgacggctttgagttgctcgtacgcgccatcgataccgtagcgccgcatgacggtttgaatcggctctgccaacacttcccacgcgttgtcgaggtcgtccgccaaggcgtccgcgttgagttcgagtttgcgcagacccaccgccatcgattgatacgccaacaccgagtagccaaacgcgacgcccatgttgcgcaacaccgtgctgtcggtcaggtcacgttgccagcgcgagatgggtagcttttcactgaggtggcgcagcaaggcattggccagccccaagttaccttcggcgttttcaaagtcgatcggattgactttgtgcggcatggtggatgagccgatctcaccgtctttgaggcgttgcttgaagtaacccaagctgatgtaaccccacacgtcacgcgcaaggtcgatcaagatggtgttgacacgggccatggcgtcgaacagctcggccatgtaatcgtgtggctcaatttgaatgctgtagtcctggaacgttaagcccaagccattgggtgcgggtgaggccaccacgcctttggcaaaggcctcccaatcgacgtcgggccaggcgctcatgtgggcgttatagttaccaaccgcgccgttcattttggccatgatggcgacttgctcaatgcgcaaggtggcgcgttgcaggcgcacggcgacgttggccatctctttaccgacggtggtcgggctggcggtttggccgtgggtccggctgagcatgggcacgtgggcgtactgctcggccatgcccagcagcagattcacgacgtcgcccaacatgggcaacagcacttcgcgtagcgcggcttgcaattgcagtgcgtggctggtgttgttgatgtcctcgctggtgcaggcaaagtgcacaaattcgcctgcacgctcaagctcttcgcggaccgctgggctaagacggtcatttcggaaagcgcgtttgatccaatactcaactgctttgacatcgtggttggtctcgcgctcgatggccttgatgtcggcggtgtcggcttcgctgaattgctgaaccaagccccgcaggtaggcggtcgcctcggccgataaggcgggacactccaccagaccggcttgcgtgagggcgataaaccacgtgatctcgacttgcacccgcttgtgcatgtagccatgctcgctcatgatgggtcgcaaggcagccagtttgccgctgtagcggccgtcaagcggggatagggcggagatggtgtagaggtcttgagtcattgggggcggggcgcgatgtgcaccaaaatagatagccaatattgtaggcgcccagccaaattaaacctttggctgtatacaggtttgatgagcttaaaagcgaccaggattccttttggcgcccgtgttttggggctttctgtggctagaatcattgctcgatcaaccattattgaaacccatgaaactcatcggctctccaaccagtccatatgtgcgcaaggttcgcgtcgtcttggttgaaaagcgtctcgagtacgagttcgcaaccgaagatgtgtggtcggcggataccctgatcgcagcggctaatccactcgggaagatcccctgtttgatcatggacgggggtgaggccatgtttgattcgcgcgtgatcgtagagtacctcgatggcttgtcgccggtgagtcgtttgattcccgcaagcggccgcgagcgtgcggaagttaaaacctgggaggccttggctgacggtgtcatggatgccgccatcttggctcgcttagaggcttcatgggctgggcgcaccgaggcccaacgctcaccggcttggattgaccgccagttgggcaaagtggagttggcggtggctgccatggccaaaggcttgggcgacaagccttattgcagtggcattcatttcagtttgtcagacgtggctgtgggtagcgcgttggcgtatctggagttccgctttccacaaattaattggcgcgaaacgcatcccaatttgtccgcgttgttagaccgcttgatgcagcgggccagctttgcaggcacggcgcacgcctgatagcccatcgctctgcggggtttatcccgcgcgctttttgagccagcgcatgagggcgccgatgacggggagcttttcatacagctcttccgcagcgtcccagtagtcgcggtgaaacaccaccaagccctgcgcgtcgaagcgcaaatggctggcaccccggatggtccaggggcgaccgcccttgccgccctttcggcctttggtgctgaatagaaaatcccaagttaaaaagcagtcatcaccctgttcaatggccgtcgtgaccacgaagcgcggttgttcaaggcgcttgaacatgtcatcgaagatgtgctgaacttgcgccaactgcgtgacttcgttgaaagggtctttgaaaaagagcggatcggcgtagtacgcacccatgcgcgtcacgtcagcggcttgcaggttttcaaaccatgccaataacgcttgtgtgcgggccgatacctgatgacgggatgcgctcatagtcgggtgagttttttgatgagcgcttgtgcccagcgatgcggcaatacgcgcagcaatttgagccaccaggtgaagcgtttgggaaagtggatgtcaaagaggccatcagcccaaccagccaaaatttcggtggctgcaacatcggtggtgatcaacgcaggcatggtgaactcgttctgcgcggtgagtggggtttctacaaagccggggtggatggcgctgatacccagccccttgcccgccaagtcgtaatgcagtacttcagcgaaatgggtgagcgcggctttggtgggaccgtatgccaacgagttgggtaacccgcgccagccggcgacgctactgataaaactgaggtgaccaaatccttgttgcaataaggtgggcaaggtggcatcgaccaagttataggcgcccacgacgttgacgtcgagatgttgcttcatgcgtgccaagtcaaaccggtaggcgcgcaggggcttgtaaatcccggctgcaaacagcaccagatcgagccgcccttgcgcctgcacaatgtgttgcaccgtgttttgcagcgcgggcaagtcggtcacgtctagtgggtaggccgccgcactggggtgctgtgttgcaaattgctgcaggggctcgctttggcgtgccgagaccattacccgggcaccgcgttgtgccaactgctcggcaacggcgtggccaatgccggtggaggctccaacaatccacaccactttgccagaccattccgtcagcggtgggttcatgggtttgaacaagcgggccatcaggcggcagtcattggtttttcgagcgtgaactggatcacgtccgtgttcgactccatgaaggcggcttcacagtaggccaagtagaactcccatgtgcggatgaaaggcgtgtcaaaacccagcgcgcggacggcgggttcctcgtgcaggaatttgtggcgccatgtgcgcagggtctcggcgtaatcgagaccgaatgccttctcattgacgacacgcaaaccagcgcgcccagcagattcgcggaattggcgtggactgggtaaacagccgccaggaaagatgtactgctgtatgaagtccgtgccttggatgtagcggctgaacaggtgatcggcaatcacgatggactggatacaggccttacctccgggtttgaggcgcttggcgatggtgtcgaaataggtgggccagtaggcgcgcccgaccgcctcgatcatctcaatcgagcaaaccgcgtcgaatggttcttcggggctgaccacgccaatgtcacggtaatcctgcaaccgcaagtcggctaactgtccgttgggggttgcagcgagtcgcttgttggcccagtcgagctgttctgtggacagcgtcaggccgaccatttcgctttgaaattcgttggtagccatttctgccaaggcgccccagccgcagccgatctctagcaagcgttggccgggcttcaagtccacctcttgcagcgcgcggcgcaccttttcgttttgcgccatggccatgtctgtgatgccattggcatacaacgcgctggagtagttcatggtgttgtctaaccacaaacggtaaaagtcgtttccgaggtcgtagtgcgcgtgaatatttttgcggctgttggctttggtgttgcggttcaaccagtgcttcacttggtaggcaaaacgcccaatgggatgaccgtatacggctttctcgatggcgtcgcggttttgaatcagcacctgcaacaagtgggcgagttgcggggtgtgccagtaaccggcaatgtaggtttcggcgaagccgatatcaccacttttaatggctgccgaaaacacacgccaatttttcaggatgatgtagccctgcaaaccaccaggtttgccgtagaccagccaggtgccgtcagggcattgaatgtgcaactccccatgcgtgattttggtgagcagcttgagcagtcgcttggccgcgaaggggactttgacgtgggcgagggctgccgcggtggtggtgtctcgttgcatgggtcgtcgaatgaaggctaggtaatgaactcggtgggtggcgcaggttttctgaaaaacggtacacgcttcagaaacaataacagggcttgccaatgaatgcgcgccatcaccccaaaggtcatgagggggtaggcccatagcgcgcgtcggcggctgcgcgcgtttaggggttcgagcgtaccactcacgctggtgcacagcaaaggaccgtccgcccattgggtgtcggtgtagtcaatgcgggcgaccacgcggtttggcaccccctgccccgtttgtttttggtgcatgaagttgaaccggtaactgccccgcacctcgcaaaagggggaaacatgaaaaaccttttcagtgcgctgctgtacacccagggttacgtggtccagtacgtagatgtgccgctcgccaaatgtgttgttgacctcgacgaccacggcttttagttcgtgcgcggcggtgtagcagtaccaaaaactgacgggcttaaaaacgtagcccaacacgcgtgggtaggtgtgtaaccacacttccccggtgcagtcggtgatgccctgctcgattagcaaggcatcaagccaagccaagctgtcggccccgccgacgccgtggtcactgtcgtaaaacgacaagggtgcccatcggttgcgcggaatggcctcgtcgaaggctgcagggtcttgcgcgccttggcgcatcggcagccaaacaaagtagttgccgtacgcaaattgatgcggggctggtcgggtgcgggtgtgccgcaccacgccaaatccaatctggggggaggccgtcacgcgctcgtccgttgggtggccgccatgtcaaggtgagcgcgcaacgcgttagctgcacgcagcccggactgcagcccgtcttcgtgaaaaccatagcccgtccacgcgccacagaagtaggtgtgttgggtgccctgtagcccggcaatttggcgttgggcgtcgatcgccgccaaatcaaaaatggggtgatcgtagtgataggtgcccaataccgactcgggcgcgatggcactgaccgggttcagtgacaccaccacgggctgcgtgaagggcagcggctgtaattggttgatgaggtagtgaaggcagacgcgggcgtcttcttgtgccaaagcgggtgcgcgttcgtagttccaggccgaccacgcttgacgagccgagggcaagaccgatgggtccgtatgtaaaacagccacattgggctggtagcggatcgcgcgcaaggtgctcgtttcggcgggggtcgcgtccgcgagcatggccaaggtttggtcggggtggctggccacgatgacgtggtcaaagggctcgataccccgtgctgtggtgatggacaccccattggcgtcacgggtgatgcggctaacggggctgctcaagcgcgcatcaggaactgttttgaggatggcatccacgtattggcgcgcgccaccggcaacggtgaaccatttagggcggttcgccacttgaagcagcccgtggttgtcacaaaactgtaccaaggtggcgacggggaacgccagcatctgagcggttggacagctccatatgctgcccagcatggggaggaggtaccagttgatgaatggctttgaaaaacggtgagcctctagaaaggtcgagagtggctggttttcttgatggccccgcgcctcagggggcgtgcgggcaattgcggtggcgattttgttgaaccgcagaatgtcgcggagcatgcgccagaagtcgggtcgaaacaggttggtcttttggctgaacaccgccccgagtgtggtgccactccactccagtgtctggccgtttccccgtgcattgggcaccttgaccgaaaacgacatgtctgagggcgccagcgggatcttgagttcggcaaataacgccaacagaccggggtaggtgcgctcattgaggaccaaaaagccggtgtcgatgccccaggtttgttcgccggtgggcgtgggcagggtgacatcaacggtgtgggtgtgtccaccgaaatagtcattggcttcgagcagggtcacgtgagcggtgtcacgcaacgcatacgcagcggacaaaccggcgatgccagagcccacaatggccacgcggggccgtatgccggacaaaggtgtttctgttgattgcgttaaagttttcatgcgcaggttggacaaaaggtcattattgggggtatgtccacaggtagataccctaggttgcccaaaaagtacttgccaaagtaacgatctggccgatactaacttgtcttagacaaaagacaaatttatttttacacccttacggttccaatttatatgacgtggatatacaccatctcggacatcgagcgcgataccggcatcgctaaagatcgtttgcgcgtttgggagcgccgatacggcttccccctgcctcagcgggatgacacccaagagcgggtctatgacgaagaccaattactccgattgcgcctcatcaagcggttgttggatgttggcatgcgcgccgggcgtgttgtgcccatgccgcttgaggtactgcagcgagaggtggaaagcgtaaccacccccatcgtggcgcgcgtggctgcgcaagaggatcaggcgctgctggcccatttggtctcgctgctcaaagccaccaatcgccgcgctttgcaccagacactcatgcaaatcattgcagaacggggtttggcggacgccatcgaggaggtcattgcgcccctcggcgcgcaggtgggtgagttttggctgagtggccaaatggccatttaccaagagcatttgtttaccgcagtcgtcaaaagcgtactgatgcaagccatggaacagttgccgttgcaagcgaacggaaaaccaccccgggtgttactggccacgttatcgacagaacgccacgaggtgggtttgttgatggcggagtccatgtttgcgcaagccggttgtgaacggttgtcgttgggccccagcatgcccctaaccgaggcggttacggcctgcttggcggtcaagcccgatatcttcgccctgagcttctccagccagaatgcgcccaaagaggtgctcagccagttgcgacagttgcgcggcatgttgccacccgagaccgaaatttgggtgggaggcagcgccgtcgcattgcgtttaattccagacgccaaagtcgccaaagtgttcggccgagccaaagatctgcgggacgctatcgaggcgtggcgtatcgagcggcactagcagaagccctttaaccactgagggggtctatgcgcatcatttttacgaggggcatgagcccccgtaaaatgcggtgatcgaaccaagttgcgcaggagtagtggatgctgtaccccgagttgttcaaacaactggaagcggtgagatgggacatggacaaggatattccttggaaagactttgacccctctgccctgtccgatgaacaggcccaaaccatcaagatgaacgccattaccgagtgggctgcattgcccgccacggagatgtttctgcgcgacaaccgcgatgactctgatttctccgcgttcatgtccatttggttttttgaagagcaaaagcattcactcgtcttgattgagtacttgcgccgcttccggcctgacctcgtgccaactgaagccgagttgcacgccgtgcgcttcgacttcgaccccgcaccggcactcgaaaccttgatgttgcatttctgcggcgagatacgactgaatcattggtaccgtcgcgcggcacagtggcacaacgagcctgtcattaagcacatttacaccaccctcagccaagacgaggcacgacacggcggtgcgtatttgcgttacatgcgccgtgcgattgagcgtttcggtgacgatgcacgcgccgcatttgccaaagtcggtgtgctcatggccagcgcgcgtcggacggcgcaggctttgcaccccaccaacttacacgttaacaaaacgctgttccccaacgacaccgtgcaaagccgaatgcccgaacccggctggttagagcattggttggatggtcaaatccagtttgatgtgacgtgggaaaccaaagtggtcgagcgcattttgcacaacctgggtttgttgtttggccagcggtttgatactgtgcaggcgctcaaccgctaccgcaaacagatcacaccggcgaccgcttaagcggtctcgaatacgctgttccacagggccaatatggcctctcggtatgcggctgcatcatccagcggcacttgggtgggtgcttcgtcgagacgcgcgcggtgttggatttgtcgcagcgaccggtaggcgtccatcgctgcctcactcacggttggcggcagtaaaccgcaggtttgcgcaattcggatcagcttgatattccctaaattgggaatcaattctgggtgctgagcgctgtgtgccagcagcaggtattgcacaacaaactcggcatccaccatgccgcccacgctgtgtttgacatcgaagagcccgtccggtacgtgatgggcttggcgcacgcgctcgcgcatgttcatgatttcggttttcaaggcggtggtgtcacgcggagccaccatgacgctgcgccggacggcgtcaaactgcgcctctagctccggctgccccatcacgaagcgcgcccgggtgatcgcttggtgttcccaagtccacgccgcgttgctgccgcgttgcgcttggtagtcggcataggcctcaaatcgtgtgaccaacatgcccgagttgccattggggcgtaacgcggtatcgatctcgtacaagtcaccctcagccgtcttgacggtcaaccagttgatcagcttgcgcaccagcgctgcgtaaatggtttgggcgtcatcgtggtcatcgtcgtaaacgaaaacgatgtcgagatcgctgccgtaaccgagttctttgccacccaatttgccgtaagccaagatcgcgatgcgtggctctggggcgtggcgttgacgcaagcgctcccagcaccattgcaaggtgacacgcaggatgctgtcggccagtgcactgaggtcgtcagcaacaaactcgacggtcaagcgtccttcaacgtcgcgcgcgagcgtgcgaaacacctcactgtgatgggcgcgacgcaacagatccaatagggcctcgtcggtgtcttcaccggttcgcttgagcgctgcgcgacgggcttgaagctcggcctcaaactgctgcccattgaagcgctcggagaagagctcggggttggccagttcgtcaatcacactggggtgttgaatgagataccgtgccggccacttcgccgcactgaggatgcgcagcatgcgctcatggatggcaggccgctcttggagcaaggccaagtagctgtcccgtcgcatcaagggttcaagccagtcggcgaaccggagcgctccgacttcggatactttgccgtcatccatccaggcctgtgttcgttgcagcaggcgagccaagcgggtgcgtgactcatcgcgcaggcccagaatacgaggttggtctttccaggttgcaaggtgttctttgagtgggctgtgcagcccatctagaacactgtcgaggtcagtctcaagccgcttttcgccgttgcaattggtacagggttgttcgcc

SEQ ID NO: 24 - DNA, 24923 bp, Artificial Sequence; identical to SEQ ID NO: 23
  Synthetic Oligonucleotide

SEQ ID NO: 25 - DNA, 24644 bp, Artificial Sequence
  Synthetic Oligonucleotide
  misc_feature (1)..(8755): n is a, c, g, or t
nnnnnnnnnnnnnnnnnnnnnnnnnnnnnnnnnnnnnnnnnnnnnnnnnnnnnnnnnnnnnnnnnnnnnnnnnnnnnnnnnnnnnnnnnnnnnnnnnnnnnnnnnnnnnnnnnnnnnnnnnnnnnnnnnnnnnnnnnnnnnnnnnnnnnnnnnnnnnnnnnnnnnnnnnnnnnnnnnnnnnnnnnnnnnnnnnnnnnnnnnnnnnnnnnnnnnnnnnnnnnnnnnnnnnnnnnnnnnnnnnnnnnnnnnnnnnnnnnnnnnnnnnnnnnnnnnnnnnnnnnnnnnnnnnnnnnnnnnnnnnnnnnnnnnnnnnnnnnnnnnnnnnnnnnnnnnnnnnnnnnnnnnnnnnnnnnnnnnnnnnnnnnnnnnnnnnnnnnnnnnnnnnnnnnnnnnnnnnnnnnnnnnnnnnnnnnnnnnnnnnnnnnnnnnnnnnnnnnnnnnnnnnnnnnnnnnnnnnnnnnnnnnnnnnnnnnnnnnnnnnnnnnnnnnnnnnnnnnnnnnnnnnnnnnnnnnnnnnnnnnnnnnnnnnnnnnnnnnnnnnnnnnnnnnnnnnnnnnnnnnnnnnnnnnnnnnnnnnnnnnnnnnnnnnnnnnnnnnnnnnnnnnnnnnnnnnnnnnnnnnnnnnnnnnnnnnnnnnnnnnnnnnnnnnnnnnnnnnnnnnnnnnnnnnnnnnnnnnnnnnnnnnnnnnnnnnnnnnnnnnnnnnnnnnnnnnnnnnnnnnnnnnnnnnnnnnnnnnnnnnnnnnnnnnnnnnnnnnnnnnnnnnnnnnnnnnnnnnnnnnnnnnnnnnnnnnnnnnnnnnnnnnnnnnnnnnnnnnnnnnnnnnnnnnnnnnnnnnnnnnnnnnnnnnnnnnnnnnnnnnnnnnnnnnnnnnnnnnnnnnnnnnnnnnnnnnnnnnnnnnnnnnnnnnnnnnnnnnnnnnnnnnnnnnnnnnnnnnnnnnnnnnnnnnnnnnnnnnnnnnnnnnnnnnnnnnnnnnnnnnnnnnnnnnnnnnnnnnnnnnnnnnnnnnnnnnnnnnnnnnnnnnnnnnnnnnnnnnnnnnnnnnnnnnnnnnnnnnnnnnnnnnnnnnnnnnnnnnnnnnnnnnnnnnnnnnnnnnnnnnnnnnnnnnnnnnnnnnnnnnnnnnnnnnnnnnnnnnnnnnnnnnnnnnnnnnnnnnnnnnnnnnnnnnnnnnnnnnnnnnnnnnnnnnnnnnnnnnnnnnnnnnnnnnnnnnnnnnnnnnnnnnnnnnnnnnnnnnnnnnnnnnnnnnnnnnnnnnnnnnnnnnnnnnnnnnnnnnnnnnnnnnnnnnnnnnnnnnnnnnnnnnnnnnnnnnnnnnnnnnnnnnnnnnnnnnnnnnnnnnnnnnnnnnnnnnnnnnnnnnnnnnnnnnnnnnnnnnnnnnnnnnnnnnnnnnnnnnnnnnnnnnnnnnnnnnnnnnnnnnnnnnnnnnnnnnnnnnnnnnnnnnnnnnnnnnnnnnnnnnnnnnnnnnnnnnnnnnnnnnnnnnnnnnnnnnnnnnnnnnnnnnnnnnnnnnnnnnnnnnnnnnnnnnnnnnnnnnnnnnnnnnnnnnnnnnnnnnnnnnnnnnnnnnnnnnnnnnnnnnnnnnnnnnnnnnnnnnnnnnnnnnnnnnnnnnnnnnnnnnnnnnnnnnnnnnnnnnnnnnnnnnnnnnnnnnnnnnnnnnnnnnnnnnnnnnnnnnnnnnnnnnnnnnnnnnnnnnnnnnnnnnnnnnnnnnnnnnnnnnnnnnnnnnnnnnnnnnnnnnnnnnnnnnnnnnnnnnnnnnnnnnnnnnnnnnnnnnnnnnnnnnnnnnnnnnnnnnnnnnnnnnnnnnnnnnnnnnnnnnnnnnnnnnnnnnnnnnnnnnnnnnnnnnnnnnnnnnnnnnnnnnnnnnnnnnnnnnnnnnnnnnnnnnnnnnnnnnnnnnnnnnnnnnnnnnnnnnnnnnnnnnnnnnnnnnnnnnnnnnnnnnnnnnnnnnnnnnnnnnnnnnnnnnnnnnnnnnnnnnnnnnnnnnnnnnnnnnnnnnnnnnnnnnnnnnnnnnnnnnnnnnnnnnnnnnnnnnnnnnnnnnnnnnnnnnnnnnnnnnnnnnnnnnnnnnnnnnnnnnnnnnnnnnnnnnnnnnnnnnnnnnnnnnnnnnnnnnnnnnnnnnnnnnnnnnnnnnnnnnnnnnnnnnnnnnnnnnnnnnnnnnnnnnnnnnnnnnnnnnnnnnnnnnnnnnnnnnnnnnnnnnnnnnnnnnnnnnnnnnnnnnnnnnnnnnnnnnnnnnnnnnnnnnnnnnnnnnnnnnnnnnnnnnnnnnnnnnnnnnnnnnnnnnnnnnnnnnnnnnnnnnnnnnnnnnnnnnnnnnnnnnnnnnnnnnnnnnnnnnnnnnnnnnnnnnnnnnnnnnnnnnnnnnnnnnnnnnnnnnnnnnnnnnnnnnnnnnnnnnnnnnnnnnnnnnnnnnnnnnnnnnnnnnnnnnnnnnnnnnnnnnnnnnnnnnnnnnnnnnnnnnnnnnnnnnnnnnnnnnnnnnnnnnnnnnnnnnnnnnnnnnnnnnnnnnnnnnnnnnnnnnnnnnnnnnnnnnnnnnnnnnnnnnnnnnnnnnnnnnnnnnnnnnnnnnnnnnnnnnnnnnnnnnnnnnnnnnnnnnnnnnnnnnnnnnnnnnnnnnnnnnnnnnnnnnnnnnnnnnnnnnnnnnnnnnnnnnnnnnnnnnnnnnnnnnnnnnnnnnnnnnnnnnnnnnnnnnnnnnnnnnnnnnnnnnnnnnnnnnnnnnnnnnnnnnnnnnnnnnnnnnnnnnnnnnnnnnnnnnnnnnnnnnnnnnnnnnnnnnnnnnnnnnnnnnnnnnnnnnnnnnnnnnnnnnnnnnnnnnnnnnnnnnnnnnnnnnnnnnnnnnnnnnnnnnnnnnnnnnnnnnnnnnnnnnnnnnnnnnnnnnnnnnnnnnnnnnnnnnnnnnnnnnnnnnnnnnnnnnnnnnnnnnnnnnnnnnnnnnnnnnnnnnnnnnnnnnnnnnnnnnnnnnnnnnnnnnnnnnnnnnnnnnnnnnnnnnnnnnnnnnnnnnnnnnnnnnnnnnnnnnnnnnnnnnnnnnnnnnnnnnnnnnnnnnnnnnnnnnnnnnnnnnnnnnnnnnnnnnnnnnnnnnnnnnnnnnnnnnnnnnnnnnnnnnnnnnnnnnnnnnnnnnnnnnnnnnnnnnnnnnnnnnnnnnnnnnnnnnnnnnnnnnnnnnnnnnnnnnnnnnnnnnnnnnnnnnnnnnnnnnnnnnnnnnnnnnnnnnnnnnnnnnnnnnnnnnnnnnnnnnnnnnnnnnnnnnnnnnnnnnnnnnnnnnnnnnnnnnnnnnnnnnnnnnnnnnnnnnnnnnnnnnnnnnnnnnnnnnnnnnnnnnnnnnnnnnnnnnnnnnnnnnnnnnnnnnnnnnnnnnnnnnnnnnnnnnnnnnnnnnnnnnnnnnnnnnnnnnnnnnnnnnnnnnnnnnnnnnnnnnnnnnnnnnnnnnnnnnnnnnnnnnnnnnnnnnnnnnnnnnnnnnnnnnnnnnnnnnnnnnnnnnnnnnnnnnnnnnnnnnnnnnnnnnnnnnnnnnnnnnnnnnnnnnnnnnnnnnnnnnnnnnnnnnnnnnnnnnnnnnnnnnnnnnnnnnnnnnnnnnnnnnnnnnnnnnnnnnnnnnnnnnnnnnnnnnnnnnnnnnnnnnnnnnnnnnnnnnnnnnnnnnnnnnnnnnnnnnnnnnnnnnnnnnnnnnnnnnnnnnnnnnnnnnnnnnnnnnnnnnnnnnnnnnnnnnnnnnnnnnnnnnnnnnnnnnnnnnnnnnnnnnnnnnnnnnnnnnnnnnnnnnnnnnnnnnnnnnnnnnnnnnnnnnnnnnnnnnnnnnnnnnnnnnnnnnnnnnnnnnnnnnnnnnnnnnnnnnnnnnnnnnnnnnnnnnnnnnnnnnnnnnnnnnnnnnnnnnnnnnnnnnnnnnnnnnnnnnnnnnnnnnnnnnnnnnnnnnnnnnnnnnnnnnnnnnnnnnnnnnnnnnnnnnnnnnnnnnnnnnnnnnnnnnnnnnnnnnnnnnnnnnnnnnnnnnnnnnnnnnnnnnnnnnnnnnnnnnnnnnnnnnnnnnnnnnnnnnnnnnnnnnnnnnnnnnnnnnnnnnnnnnnnnnnnnnnnnnnnnnnnnnnnnnnnnnnnnnnnnnnnnnnnnnnnnnnnnnnnnnnnnnnnnnnnnnnnnnnnnnnnnnnnnnnnnnnnnnnnnnnnnnnnnnnnnnnnnnnnnnnnnnnnnnnnnnnnnnnnnnnnnnnnnnnnnnnnnnnnnnnnnnnnnnnnnnnnnnnnnnnnnnnnnnnnnnnnnnnnnnnnnnnnnnnnnnnnnnnnnnnnnnnnnnnnnnnnnnnnnnnnnnnnnnnnnnnnnnnnnnnnnnnnnnnnnnnnnnnnnnnnnnnnnnnnnnnnnnnnnnnnnnnnnnnnnnnnnnnnnnnnnnnnnnnnnnnnnnnnnnnnnnnnnnnnnnnnnnnnnnnnnnnnnnnnnnnnnnnnnnnnnnnnnnnnnnnnnnnnnnnnnnnnnnnnnnnnnnnnnnnnnnnnnnnnnnnnnnnnnnnnnnnnnnnnnnnnnnnnnnnnnnnnnnnnnnnnnnnnnnnnnnnnnnnnnnnnnnnnnnnnnnnnnnnnnnnnnnnnnnnnnnnnnnnnnnnnnnnnnnnnnnnnnnnnnnnnnnnnnnnnnnnnnnnnnnnnnnnnnnnnnnnnnnnnnnnnnnnnnnnnnnnnnnnnnnnnnnnnnnnnnnnnnnnnnnnnnnnnnnnnnnnnnnnnnnnnnnnnnnnnnnnnnnnnnnnnnnnnnnnnnnnnnnnnnnnnnnnnnnnnnnnnnnnnnnnnnnnnnnnnnnnnnnnnnnnnnnnnnnnnnnnnnnnnnnnnnnnnnnnnnnnnnnnnnnnnnnnnnnnnnnnnnnnnnnnnnnnnnnnnnnnnnnnnnnnnnnnnnnnnnnnnnnnnnnnnnnnnnnnnnnnnnnnnnnnnnnnnnnnnnnnnnnnnnnnnnnnnnnnnnnnnnnnnnnnnnnnnnnnnnnnnnnnnnnnnnnnnnnnnnnnnnnnnnnnnnnnnnnnnnnnnnnnnnnnnnnnnnnnnnnnnnnnnnnnnnnnnnnnnnnnnnnnnnnnnnnnnnnnnnnnnnnnnnnnnnnnnnnnnnnnnnnnnnnnnnnnnnnnnnnnnnnnnnnnnnnnnnnnnnnnnnnnnnnnnnnnnnnnnnnnnnnnnnnnnnnnnnnnnnnnnnnnnnnnnnnnnnnnnnnnnnnnnnnnnnnnnnnnnnnnnnnnnnnnnnnnnnnnnnnnnnnnnnnnnnnnnnnnnnnnnnnnnnnnnnnnnnnnnnnnnnnnnnnnnnnnnnnnnnnnnnnnnnnnnnnnnnnnnnnnnnnnnnnnnnnnnnnnnnnnnnnnnnnnnnnnnnnnnnnnnnnnnnnnnnnnnnnnnnnnnnnnnnnnnnnnnnnnnnnnnnnnnnnnnnnnnnnnnnnnnnnnnnnnnnnnnnnnnnnnnnnnnnnnnnnnnnnnnnnnnnnnnnnnnnnnnnnnnnnnnnnnnnnnnnnnnnnnnnnnnnnnnnnnnnnnnnnnnnnnnnnnnnnnnnnnnnnnnnnnnnnnnnnnnnnnnnnnnnnnnnnnnnnnnnnnnnnnnnnnnnnnnnnnnnnnnnnnnnnnnnnnnnnnnnnnnnnnnnnnnnnnnnnnnnnnnnnnnnnnnnnnnnnnnnnnnnnnnnnnnnnnnnnnnnnnnnnnnnnnnnnnnnnnnnnnnnnnnnnnnnnnnnnnnnnnnnnnnnnnnnnnnnnnnnnnnnnnnnnnnnnnnnnnnnnnnnnnnnnnnnnnnnnnnnnnnnnnnnnnnnnnnnnnnnnnnnnnnnnnnnnnnnnnnnnnnnnnnnnnnnnnnnnnnnnnnnnnnnnnnnnnnnnnnnnnnnnnnnnnnnnnnnnnnnnnnnnnnnnnnnnnnnnnnnnnnnnnnnnnnnnnnnnnnnnnnnnnnnnnnnnnnnnnnnnnnnnnnnnnnnnnnnnnnnnnnnnnnnnnnnnnnnnnnnnnnnnnnnnnnnnnnnnnnnnnnnnnnnnnnnnnnnnnnnnnnnnnnnnnnnnnnnnnnnnnnnnnnnnnnnnnnnnnnnnnnnnnnnnnnnnnnnnnnnnnnnnnnnnnnnnnnnnnnnnnnnnnnnnnnnnnnnnnnnnnnnnnnnnnnnnnnnnnnnnnnnnnnnnnnnnnnnnnnnnnnnnnnnnnnnnnnnnnnnnnnnnnnnnnnnnnnnnnnnnnnnnnnnnnnnnnnnnnnnnnnnnnnnnnnnnnnnnnnnnnnnnnnnnnnnnnnnnnnnnnnnnnnnnnnnnnnnnnnnnnnnnnnnnnnnnnnnnnnnnnnnnnnnnnnnnnnnnnnnnnnnnnnnnnnnnnnnnnnnnnnnnnnnnnnnnnnnnnnnnnnnnnnnnnnnnnnnnnnnnnnnnnnnnnnnnnnnnnnnnnnnnnnnnnnnnnnnnnnnnnnnnnnnnnnnnnnnnnnnnnnnnnnnnnnnnnnnnnnnnnnnnnnnnnnnnnnnnnnnnnnnnnnnnnnnnnnnnnnnnnnnnnnnnnnnnnnnnnnnnnnnnnnnnnnnnnnnnnnnnnnnnnnnnnnnnnnnnnnnnnnnnnnnnnnnnnnnnnnnnnnnnnnnnnnnnnnnnnnnnnnnnnnnnnnnnnnnnnnnnnnnnnnnnnnnnnnnnnnnnnnnnnnnnnnnnnnnnnnnnnnnnnnnnnnnnnnnnnnnnnnnnnnnnnnnnnnnnnnnnnnnnnnnnnnnnnnnnnnnnnnnnnnnnnnnnnnnnnnnnnnnnnnnnnnnnnnnnnnnnnnnnnnnnnnnnnnnnnnnnnnnnnnnnnnnnnnnnnnnnnnnnnnnnnnnnnnnnnnnnnnnnnnnnnnnnnnnnnnnnnnnnnnnnnnnnnnnnnnnnnnnnnnnnnnnnnnnnnnnnnnnnnnnnnnnnnnnnnnnnnnnnnnnnnnnnnnnnnnnnnnnnnnnnnnnnnnnnnnnnnnnnnnnnnnnnnnnnnnnnnnnnnnnnnnnnnnnnnnnnnnnnnnnnnnnnnnnnnnnnnnnnnnnnnnnnnnnnnnnnnnnnnnnnnnnnnnnnnnnnnnnnnnnnnnnnnnnnnnnnnnnnnnnnnnnnnnnnnnnnnnnnnnnnnnnnnnnnnnnnnnnnnnnnnnnnnnnnnnnnnnnnnnnnnnnnnnnnnnnnnnnnnnnnnnnnnnnnnnnnnnnnnnnnnnnnnnnnnnnnnnnnnnnnnnnnnnnnnnnnnnnnnnnnnnnnnnnnnnnnnnnnnnnnnnnnnnnnnnnnnnnnnnnnnnnnnnnnnnnnnnnnnnnnnnnnnnnnnnnnnnnnnnnnnnnnnnnnnnnnnnnnnnnnnnnnnnnnnnnnnnnnnnnnnnnnnnnnnnnnnnnnnnnnnnnnnnnnnnnnnnnnnnnnnnnnnnnnnnnnnnnnnnnnnnnnnnnnnnnnnnnnnnnnnnnnnnnnnnnnnnnnnnnnnnnnnnnnnnnnnnnnnnnnnnnnnnnnnnnnnnnnnnnnnnnnnnnnnnnnnnnnnnnnnnnnnnnnnnnnnnnnnnnnnnnnnnnnnnnnnnnnnnnnnnnnnnnnnnnnnnnnnnnnnnnnnnnnnnnnnnnnnnnnnnnnnnnnnnnnnnnnnnnnnnnnnnnnnnnnnnnnnnnnnnnnnnnnnnnnnnnnnnnnnnnnnnnnnnnnnnnnnnnnnnnnnnnnnnnnnnnnnnnnnnnnnnnnnnnnnnnnnnnnnnnnnnnnnnnnnnnnnnnnnnnnnnnnnnnnnnnnnnnnnnnnnnnnnnnnnnnnnnnnnnnnnnnnnnnnnnnnnnnnnnnnnnnnnnnnnnnnnnnnnnnnnnnnnnnnnnnnnnnnnnnnnnnnnnnnnnnnnnnnnnnnnnnnnnnnnnnnnnnnnnnnnnnnnnnnnnnnnnnnnnnnnnnnnnnnnnnnnnnnnnnnnnnnnnnnnnnnnnnnnnnnnnnnnnnnnnnnnnnnnnnnnnnnnnnnnnnnnnnnnnnnnnnnnnnnnnnnnnnnnnnnnnnnnnnnnnnnnnnnnnnnnnnnnnnnnnnnnnnnnnnnnnnnnnnnnnnnnnnnnnnnnnnnnnnnnnnnnnnnnnnnnnnnnnnnnnnnnnnnnnnnnnnnnnnnnnnnnnnnnnnnnnnnnnnnnnnnnnnnnnnnnnnnnnnnnnnnnnnnnnnnnnnnnnnnnnnnnnnnnnnnnnnnnnnnnnnnnnnnnnnnnnnnnnnnnnnnnnnnnnnnnnnnnnnnnnnnnnnnnnnnnnnnnnnnnnnnnnnnnnnnnnnnnnnnnnnnnnnnnnnnnnnnnnnnnnnnnnnnnnnnnnnnnnnnnnnnnnnnnnnnnnnnnnnnnnnnnnnnnnnnnnnnnnnnnnnnnnnnnnnnnnnnnnnnnnnnnnnnnnnnnnnnnnnnnnnnnnnnnnnnnnnnnnnnnnnnnnnnnnnnnnnnnnnnnnnnnnnnnnnnnnnnnnnnnnnnnnnnnnnnnnnnnnnnnnnnnnnnnnnnnnnnnnnnnnnnnnnnnnnnnnnnnnnnnnnnnnnnnnnnnnnnnnnnnnnnnnnnnnnnnnnnnnnnnnnnnnnnnnnnnnnnnnnnnnnnnnnnnnnnnnnnnnnnnnnnnnnnnnnnnnnnnnnnnnnnnnnnnnnnnnnnnnnnnnnnnnnnnnnnnnnnnnnnnnnnnnnnnnnnnnnnnnnnnnnnnnnnnnnnnnnnnnnnnnnnnnnnnnnnnnnnnnnnnnnnnnnnnnnnnnnnnnnnnnnnnnnnnnnnnnnnnnnnnnnnnnnnnnnnnnnnnnnnnnnnnnnnnnnnnnnnnnnnnnnnnnnnnnnnnntggaggcacagggcatcaaacacagtttcgaggtggttggggtgcacgcccagggtggcatgcaaaccgtgaccacccatgacggtcgccacttcaccattgatgccacgcaattcacgggcttgctgcgcgtcacccagcctgcgccattcaacgactgtctgctcaatggcatcggcaaagtaggtaaagcctttggcctcaacttactcgtcgttcattaacccaacgcttaaaaacgcttatccggagttcaccaccatgcaagacgttcgcatcgatatcgccatcaatacgattcaacccatcaccttcacccatcacggcatcgacgggttgcccaccatggctcgcggcgttgacatggagggtcatcccctgcgcaccgtttacattccagccgcgcagtttcgcggtcggctaaggcatgaggcggcgttggcaaaaatgcgtaccgcacacggccccatcaagttggcggaagcctacatgctggccttggggcaaaacatcgacaccaaagaagacgaggctgatgagaaagtgcggttgggcgagctactcgctttacgggcggccaaccccttcattgatctcttcggaacgtggcgcatggacagccggctttacgtgtcgcacctgatgccggtcgtcaacgtcaagcccgacacctttcaccacatccgccgcgatctagacaccaacgacgcgttgtttgccgagttacccgaagccgagatcgacgtcttttacgaaaggcaagacggacagtcgcaagcctctcaagcggagagtctgattaaggtggccacccgcgaactgcgcaaagccaaaaaagaaaacgacctcgccaaatgcgacgagttcgaagccaagatcgaagaactcaaagccctcaagaaggcgcacaaagccggtgactaatcgggaaacaccaaacacttggtggcgatggaggccgtccctgcgggaattcaattgttgtgcaaactcatcataaagcgggccacgccgctcgacctcagcatgctcacgggtgcgcttaacgcgatcagcgaattccccatgatgggtgcccagcgggcccgtggctgaggcaaggtgagtggcgccgcaaccgtctgccacacccagggtgaggtgttggcgcaaatcgccttcggtggttttttgccagctgcactggagtggaccgatgcgggcaccgcgttcatgactggcctcgaaacggttgccgtcgccgcgtgaaaggcccttaccgcagcccacagcaggcgcaatacgccaagctcatcgagcgcgctgtcagcaaacccggtgcgcccctgttggcgggtgctgcgcccgggctcggtaagacacacggctacgccatcccgttgttgtgcagtggcaaaaaagttgccatcgccatgagcacgcgccaactgatcgatcaatttatagcgagcgatgcactcgccgctgcgcaagccgcactagaggccgaggggcggcccgctgccaccgttgtcgccttgcaaccccgccgtcaatttgaaacggcggtggcctacagcgcgcacaaaacggcggcgcttgatgccgacgtcttggtgctcacacacatgggcgtgctcatcgatacccacatcccagcctacgcccagctgcgtcagcgcgctgtcttgttgtttgacgaagccgatcttttggccgatgccgccgacttgcgcagcacctatcgcattgaggctgaggccttagcccgcgcaggcgtcgaaaacgccacaccgacaaaggcggttgaaaccatcattaaaaaatccgatgaccccgaggaaaaagcagtcgccacagccatccaacgcgctttggcagagccggcttggtacaaagtgatcggtaaagaagacaacggcgatttggtgctgacccaccgcatgccggggcgcatgttgcgcaccctcatcaatgacatgccgcggtgcattttcaccagtggcaccctcacggtatcggggcgttttgaccactttgtcaaagccatcggcctgaccgcagtggcacccgaaagccagcacattgaccccgtgcaacacggccaactgcgcgttgaggtggccagtgaggccctcaccccagaagcacaagccgaacgcatcatgcacgcggcgacaccggtattggtgctgaccaccagccacgcgactacggcggcgttgggctctttgtgccccggtgccatctgccgcgcacccggtgaagccctcatggatgcggtggcgcgatgccctgatgatggcatcttgatcgccgctggcgcctggtctggcctcgatgcgccgcgcctgcggtggcaaaccgtggtcatccccaaaacaccgtacggcaaaccactcatccttgacgcccagcagataagcgcttacgtggacagcaaggttgttgccatcaggcgcaccaaccaagggttacaccgtgggctgcgcaccaccgatgccacctgcaccttgctgttactcgatccggatagccgtcgtgccgatttacgtcaagccattccccgtcgtttcttggtggattgggacagcgtggccgagggctcgttggttttgcgcacgcacttcgcccgtgaacgaaaaaaaggtctgcgtgaaaaaaccctgagccggcgcgggcagcactgcgaacaccccggctgtacggccacccaagagcatttgctggaggtgcaccacctcaacccgattgccaacggcccccgcgacacagttactgatgacctgcgggtgctttgtaaaaatcaccacgcggatgcccaccaagccatgcgaaaagctgattttttaaaagtgaaaacaactgaaaagcgtgcagaggcagacacttaggccacagctggtcaagctacgccgtaaatgcgtagttactggaacttcgcgcgagtgcttagataggcttccatcggtcaagctacgccgtaaatgcgtagttactggaacttgcgtgtggtatcagttcagcgtggatcgggtcaagctacgccgtaaatgcgtagttactggaacgaagttcacgttgacactgccttggatacgggtcaagctacgccgtaaatgcgtagttactggaactggtagcggctgcttgttaagtaaggccgaggtcgtctggggtcaagctacgccgtaaaggcgtagttacttttagcagccagttttgctggttttaagcggtccaatggcccgacttgccgcccatcttttcaagcaggcgcacgcccgtcatggtcatgccgcggtcggcggctttgcacatgtcgtagatggtcagcaagccgacttgtacggcggtgagggcttccatttcaacacccgtggggccggtggtttcggcggtgacggtgcaatgaacgtgggggggctggtcaccggtggtgaaggctacgcgcacatggctgagcgccaagggatggcacaggggaatgaggtcagcggtgcgcttggaggcttgtatagccgccacgcgcgcaatgcccaacacatcaccctttttggcgttgccatcgcgaatcagagccaaggtgtcggcgtgcatttcaatgcgcccttctgctgtggcgctgcgcttggtgttggctttgtcacccacgtcgaccatgtgggcttggccttgtgcatcaaagtgggtcaggggtgaagggggctggctggacacggtgcaatctccgaaactttgcaaaacttagggcatcatacccatatgccttcccccttgtttgttgctcgccgtcgccctcgtttggcgtgggcgttgccgtgggctttgggtgccgccctgctgctggggccaaccacactcaccgttgcgcaaccccgcgcggccttgcccaacttgggtggtggggtgtcgttaacgctgggggatgagcgccggctgggccaacaaatcatgcccagcttgcacaacagtggcttggtggtggaagacccgctgctcaaccaatacctcaccgatctgtggcgccctgtgtttgcaacggcgcgcgcacgcggtgatgtgcccgatgacatgttgcagcagtttgcttggcagttgtggttgctcagccccaaagccatcaacgcgtttgcattacccgggggttactttggttttcacttaggtttgttggcatcggccacggatgacgctgcactggcgtcggtgttggcgcacgagttgagccatgtgacacagcgccatattgcccgcatcatccaagcccaagagagccaagcgccttggctgattggcgccatgattttgggtgctgccaccatcgccgccagccccgatgcaggcgccgcactgattgtgggtgggcaggcagcgtccattcaaaaccagctcaacttctcgcgggacatggagcaagaggcggaccgccaaggcttggtggtgttgtcggaggcggggtttgatccgaaggggtttgtgcgcttatttgaaaccctgcaaaacgccaaccgcttgaatgacgatggtgcctttccctacctgcgcagccacccgctcacgaccgagcgtgtggcggatatgcaaggccgcttgttcagcgtaccggccgagcccaacccggtgggcgatggtgcggtgcagatgcgcgaccccgatgcctctgctttgttgcgcgtgcgtgccgccgtcatcgcctcggctgatgaggtggatgtgttgcaaggttggggtgcggcgcccgccgccactgggtcagtgggcagcgccacccgcccggcagaacaatgggcgagcgactaccggcgcgcactggccgcgtgggcactgaagcgccccgatgtggcatggacgcgcctgcgccaattgatgaccgaggcggctacgcaacccgccgtgtcgcaggtgctgcgcgagacggcgttggcttggctggccagccccgctaagtttgagccgatacccgctgcaacggtgcaggcttgggttgaggcggccttggctgatgcccaagccgggcggcgttcggcgctgctgctgttggcgggttatgcggccagcgccaattcagccgtgccggatgcgcggcgcgcgcaggtgatcggggccttgcgtacctggttggcgacccaccccaatgatgcgttgggctggcagttgttggcccgtttgagtgcgcaacaaggccaagccttggtggcgttgagggccgaggccgaggcctttgtggcgcgcgagctgtggcaaggggcgcttgaccgtttgtctgccgccaagcgcctgattgcggaggctaaaacccgtttcagtgaagccgacattgcgattatttacgcccgcgaaaaggcagttaatcaagccatggcatttgcacggtctgagcgccgttgagcgcgcaccggtacactaagtcccccatggcagtcatccacatctctgacatcgagtcggccatcaactattggcggacacaaaaaccttcacccgacggtgtgacgctgtgcgccgaggtgcgcgccttggccgaggtttatgcgctgctggtgtactaccacgagaccgaggccgatgaggccagtatgccgtttgatgcctatgcggcctgggaggcttggttcgacacgacacccgatacgccgtgtatcgcgatctgctcaaccagccagggcgatgacctgtgtaaaggttgtggccgtacctttgaagaggtgcagtactggaccgaaatgcagcccgccgaaaagcgcgcggtttggcgtcgcatcaccctgcatggcgatgcgtggcgctttaaccgctaccgcgaacgggcgatcgagaacgcggcgtaaccgcgtgccgtcagcctttggcggcgcgcaacgccaattcggcggctttaccgacgtaggtggcaggcgtcatggccaacaaacgcgctttgtcggcgtctggaatagccagtgactgaatgaggccgtgcaaggcttcacgcgtgacggttttgccccgtgtgacggctttgagttgctcgtacgcgccatcgataccgtagcgccgcatgacggtttgaatcggctctgccaacacttcccacgcgttgtcgaggtcgtccgccaaggcgtccgcgttgagttcgagtttgcgcagacccaccgccatcgattgatacgccaacaccgagtagccaaacgcgacgcccatgttgcgcaacaccgtgctgtcggtcaggtcacgttgccagcgcgagatgggtagcttttcactgaggtggcgcagcaaggcattggccagccccaagttaccttcggcgttttcaaagtcgatcggattgactttgtgcggcatggtggatgagccgatctcaccgtctttgaggcgttgcttgaagtaacccaagctgatgtaaccccacacgtcacgcgcaaggtcgatcaagatggtgttgacacgggccatggcgtcgaacagctcggccatgtaatcgtgtggctcaatttgaatgctgtagtcctggaacgttaagcccaagccattgggtgcgggtgaggccaccacgcctttggcaaaggcctcccaatcgacgtcgggccaggcgctcatgtgggcgttatagttaccaaccgcgccgttcattttggccatgatggcgacttgctcaatgcgcaaggtggcgcgttgcaggcgcacggcgacgttggccatctctttaccgacggtggtcgggctggcggtttggccgtgggtccggctgagcatgggcacgtgggcgtactgctcggccatgcccagcagcagattcacgacgtcgcccaacatgggcaacagcacttcgcgtagcgcggcttgcaattgcagtgcgtggctggtgttgttgatgtcctcgctggtgcaggcaaagtgcacaaattcgcctgcacgctcaagctcttcgcggaccgctgggctaagacggtcatttcggaaagcgcgtttgatccaatactcaactgctttgacatcgtggttggtctcgcgctcgatggccttgatgtcggcggtgtcggcttcgctgaattgctgaaccaagccccgcaggtaggcggtcgcctcggccgataaggcgggacactccaccagaccggcttgcgtgagggcgataaaccacgtgatctcgacttgcacccgcttgtgcatgtagccatgctcgctcatgatgggtcgcaaggcagccagtttgccgctgtagcggccgtcaagcggggatagggcggagatggtgtagaggtcttgagtcattgggggcggggcgcgatgtgcaccaaaatagatagccaatattgtaggcgcccagccaaattaaacctttggctgtatacaggtttgatgagcttaaaagcgaccaggattccttttggcgcccgtgttttggggctttctgtggctagaatcattgctcgatcaaccattattgaaacccatgaaactcatcggctctccaaccagtccatatgtgcgcaaggttcgcgtcgtcttggttgaaaagcgtctcgagtacgagttcgcaaccgaagatgtgtggtcggcggataccctgatcgcagcggctaatccactcgggaagatcccctgtttgatcatggacgggggtgaggccatgtttgattcgcgcgtgatcgtagagtacctcgatggcttgtcgccggtgagtcgtttgattcccgcaagcggccgcgagcgtgcggaagttaaaacctgggaggccttggctgacggtgtcatggatgccgccatcttggctcgcttagaggcttcatgggctgggcgcaccgaggcccaacgctcaccggcttggattgaccgccagttgggcaaagtggagttggcggtggctgccatggccaaaggcttgggcgacaagccttattgcagtggcattcatttcagtttgtcagacgtggctgtgggtagcgcgttggcgtatctggagttccgctttccacaaattaattggcgcgaaacgcatcccaatttgtccgcgttgttagaccgcttgatgcagcgggccagctttgcaggcacggcgcacgcctgatagcccatcgctctgcggggtttatcccgcgcgctttttgagccagcgcatgagggcgccgatgacggggagcttttcatacagctcttccgcagcgtcccagtagtcgcggtgaaacaccaccaagccctgcgcgtcgaagcgcaaatggctggcaccccggatggtccaggggcgaccgcccttgccgccctttcggcctttggtgctgaatagaaaatcccaagttaaaaagcagtcatcaccctgttcaatggccgtcgtgaccacgaagcgcggttgttcaaggcgcttgaacatgtcatcgaagatgtgctgaacttgcgccaactgcgtgacttcgttgaaagggtctttgaaaaagagcggatcggcgtagtacgcacccatgcgcgtcacgtcagcggcttgcaggttttcaaaccatgccaataacgcttgtgtgcgggccgatacctgatgacgggatgcgctcatagtcgggtgagttttttgatgagcgcttgtgcccagcgatgcggcaatacgcgcagcaatttgagccaccaggtgaagcgtttgggaaagtggatgtcaaagaggccatcagcccaaccagccaaaatttcggtggctgcaacatcggtggtgatcaacgcaggcatggtgaactcgttctgcgcggtgagtggggtttctacaaagccggggtggatggcgctgatacccagccccttgcccgccaagtcgtaatgcagtacttcagcgaaatgggtgagcgcggctttggtgggaccgtatgccaacgagttgggtaacccgcgccagccggcgacgctactgataaaactgaggtgaccaaatccttgttgcaataaggtgggcaaggtggcatcgaccaagttataggcgcccacgacgttgacgtcgagatgttgcttcatgcgtgccaagtcaaaccggtaggcgcgcaggggcttgtaaatcccggctgcaaacagcaccagatcgagccgcccttgcgcctgcacaatgtgttgcaccgtgttttgcagcgcgggcaagtcggtcacgtctagtgggtaggccgccgcactggggtgctgtgttgcaaattgctgcaggggctcgctttggcgtgccgagaccattacccgggcaccgcgttgtgccaactgctcggcaacggcgtggccaatgccggtggaggctccaacaatccacaccactttgccagaccattccgtcagcggtgggttcatgggtttgaacaagcgggccatcaggcggcagtcattggtttttcgagcgtgaactggatcacgtccgtgttcgactccatgaaggcggcttcacagtaggccaagtagaactcccatgtgcggatgaaaggcgtgtcaaaacccagcgcgcggacggcgggttcctcgtgcaggaatttgtggcgccatgtgcgcagggtctcggcgtaatcgagaccgaatgccttctcattgacgacacgcaaaccagcgcgcccagcagattcgcggaattggcgtggactgggtaaacagccgccaggaaagatgtactgctgtatgaagtccgtgccttggatgtagcggctgaacaggtgatcggcaatcacgatggactggatacaggccttacctccgggtttgaggcgcttggcgatggtgtcgaaataggtgggccagtaggcgcgcccgaccgcctcgatcatctcaatcgagcaaaccgcgtcgaatggttcttcggggctgaccacgccaatgtcacggtaatcctgcaaccgcaagtcggctaactgtccgttgggggttgcagcgagtcgcttgttggcccagtcgagctgttctgtggacagcgtcaggccgaccatttcgctttgaaattcgttggtagccatttctgccaaggcgccccagccgcagccgatctctagcaagcgttggccgggcttcaagtccacctcttgcagcgcgcggcgcaccttttcgttttgcgccatggccatgtctgtgatgccattggcatacaacgcgctggagtagttcatggtgttgtctaaccacaaacggtaaaagtcgtttccgaggtcgtagtgcgcgtgaatatttttgcggctgttggctttggtgttgcggttcaaccagtgcttcacttggtaggcaaaacgcccaatgggatgaccgtatacggctttctcgatggcgtcgcggttttgaatcagcacctgcaacaagtgggcgagttgcggggtgtgccagtaaccggcaatgtaggtttcggcgaagccgatatcaccacttttaatggctgccgaaaacacacgccaatttttcaggatgatgtagccctgcaaaccaccaggtttgccgtagaccagccaggtgccgtcagggcattgaatgtgcaactccccatgcgtgattttggtgagcagcttgagcagtcgcttggccgcgaaggggactttgacgtgggcgagggctgccgcggtggtggtgtctcgttgcatgggtcgtcgaatgaaggctaggtaatgaactcggtgggtggcgcaggttttctgaaaaacggtacacgcttcagaaacaataacagggcttgccaatgaatgcgcgccatcaccccaaaggtcatgagggggtaggcccatagcgcgcgtcggcggctgcgcgcgtttaggggttcgagcgtaccactcacgctggtgcacagcaaaggaccgtccgcccattgggtgtcggtgtagtcaatgcgggcgaccacgcggtttggcaccccctgccccgtttgtttttggtgcatgaagttgaaccggtaactgccccgcacctcgcaaaagggggaaacatgaaaaaccttttcagtgcgctgctgtacacccagggttacgtggtccagtacgtagatgtgccgctcgccaaatgtgttgttgacctcgacgaccacggcttttagttcgtgcgcggcggtgtagcagtaccaaaaactgacgggcttaaaaacgtagcccaacacgcgtgggtaggtgtgtaaccacacttccccggtgcagtcggtgatgccctgctcgattagcaaggcatcaagccaagccaagctgtcggccccgccgacgccgtggtcactgtcgtaaaacgacaagggtgcccatcggttgcgcggaatggcctcgtcgaaggctgcagggtcttgcgcgccttggcgcatcggcagccaaacaaagtagttgccgtacgcaaattgatgcggggctggtcgggtgcgggtgtgccgcaccacgccaaatccaatctggggggaggccgtcacgcgctcgtccgttgggtggccgccatgtcaaggtgagcgcgcaacgcgttagctgcacgcagcccggactgcagcccgtcttcgtgaaaaccatagcccgtccacgcgccacagaagtaggtgtgttgggtgccctgtagcccggcaatttggcgttgggcgtcgatcgccgccaaatcaaaaatggggtgatcgtagtgataggtgcccaataccgactcgggcgcgatggcactgaccgggttcagtgacaccaccacgggctgcgtgaagggcagcggctgtaattggttgatgaggtagtgaaggcagacgcgggcgtcttcttgtgccaaagcgggtgcgcgttcgtagttccaggccgaccacgcttgacgagccgagggcaagaccgatgggtccgtatgtaaaacagccacattgggctggtagcggatcgcgcgcaaggtgctcgtttcggcgggggtcgcgtccgcgagcatggccaaggtttggtcggggtggctggccacgatgacgtggtcaaagggctcgataccccgtgctgtggtgatggacaccccattggcgtcacgggtgatgcggctaacggggctgctcaagcgcgcatcaggaactgttttgaggatggcatccacgtattggcgcgcgccaccggcaacggtgaaccatttagggcggttcgccacttgaagcagcccgtggttgtcacaaaactgtaccaaggtggcgacggggaacgccagcatctgagcggttggacagctccatatgctgcccagcatggggaggaggtaccagttgatgaatggctttgaaaaacggtgagcctctagaaaggtcgagagtggctggttttcttgatggccccgcgcctcagggggcgtgcgggcaattgcggtggcgattttgttgaaccgcagaatgtcgcggagcatgcgccagaagtcgggtcgaaacaggttggtcttttggctgaacaccgccccgagtgtggtgccactccactccagtgtctggccgtttccccgtgcattgggcaccttgaccgaaaacgacatgtctgagggcgccagcgggatcttgagttcggcaaataacgccaacagaccggggtaggtgcgctcattgaggaccaaaaagccggtgtcgatgccccaggtttgttcgccggtgggcgtgggcagggtgacatcaacggtgtgggtgtgtccaccgaaatagtcattggcttcgagcagggtcacgtgagcggtgtcacgcaacgcatacgcagcggacaaaccggcgatgccagagcccacaatggccacgcggggccgtatgccggacaaaggtgtttctgttgattgcgttaaagttttcatgcgcaggttggacaaaaggtcattattgggggtatgtccacaggtagataccctaggttgcccaaaaagtacttgccaaagtaacgatctggccgatactaacttgtcttagacaaaagacaaatttatttttacacccttacggttccaatttatatgacgtggatatacaccatctcggacatcgagcgcgataccggcatcgctaaagatcgtttgcgcgtttgggagcgccgatacggcttccccctgcctcagcgggatgacacccaagagcgggtctatgacgaagaccaattactccgattgcgcctcatcaagcggttgttggatgttggcatgcgcgccgggcgtgttgtgcccatgccgcttgaggtactgcagcgagaggtggaaagcgtaaccacccccatcgtggcgcgcgtggctgcgcaagaggatcaggcgctgctggcccatttggtctcgctgctcaaagccaccaatcgccgcgctttgcaccagacactcatgcaaatcattgcagaacggggtttggcggacgccatcgaggaggtcattgcgcccctcggcgcgcaggtgggtgagttttggctgagtggccaaatggccatttaccaagagcatttgtttaccgcagtcgtcaaaagcgtactgatgcaagccatggaacagttgccgttgcaagcgaacggaaaaccaccccgggtgttactggccacgttatcgacagaacgccacgaggtgggtttgttgatggcggagtccatgtttgcgcaagccggttgtgaacggttgtcgttgggccccagcatgcccctaaccgaggcggttacggcctgcttggcggtcaagcccgatatcttcgccctaagcttctccagccagaatgcgcccaaagaggtgctcagccagttgcgacagttgcgcggcatgttgccacccgagaccgaaatttgggtgggaggcagcgccgtcgcattgcgtttaattccagacgccaaagtcgccaaagtgttcggccgagccaaagatctgcgggacgctatcgaggcgtggcgtatcgagcggcactagcagaagccctttaaccactgagggggtctatgcgcatcatttttacgaggggcatgagcccccgtaaaatgcggtgatcgaaccaagttgcgcaggagtagtggatgctgtaccccgagttgttcaaacaactggaagcggtgagatgggacatggacaaggatattccttggaaagactttgacccctctgccctgtccgatgaacaggcccaaaccatcaagatgaacgccattaccgagtgggctgcattgcccgccacggagatgtttctgcgcgacaaccgcgatgactctgatttctccgcgttcatgtccatttggttttttgaagagcaaaagcattcactcgtcttgattgagtacttgcgccgcttccggcctgacctcgtgccaactgaagccgagttgcacgccgtgcgcttcgacttcgaccccgcaccggcactcgaaaccttgatgttgcatttctgcggcgagatacgactgaatcattggtaccgtcgcgcggcacagtggcacaacgagcctgtcattaagcacatttacaccaccctcagccaagacgaggcacgacacggcggtgcgtatttgcgttacatgcgccgtgcgattgagcgtttcggtgacgatgcacgcgccgcatttgccaaagtcggtgtgctcatggccagcgcgcgtcggacggcgcaggctttgcaccccaccaacttacacgttaacaaaacgctgttccccaacgacaccgtgcaaagccgaatgcccgaacccggctggttagagcattggttggatggtcaaatccagtttgatgtgacgtgggaaaccaaagtggtcgagcgcattttgcacaacctgggtttgttgtttggccagcggtttgatactgtgcaggcgctcaaccgctaccgcaaacagatcacaccggcgaccgcttaagcggtctcgaatacgctgttccacagggccaatatggcctctcggtatgcggctgcatcatccagcggcacttgggtgggtgcttcgtcgagacgcgcgcggtgttggatttgtcgcagcgaccggtaggcgtccatcgctgcctcactcacggttggcggcagtaaaccgcaggtttgcgcaattcggatcagcttgatattccctaaattgggaatcaattctgggtgctgagcgctgtgtgccagcagcaggtattgcacaacaaactcggcatccaccatgccgcccacgctgtgtttgacatcgaagagcccgtccggtacgtgatgggcttggcgcacgcgctcgcgcatgttcatgatttcggttttcaaggcggtggtgtcacggggagccaccatgacgctgcgccggacggcgtcaaactgcgcctctagctccggctgccccatcacgaagcgcgcccgggtgatcgcttggtgttcccaagtccacgccgcgttgctgccgcgttgcgcttggtagtcggcataggcctcaaatcgtgtgaccaacatgcccgagttgccattggggcgtaacgcggtatcgatctcgtacaagtcaccctcagccgtcttgacggtcaaccagttgatcagcttgcgcaccagcgctgcgtaaatggtttgggcgtcatcgtggtcatcgtcgtaaacgaaaacgatgtcgagatcgctgccgtaaccgagttctttgccacccaatttgccgtaagccaagatcgcgatgcgtggctctggggcgtggcgttgacgcaagcgctcccagcaccattgcaaggtgacacgcaggatgctgtcggccagtgcactgaggtcgtcagcaacaaactcgacggtcaagcgtccttcaacgtcgcgcgcgagcgtgcgaaacacctcactgtgatgggcgcgacgcaacagatccaatagggcctcgtcggtgtcttcaccggttcgcttgagtgctgcgcgacgggcttgaagctcggcctcaaactgctgcccactgaagcgctcggagaagagctcggggttggccagttcgtcaatcacactggggtgttgaatgagataccgtgccggccacttcgccgcactgagtatgcgcagcatgcgctcatggatggcaggccgctcttggag

SEQ ID NO: 26 - DNA, 24266 bp, Artificial Sequence
  Synthetic Oligonucleotide
  misc_feature (1)..(3261): n is a, c, g, or t
nnnnnnnnnnnnnnnnnnnnnnnnnnnnnnnnnnnnnnnnnnnnnnnnnnnnnnnnnnnnnnnnnnnnnnnnnnnnnnnnnnnnnnnnnnnnnnnnnnnnnnnnnnnnnnnnnnnnnnnnnnnnnnnnnnnnnnnnnnnnnnnnnnnnnnnnnnnnnnnnnnnnnnnnnnnnnnnnnnnnnnnnnnnnnnnnnnnnnnnnnnnnnnnnnnnnnnnnnnnnnnnnnnnnnnnnnnnnnnnnnnnnnnnnnnnnnnnnnnnnnnnnnnnnnnnnnnnnnnnnnnnnnnnnnnnnnnnnnnnnnnnnnnnnnnnnnnnnnnnnnnnnnnnnnnnnnnnnnnnnnnnnnnnnnnnnnnnnnnnnnnnnnnnnnnnnnnnnnnnnnnnnnnnnnnnnnnnnnnnnnnnnnnnnnnnnnnnnnnnnnnnnnnnnnnnnnnnnnnnnnnnnnnnnnnnnnnnnnnnnnnnnnnnnnnnnnnnnnnnnnnnnnnnnnnnnnnnnnnnnnnnnnnnnnnnnnnnnnnnnnnnnnnnnnnnnnnnnnnnnnnnnnnnnnnnnnnnnnnnnnnnnnnnnnnnnnnnnnnnnnnnnnnnnnnnnnnnnnnnnnnnnnnnnnnnnnnnnnnnnnnnnnnnnnnnnnnnnnnnnnnnnnnnnnnnnnnnnnnnnnnnnnnnnnnnnnnnnnnnnnnnnnnnnnnnnnnnnnnnnnnnnnnnnnnnnnnnnnnnnnnnnnnnnnnnnnnnnnnnnnnnnnnnnnnnnnnnnnnnnnnnnnnnnnnnnnnnnnnnnnnnnnnnnnnnnnnnnnnnnnnnnnnnnnnnnnnnnnnnnnnnnnnnnnnnnnnnnnnnnnnnnnnnnnnnnnnnnnnnnnnnnnnnnnnnnnnnnnnnnnnnnnnnnnnnnnnnnnnnnnnnnnnnnnnnnnnnnnnnnnnnnnnnnnnnnnnnnnnnnnnnnnnnnnnnnnnnnnnnnnnnnnnnnnnnnnnnnnnnnnnnnnnnnnnnnnnnnnnnnnnnnnnnnnnnnnnnnnnnnnnnnnnnnnnnnnnnnnnnnnnnnnnnnnnnnnnnnnnnnnnnnnnnnnnnnnnnnnnnnnnnnnnnnnnnnnnnnnnnnnnnnnnnnnnnnnnnnnnnnnnnnnnnnnnnnnnnnnnnnnnnnnnnnnnnnnnnnnnnnnnnnnnnnnnnnnnnnnnnnnnnnnnnnnnnnnnnnnnnnnnnnnnnnnnnnnnnnnnnnnnnnnnnnnnnnnnnnnnnnnnnnnnnnnnnnnnnnnnnnnnnnnnnnnnnnnnnnnnnnnnnnnnnnnnnnnnnnnnnnnnnnnnnnnnnnnnnnnnnnnnnnnnnnnnnnnnnnnnnnnnnnnnnnnnnnnnnnnnnnnnnnnnnnnnnnnnnnnnnnnnnnnnnnnnnnnnnnnnnnnnnnnnnnnnnnnnnnnnnnnnnnnnnnnnnnnnnnnnnnnnnnnnnnnnnnnnnnnnnnnnnnnnnnnnnnnnnnnnnnnnnnnnnnnnnnnnnnnnnnnnnnnnnnnnnnnnnnnnnnnnnnnnnnnnnnnnnnnnnnnnnnnnnnnnnnnnnnnnnnnnnnnnnnnnnnnnnnnnnnnnnnnnnnnnnnnnnnnnnnnnnnnnnnnnnnnnnnnnnnnnnnnnnnnnnnnnnnnnnnnnnnnnnnnnnnnnnnnnnnnnnnnnnnnnnnnnnnnnnnnnnnnnnnnnnnnnnnnnnnnnnnnnnnnnnnnnnnnnnnnnnnnnnnnnnnnnnnnnnnnnnnnnnnnnnnnnnnnnnnnnnnnnnnnnnnnnnnnnnnnnnnnnnnnnnnnnnnnnnnnnnnnnnnnnnnnnnnnnnnnnnnnnnnnnnnnnnnnnnnnnnnnnnnnnnnnnnnnnnnnnnnnnnnnnnnnnnnnnnnnnnnnnnnnnnnnnnnnnnnnnnnnnnnnnnnnnnnnnnnnnnnnnnnnnnnnnnnnnnnnnnnnnnnnnnnnnnnnnnnnnnnnnnnnnnnnnnnnnnnnnnnnnnnnnnnnnnnnnnnnnnnnnnnnnnnnnnnnnnnnnnnnnnnnnnnnnnnnnnnnnnnnnnnnnnnnnnnnnnnnnnnnnnnnnnnnnnnnnnnnnnnnnnnnnnnnnnnnnnnnnnnnnnnnnnnnnnnnnnnnnnnnnnnnnnnnnnnnnnnnnnnnnnnnnnnnnnnnnnnnnnnnnnnnnnnnnnnnnnnnnnnnnnnnnnnnnnnnnnnnnnnnnnnnnnnnnnnnnnnnnnnnnnnnnnnnnnnnnnnnnnnnnnnnnnnnnnnnnnnnnnnnnnnnnnnnnnnnnnnnnnnnnnnnnnnnnnnnnnnnnnnnnnnnnnnnnnnnnnnnnnnnnnnnnnnnnnnnnnnnnnnnnnnnnnnnnnnnnnnnnnnnnnnnnnnnnnnnnnnnnnnnnnnnnnnnnnnnnnnnnnnnnnnnnnnnnnnnnnnnnnnnnnnnnnnnnnnnnnnnnnnnnnnnnnnnnnnnnnnnnnnnnnnnnnnnnnnnnnnnnnnnnnnnnnnnnnnnnnnnnnnnnnnnnnnnnnnnnnnnnnnnnnnnnnnnnnnnnnnnnnnnnnnnnnnnnnnnnnnnnnnnnnnnnnnnnnnnnnnnnnnnnnnnnnnnnnnnnnnnnnnnnnnnnnnnnnnnnnnnnnnnnnnnnnnnnnnnnnnnnnnnnnnnnnnnnnnnnnnnnnnnnnnnnnnnnnnnnnnnnnnnnnnnnnnnnnnnnnnnnnnnnnnnnnnnnnnnnnnnnnnnnnnnnnnnnnnnnnnnnnnnnnnnnnnnnnnnnnnnnnnnnnnnnnnnnnnnnnnnnnnnnnnnnnnnnnnnnnnnnnnnnnnnnnnnnnnnnnnnnnnnnnnnnnnnnnnnnnnnnnnnnnnnnnnnnnnnnnnnnnnnnnnnnnnnnnnnnnnnnnnnnnnnnnnnnnnnnnnnnnnnnnnnnnnnnnnnnnnnnnnnnnnnnnnnnnnnnnnnnnnnnnnnnnnnnnnnnnnnnnnnnnnnnnnnnnnnnnnnnnnnnnnnnnnnnnnnnnnnnnnnnnnnnnnnnnnnnnnnnnnnnnnnnnnnnnnnnnnnnnnnnnnnnnnnnnnnnnnnnnnnnnnnnnnnnnnnnnnnnnnnnnnnnnnnnnnnnnnnnnnnnnnnnnnnnnnnnnnnnnnnnnnnnnnnnnnnnnnnnnnnnnnnnnnnnnnnnnnnnnnnnnnnnnnnnnnnnnnnnnnnnnnnnnnnnnnnnnnnnnnnnnnnnnnnnnnnnnnnnnnnnnnnnnnnnnnnnnnnnnnnnnnnnnnnnnnnnnnngggagggtggaatggttgatcctctacagatacagcctatatccccccttagtgccttacaagaccgattctgtctgataaatcttgggggggagatccggatagtcgataagcaacagattgaggcggtacggtctggggctagggatggggaggtcaccttttataagcgtgctgaaggctcgatcctgatgcaacgggtccttgagactctgccggtaagctcaaaagcaaatatagtgatacagcagtttattgttaatcctggtacacactcatttgatgcagtcgcttttagccccctaccgacggcctctaccactctaaatttctggaccggacccactatgaaaccagttaagggtaaatggaatgaggtaagggtatttttgttggaagtgatatgcaacaagaataaagcggccttctattacttgctgtgtttcctggctcatatgctacagaagcctgaggagaagcctgacatcatgatcgtgttgctgggagggcaaggtacgggtaaaggtactttctttaggctactccacagcatctggtcacgcactacactccaggtatcagacgttgatcaagtgataggtcagtttaatgcggcactagagcgtaactatgtaatctgtatggatgaggcgctctttagtggtgataagaaatctatggagaggctgaagtcacttattacggagccaagttgccgtatagaacagaagtatcaaccctcacgcaccatcgactcatatcatcgtttctttgcggctagtaataatagtcattttgcacagatcgacaaggacgacaggcgcttcttatttctaagggtctcatcagacttccaaggtaacctagagtactttgagaaactgcatcagttaattgaaaatgaggatgttgtatcagctatggtgtttgatttacttacaattgacttagataacttcacagtgaggagtcgacccctgacggctgagcatactatgcaaaagatccagtcactcacaggcttcgaacgctactggtatgaaaagctgcaatctggagatctgagtgattgtgactatatttcgagcgacccgtggaccgagccgcgtttcatatctacaaaagacataatccggggctacgaagagtacgataaaaatgctggcagatatcatccagttcaaagccagcagattgcttcatcattagaaaaactatgccccagtgctcattcaaaaagagaagtcattcacgcaaggtctttggagaaaacccaggctcgtggttaccaattacccagtatcggtgttgctcgcacagagttcgagaaaatcattggcagtaagctgcagtgggatgatgatagtgactagattgaagttgtgccacgaaagaaaacgacggctgaagagccggcagataagtaagaatgttgccagataagccagacgttgccagaggctctggcatgatgagagccctcaagtataagggttgtacgcccgttgccagtgttgccagtacttttaataaataaataaatatatatatatatagggatactcatgaaagtttcttcattttctctggcaactctggcaacactggcaactcactttccaagggtgcgtgctaaattaaaagatcatgccaccgcctagccgcctagctaggtgtaatttacaaaaggagacaacatgccactaccttgcataatgaaacatggggccaagaggtgtgctgccttaagcaagaggacgaagctagcctgtggtaacccagcagcctacgggtgtaagacatgccgctatcatggggccaggaagaatatattacgcggtgagcaacatcctagctatgtgcatggtaaccgcaccctagaagctgagagacagtctagtgagtcaagtttaaggctcgctaatcttgaggatgctatgcacttactgcagatgacaactgcatcacgatcacgaggacgtaagcctaccgggtacaggagggcagcgagtattgatgagctagagatatgaaaaaaaccattaatgacatgcgccaaatagccgcgccaagcgggagatgaccgaagccaatttgcggttagtgatctccattgctaagaaatatacgaatcgcggactacaatttcttgaccttattcaggagggaaatattggtctgatgaaggcggtggacaagtttgaatatcggcgtggttacaaattctcaacgtatgccacttggtggatccgacaggccatcactcgatcgatcgccgaccaagcgcgcaccatccgtatcccggtccatatgattgagaccatcaacaagatgaaccgtatttcacggcaaatcttgcaggaaacagggcaagagccggaacccgcgttgctggcgcagaagatggaaatgcctgaggagaagattcgaaaaatcctcaagatttccaaagaacccatttctatggaaacgcctatcggcgatgatgaggattctcatctaagtgattttatagaggattctgccacgatggcacctgcagatgccgcagtttatgccagtttgcgtggggttactaaagacattctagattcattgacgccacgcgaagcaaaggtgcttcgcatgagattcggcatagagatgaataccgaccatactttagaagaagtaggtaagcagtttgatgtaacgcgtgaacgcattcgtcagattgaggccaaggcgctacgtaagttacgtcatccctcacgctctgaacgcttgcgtagttttctggatacagaaggctgatcaacattttttaaaagcttttggtatctttgtctaaatcgggtctgtagctcagttggttagagcaggggactcataatcccttggtcgctggttcgagtccagccagacccaccatataatcaaggacttagcgtaaatgctaagtccttttttatgtccaaaacaataatgcgtgccgttagcgtgccgttatgagtctggctgtaacaacacttcttctacattcagccccattctgttcttaagcaaatcctagaaaagagcaaataattagagttaggcgaaagaatgtcagtttaatcctcccccagattcagtgaatgttctgagttgtaacaaattttatatcccctctagcactatattttcagccaggccaagaccaaacaaagcaatgaataggttgtggttcatttcgcaagactcattaacggcattctaagtaggtcaatgcccctgcctagccgcaaagtatggaatgaactgattcatgtcgtgattcgtaaactgaggttcaaaaaccagtaaaaaaattttactaaatactcttgaaccgtaatggacggttctgaaaatcacatatcagtctaggagccaaaacatgaattcttttataaggattgcagaagtgaagaagagaacaggactatccgcgagttctatctacaaattcataaataacggtagttttccacgtcaggtaaagataggggttcacgctacggcttgggtaaatatcgaaatcgaaaaatggattcttaatgttctcgccgaccgaatattgacccaggctgccgattgaatattgacccaggaccggtcgctgttttttgagtcagcaactgtggataagtatacccgatagatgcttctgtcgtttttttagttttgttagttgcaggaacccaccggggaatttagccatgtctccagcccattccccagcgtctcaaatcagaatggctcgtctgctacagcttctttttctcctttgcgtttctgttctcgtgccttgatacgtgactttgcagccatcgtgctgtgctggaatcgatacgactcattacccgtctccacgatatgacagtggtgagtgagtcgatccagtaaagctgtggtcatcttggcgtcaccaaacaccctagaccattcagagaagctcaagtttgtcgtaatgactacgctagtgtgttcgtacagttttgacagcaggtgaaacagcaacgcacctcccgcttggctaaatggcagatacccaagctcatcgagaatcaccagatccattcgcatgagtgataatgcaatcgtcccagctttgttgtcatgcttctctcgctctaaagcgttcactaggtcaacagtagaatagaaccgcactcgcttgccctgtgaggagatgcccgatatcgcaatagcaatggccagatgcgtcttacctgttccaggtcctccaataagtacagcattctgtgccgtatcggtgaacgagagcgtagccaattgccctatcaaattctgatctaccttggatgatgcaaagtcaaatccagccagatctctatgcaccggaaacttagctaccgtcatttggtgacgtactgatcgcatggcccgttctgtatgctctgcttgtagcaaatgttcgatcaaccattttgaagatgatgttgacgtcgtcccttgatctatcagatctgtccaggcactcaccattccatgtaagcgtaactctttgagctccgtcgtgacatcacgcatgatcaatctcctcggcatctgttaccacctcgttgtcatcacgtagactgtcgtaccgctccgtattcgctagtggaacatcctttagtggcaagcttgtctcaacggatgccggtatcgggccggcactcagtcgtgccaagacattaagaacatgctcgccactgagcacaccagactcgatcaccagttctactgcgactaataccgcatccagtccggcagtaggcacggcggcgagcacttgagccactattctgtcgccacctgcgtgtcgcatcaaaccttgccttagctttttgagtgctatcggcatatcagcaaatggagctccatttctaagtgctcctggtttacgcgccaccaacggaatatagtgctgccagtcatagcaaatatggtcccgatcgctcaaacgatcatgactggcaactagagcgtctcctgtcacaacacaaactcgatccggatagagtcgcgtgctgacccactgacccgataactcacacggtaccgaatatcgattgcgttgtacggtaaccaaacacgttgaagatactcgtgcctgattctccacatagccatcaaatagagcaggcacaggcatcatctcagtgcgctcttgttcgagcacttctgccacactgaatcccttgtactcaggatggtgtagctcgttccatagagcgcgacaacgctcgccaagccacacattgagttcatcgaaggaaccaaatcgcaactgctgcgcatccagccatatacgtcgacgactatcctgcacgttcttctctacaatgcctttctcccaaccagaggccacattgcagaaatcagcgtcaaacaaataatgtgagcacatcacagcaaaacgcgcgttgacaactcggcccttccctttgctaaccttatcaacagccgtcttcatgttgtcgtagataccgcgtcgaggaatgccgcctagcgcgatgaaggagcgtgtatgggcatcgaacaacatctcatggccctgacttggataggccactagccagaatgcacgactggcgcatagtttgaggtgtgacacttgcatgcgtcgataaataccgccgattaccatcccctcttcgctccagtcgaactggaatgcctcacccagatcgaacttcagcggaacaaaggcatgaggtgctcggccttcacgacctcgccaagcacgaataaagtccgtaactcgactatagccacccgtatatccttccagttttatttgcgcgaagagagcttttgccgtacgccgattctgtttagaacggtgggcatcaacctttagggcttgttccaataactcatgaaacgcagtgagcttgcactgtccctcgcgacgccggtacgtcggtggtaccgcctccttcggactcctaagccatctacgtaccgtgttccgcgataaacccgtgcgcttcgtaatctcatgcagcgacagtttgtcgcgtaaatacatccgacgaatcttgcctatcatttccatagtgatcacctttttatctcccgcctagaaattaggcaggatcagtagaacacctgggtcaattttgagtcggcattacccctataagtgggtcagttttcggtcggcgtcaacaactggggtcaagccacccctcaaacgggtggctactagaacagaccgtttatcgtattgagatacggctgtggtcaagccacccctcaaacgggtggctactagaactcatacaccatccgacgcacacaaccacgaggtcaagccacccctcaaacgggtggctactagaacacgataggttggctctacagaacgctctatggtcaagccacccctcaaacgggtggctactagaacaccacccaggctggtatagcaaccacgcaaggtcaagccacccctcaaacgggtggctactagaactgtaccgcgctaggaagggactacggatgtggtcaagccacccctcaaacgggtggctactagaactatacgactgacactggcaagctgccggagggtcaagccacccctcaaacgggtggctactagaacacacccggagtagcgacagcgaccaaagcgggtcaagccacccctcaaacgggtggctactagaactagattcatattagtctttgtgccagagtcacttatctttttagaaggtatttatgtttaggagcagcgagcaaaaacacttcagtgatattgtcgataagcatatgtcactgttggacgcacctctgttattggagggtgggactggtctgggaaagacccgtgcctacttggctgcgatcaaagataagcgggttgcgatagtactgcccacccatcaattaattgatcagatgctcacttcaagtgatctattggcagcaggacttaatgatattaaggcgtttagacctgcacggttttttgaaactagaacagaatatgaacatgcccgtgagctatctaaaactgcacaggtgatgatatgcaccgcagcctctgtaatcattgatcagcggctaaatggtgagtacaacggtgtcactagtgatcgagagtatttaatttttgacgaggcagatcagttgcctgacatggcagcattgcaatcggatttcatgatcacacctcagaacttgagcgatcttggaatcaggttggttacgactgagcaggcattaaaagagattgttgccaaaactccgcgcacagttgaacctgaaattcgagcggcagcaaggttgatgcttgaggtattagaagaacctgcttggtatcacgactgcgggaaggatgatcaaggtggcattgttttaacgcacaaaatgcccggaaggttactgaaaaaaatcagtaacagacctaactctgcctttatcagtgccacactttctgttgcaggaaaactttcaaacttcaagatgtcgatgggtattgataaagagtcaattctatctggcatcattgagcctattgatcatggcagacttacttttcacaccaccgatgcaacagttgatacaccagagtggatcgatgcggtattggatgcggtcaagagatcaccaaaaccggctttggtagcaacgacctcacacgatctaacgcaagaacttgcaaggagattaccagagtcagtcgcgcgaacaattgaagagtcagctgcagaagcttcaaaacgaattgggaaagacggtgtattgatcgcagccggtgcttgggcaggacttgatacccccgttagatggaggtctatcatagtgccgcgcgttccgtactcgaagccaattgttatcgatggtgacgttacgacaagctatctggatgctcgtaacaccgctatccggcgtctacggcaggtgattggacgaggtttacgaactccagatgccgaatgtgacatttatattattgatggtcgatatactaaactcgaagcttttgtgcctgaaaggtttcgccctgattgggctggacgtgagaaaaaaagttttacagagggtactaggcaggagattgtatacagcagagcagagcgtgacccgctgttgcgccagtctgcactcagacgatatggattggtttgtatggcttgcggactcgttccaagagtgtcgattcaacttgatgtgcatcataaagatcctattgcagagggtgaacgcacaactacgttaaatgatgtattggtgttgtgtgctaactgccatcgtctcgcgcattcagagtcaccgccactcagtttggatgccttaagggtttagatagcagcaggaccctcaactaatgggtgatagtacgagggtaatagtcagctactagtttgacccatgtgtcatactggatacgttgctataggcattaaaaatgagaacctctccaaatagtatctttatctcgatacttactatttcattctttgtaatcatgagccaagctcatgcggaagcagtgaatgccaaaggggagtacctctatggtcctgacacttccgaggcagacgcatgtcgacttgcaaaagaacgggctaaagcgaatgctctaagcaaagtattcggtgaaagtatctcgatggaagagcagatgtcctgccgtgaggtcaaaggtggcaagcctgattacgggtgcgagttgaaccgcgtatcttggtcttcaatagagggagacatcaggtcagttacagattatcgcaaggtgatcgagtcaagagtaggagagagagcttgtatcgtaacgctcaccgccgatgtcgttataccaaaccgaaagccagactcaagtttcgatctcaaggcaaccctcaatgagaaaatgtatcgtgcaggcgaggtactaaccattgcacttgagccgacggctcccatgcatatcgccatctttaactgggttccatatcaggatagggacgcagttattcagatgtttccaaatccgatggacccccagagccacatcactaaaaaaacaagcatccctacagagagcaagctttctgcttataacttcacgatgacttggctggaatcgctgccaaagaataaaaccttcgtagatgagtatctgattgtgattggaacaaagaagccaatcaaatggctatcaagctatgaattctctgactttaagtcaaagctatctgagattcctctcgatgagatgcgtgtcgttaaacgcggttaccaactcatacggggttctagtaaagtggggtcgattcaatgaggttagcattactcataatcgtttgtatcttcagtacaggttgtgtgacaacccggtatgtcgaacgtagctctgaccatacaaagcagaagccagattctgttgcaacaaatgattcaattgggaatgtctatcatggtgttgttgtctttgagtcctcagaggaattaaaagctaatcctctatcctgtcttgcagtattcccaattacagcaaaaggtggtgacaccgacagtgctgtatctattagaaatgcactacatgcaaacttagctccctccggcattcgtctgttgccactgcagaagatcgatgctgcaatcaaagcgactgataactctaatggagatctaaattcagctgtagccaaggtaattggttgtgacaccatcatgactggtgaagtgattgatgatccatcttccttctatggtatgtactccgtggttcgtgcgggcgccaatatccggatattgaaagtttcaacgggtgacactctgtggagaggtaaccacacagcagtcctcagagggggtggcgttcctcttggttttctagacatcgctatgaatgtgttttctgctgtgaggaacctcactaaagatcagagttcgcgagtaactaatgaccttgcaaggcgtctcatactgacgattccgggtctggcttatcaggctgaagtcttacctgctgaagaacaaccaatactgacagcggttgaagtccgccccccccagactgcatacggattactttccggactcgagtcagcgcctccagaggaagtaaggcaacggctgataggagaacttaaaagtaatcgctggaatagtcctaaagaccgagtcttaatcgcagaagcgcttattagagcagatgaccagcaaccccttggatactatgaagctgctctcgcaagactacgactctcagagcctatcatggctcttccccatgcagagcgtgcagcaactcttgagcctgaaaacgctgacagccagtttttactaggacgaatacagcttgctacaaacaagcctcaagattcgattgcgcccctaatcaaagcagtggctttagatgggaaggaaatccatctgaatgcattgggtactgcttataaccaagtaggggactatcccaaagcggcagcttcttttaccaaggttctgattaaagatactgataacagttatgcccttttacacggagccattgcacacgctggtacaggtgcaaatacggaagctgtcagaatgttgcgtcgcagcatgatcgtggggattgcgagatcagattcacctgcagcaaccagagcattgaatatattacgtgcaatggacttagctaaattattacctgatggtgaactagaggttctggagagcaagatcaagatgattaaggtttcttagtattctaattttttaaaaggagtagatcatgaacttcaataaatcagccttagccacatctgcagcaatcttaacggtattaactgcctgtgtaggtcctcagcccggaacgccaagttatgtagctatgcaagaagaggaccgccagaaggctgcaatcaaaacagctgaggagtcggtagcaaaggcgccctcttggtacgtacagcctccggttgatgctaactctatttatgctgcaggtacggagacttcgagcgacatgcagatgtctatggacatggcagtactgtctgctaaacgcacactagcggctcagatcggaaaccgactgtcatcaaagatgaaggagtttgccatgcaggtaggctctaatgatgacaatcaagtcaccaaagaaattgaacgggtaactacgaatgtgattaccgaggtcaatctcgctgggtttactcgtgagaagagtgaactcattccgcagggcaaaggctatagaacttacgttctgcttcgttacccactcggggactctaaccgtatgatcgtggatcagatgaaaaagagtgctgtacttgacgccaagctacgtgcatctgaagcatttaaagagttagaaaaagaaattgagtctgccaaaccagctcgctaaataggtctgaataacttagtgggggattgtcccctgctaaaataaatggttagtttctaaccatgtgaatagcaactgaaagttcagtgtaatgagattctcaatgcccattctcaagcgattattacttgctgccagcatgtgctgtttggtggttggttgcgctaagaattcactcaattacaactcgcagcctgtggacgactcccagttcatacgaccaaaagaattgtttctacctaataatattttggcatattccttgcctctgactgacaaagaacatcgagagaagacttgtagaaattatgaagataattctaggcacgtaaattttaagataagaaaaataaaaactgaatatgaagtccagtctgagaagatgaaattctactcgcagacaccactaaaaacccatatgggaataaagtctgctgaaattgatgaaggtacgcttgttattaatttgaccaataaggatgtgttcgaagaatttgaggctccggtcgtctacgttataaataaaacatactgggaagggcagccctacaatgccgttcttgataatttatttttatttggaatgcctatcttatttcagccggctacggaattctataaattgtttggttgcattgatgaagatattattaggaaggagattgatctaacaaaaggagtaaagacaggaaatactttatggatgaatggaacaaaaaaaaataaaatacaaataaaaggtttcgatcaagactatatttttgaagctccccaaagtactgataaacataattatggagaagttaggattaatttaggtcaggcattggtcgattcagtacttaacggagttacaaagttgacagttatttgtcaaacatgtgagctttcaaatacggatggtcagaatgaattcaaaactctcaaagctagcgttcaattaagttcagactttggagcggctagagtttctgaattggtaaaacttgagagggcagaaagtgagatgcttgctaatcaggaaaatcatcaacttcagcgtcccaactccaataatagagctaaaactcataggcgaattcaaccgccaaaactaaccttcacctcatctgcgccaaatgttgatgggtctgttgagttaagtggtcgtgtaataagcgatgctgttatttcagaagtgtccattaatgggcgcttgctagaggtccctctcactaaagataagtccttcaaagtaacgcgccgtcttccaatgggtgaaatgatttttcgtctgagtgtggttgatgagtttaatcgaagggtagatgccgagattaatgttgaacgtactgtcatccagcattcagaacaggtggcgccgctcaacccacgtaatataaaagggaaatctcatccaaatgcagtcgctctcattattggggttgagtcttatttaagtcttcctccagctcaatatgcagattcagatgcaaatcatttctacgattatgcgaatcaatctttgggtgtgccgcctaataagataaaactactgacagactcaaaggcgagtcgccttgaattattgaaagcaatgagaagctggatgaagactgaggttaatggcaagactgacgtctacatattcttcgcaggtcacggactagccagtcctgatgggagtaaaacctatctgctcccagcagatggagacagagatctactagatgagaccagtattctaagagatgacctcatagcttcagccaaaggagcgaagaccatcaccatgttcttggacacctgctactcaggtggcacacgaacaaatgaagtcttacttgccgatgctagaccaattgccattgtccctgacatgaaggcgttaccttcgaatgtcacagtattagcagcggcttcaggcgctcaattatcttcaacctatgaagctgcccagcaggggctattcagctattggctgatgaaaggacttgaaggagacgcagacactaacaaagataagaagatcaccacaggtgagcttcatgagtacgtggctagacaggtaggaccaatggctcagagacgtaaccgacagcagaatcctcagttgatgggtgacggcacgagggtgttggttagttactagaacaaactgtgtaatggaactttcaatgctcacactcaaccgattattacttgctgtcagtatgagctgcttggtggctactgctaatgcagcgccaattgatgaggcagttgatgcatactacagaggtgactatgcacaagcccttaagatacttagaccgctagcaacacaggggaatgctggagcgcaatacaacattggttttatgtatgccagcggtcagggggttactcaggattataaagaagcagttgagtggttcaggcttgctgcagagcaagggtatgcagcggcgcaatacaacctcggtgttatgtatgccaaaggtcgggggatagccaagaacgatcacgaggcagttaagtggttcaggcttgctgcagagcaagggtatgcagcggcgcaatacaacctcggtgttatgtatgccagcggtcagggggttactcaggattatccagaggttctgaagtggttcaggcttgctgcagagcaagggtatgcaggtgcgcaatacaacctcggtgttatgtatgccgaaggtcaaggagttctacaggattatccagaggctctgaagtggttcaggcttgctgcagcacagggggatgcaagggcgcaatacgacctcggtgttatgtataacgaaggtcaaggagttctacaggattatccagaggctctgaaatggtacaggcttgctgcagcacagaggtatgcaatggcgcaatttaacattggtgtaatgtatcacaacggttatggtgtaaaacggaactatcaagaggctctgaaatggtacaggcttgctgcagcacagggggatgcatcagcgcaaaacaacattggtgtaatgtatcgcaacggttatggtgtaaaacggaactatcaagaggcattgaagtggttcaggcttgctgcagagcaagggattgcacaagcgcaaatcctcattggggtgatgcataactcaggtcagggagtagtcaagaacaatcaagaggcactgaagtggtacaggcttgctgcagatcaggggaaatgcgaaagtaatgtcgcacctgatgtttggggtgctagcgttgacggcagatcaacttctcagattgctgacgtaagtccgacagagggaagtaaaaagtcataaaccgaactagccggtgatggcactcgccctcaagggcggggaaatgcggcaaatcagaaaggttgctgcaaacaaggcgggcgtaaccacttagatgccgaaatccgagtatcgaatgtcattgcgctctatttcgaaattggttttgcaagaagctctactttaagtgtattttttggaatctttaaaaatcacttgacattatcaatatgacggaggaaagttgcttttattaggacatacgcatcctgatagatacattaaaagaagaccacaagtcatataaggtattgtaaatagcgaatcccaagggactgtatctttgaagttaattctctactaactctataggacatgatgaaaatggaaagtatatttgaggaagaggtccagacaacacaaccagacacagagaaattctgggccggcatgtccgacatgatcactgaggaagcggttgaatctgccaccccccaaaaggaagtgtcactcatgcttgaggactcacaccagacagacatcactcagatctatcttaaggagattgggcgcaaccctctattgacccgtgaagaagaagtggacctcacacaaaaggtcaaacaaggggacccggaggcatggcaaaaaatggtcaagtccaacctgagattggttgtgaatatcgctaaaaaatatgtcagtagacaccactcgatcacattgtcggatctaatcgaagagggaaatatagggatgatgcatgcactcgataagtttgaaccggaccgtgggttccgtttttcaacgtatgcgacctggtggattcggcaacatatagaacgggcaatcatgaaccagtcacggaccatacgaatcccggtccatgtcgtcaaggggatgaatatcatcttgagagcatttcgtcaccttgagagacatcttgggagggatcctaaggccgaggacgtagcatatctgctagagatcccggtatgggaagtacgcgaggcgctatcccttaatctaagtacagtctcactcgataccccccttgatatagaccctctgctatcggtcggtgatactgtagttgatgaaaatgaccccaccccggacatgaagtttgaagagttagagattcagcagtgggtgcataagtggatgaggcatttaagtgcgagacagcgcactgtcatggaggggaggtatggcctgaatggtcaggagattcaaacgctcacacaactgagtaaggagctaaaactcactcgagagcgtgtccgtcagattcagatggaggcacttgaaaggttgcataccctagtgaaaagcgatggtgtgtctgcgatggatttactctagcaagagcactgtcgttaggcgggatgcgggataagaatgctgctaaacctgcagctaggagacacaaatgtctgctagaaggatcgagctattactggtggatgatcacccgattacccgtcatggcatacggatggcgatcggtactgtcgatgatattgaggtgacaggcgaagcagtgggtgcgattgaagcgatacacctagttcaggagaatcgatacgacatcgcattgctggatattcagatgccagacattgatggacttgcgctcctaaaattatttcgtgcaagtcacccccatctacccattctgatgttcagcctgtatccggagactacctacggaaaatgggcactcaagtatggggctgccgggtatctcactaaatatagttcgattgatgtcctggtctcggcaattcgcacagtagcgggagggggtaaatattttagcgctgagctgatggaaagatttctcagcatgactgaccctggtgcaatagaagaggtgagtcgacaggggtatatggcgccaccagatgaatcttgacaatctaaagcgcaattgccaactgcccgcggaatgacaaagggcagtattttttagtcaattactgaggagataatatgacccactttatgccgagaatagagtcagtcgatgggtactccacaccaacctctggggctagtcataacaacccactattctatctggatgggaatggttatgtggcctatgcgaatgagggctgctacgacagtctgggttactctaaggatgagctgatctctcatacactcaaggatctagaccttctggttgatccggaacatttcatgaggaaggtcagggagcacctctgtaacgaggtcgcctggttcgagtcggtcgttcgtcataagaacggaacaatacgcccgatcggagtaagcataacggatgctcactatgggaaccgtatgctgctccagtgtcagctatacgacataggggagtactagcagatcgacaccctctgatgacttcaggatggctcatacctgctcgaggggtgaacatgaacttggtccttgcagccatttgatattcttcgatatcccattcatttagcatggacagtctatgctgatagccaggatatgaacaatatgccattagcaccgacccatacagattcctcattaatccgtctgtaccggttcattgcagtctgcaccggatgcgtattagcgatcggcatcgtaactgcagcgccgatcgatgatgcggatacagcctataacagaggtgactacgcacaggcaatcaagctattcagaccgatcgctactaagggggaagtggtcgctcagtataggatgggttcaatgtatgccagtgggcagggggtaggacaggattatcaggcggcactgtattggtatcggttggcagcattccagggggacgtgattgcgcaaaatattctgggatggatgtatatcaagggggatggaatcggtcaggattaccatgaggcgatgcactggtaccgtcttgcggcagatcatggaaatgcagctgcacaatttagtcttggatcgatgtatgccaatggacagggcatagatcaagactatcaagcggctgcaaagtggtacagattggcctcttcacaaggtaatgcaggtgcgcaatttaatctgggttggatgtatgaccatggtcagggtgtctctcgagactatttggaggcgatcaagtggtaccgaatggctgcaacccagggactttctgttgctcagacccagctcggtgtgaagtactccggagggttaggggtggatcaggactatcctgcggcattgaagtggttccgtctggcagcagcacagagggacccggctgggcagtttcatctgggatggatgtacgacagcggtcagggcgtagttcaggactatcaggaggctatacactggtacaacctatctgcagagcagggatatggtcctgccataagcattcttgagagaccttccatgatctcctcggcactgaagatcgctgccatgcaggcccatcctcagtacccacagagacctcttaattcagctctgaacgcgagtaaagggatggagagatccatagtcccgtggttgatcttcgagtcatcctctctacaccctgacggatcgatcgatctgagcgggaggataaccagcactgccaatatcacccaagtgatgatcaatgggcgtgatctggaggttcccctctcgagggatggatccttcagggtgacccgtattcccccactgggggtgacaagctactggctaagcgtattagatgagtacggacagagggccgatgctgaggtgagttttgaaagaaaaacgatccaccagatgaaggatatcgagccactcgaaccgcacaagatgaaggccaaagtgaagcctgatgcggtggcccttatcgttggtatcgagtcttacgcgaacctccctcaggctcaatatgcaaactcggatgcaagccatttctatcattatgcccaccacgcactcggtgttccgaccaacagaatcaagttattaaccgattcacaggcaggccgtgccgagctattgaaggcgatgcgatcctggatgagggctgaaattgttggcgggagatcggatgtttatatcttctttgcggggcacggtctatctagcagagatggatccaagacctatcttttgcctacagatggggacccgagcctgttagatgagaccagtatcctacgagatgacttaatcgcatctgccaagggtgctcagacgatcaccctatttctggatacatgctactcaggggtcacacgaacgaatgagctcttgataacggatgctaggccgattgtcattgccccaaatgagaacggcctcccggccaatgtcacattactggccgctgcaacagggtcgcaaatatcttcatcctatgagggtgctcagcagggtctttttagctactggctgatgaagggtcttgagggggctgctgagtcgaatgctgatcacatgatcaccgcgggtgaactgaatgagtatgtttcaaaaagagtcatgctgatagcggcacgacgaaaccgtcagcaggatcctcaattgattggggataaagatcgggtattggtgagttactaaatggatttattggtcattcacgataagttaccgtccccactcaaaaagaggctccttctcagtaatgctgtcctgacactactaatgtcaggacttttgacggtggtgaacccatcccatgcagagtctgtgaccgctcgtggggagtatctctacgggcccgagacctctgaggcagatgcatgcaggctagcagaggagagagctaaggcgagtgctctgggaagcgtgttcggtgagagtatctcgatggaggaacaagtctcctgccgtgagactcggggcagccggtcagactataactgcgagatgaaccgcgtttcatggtcatccattgagggcgagatcagggccgttacgattaaccagagatcgaccgagtccagggtcggcgctagggcatgtcttgtgacgatcactgcggatatcgtgatgccggaccgcaggtcagactcaaactttgatcttaaggtcagtatcaatgggaagatgtaccgagagggcgaatctctgaccattcaacttgaacccacggtaccgatgcatgtcgccatctttaactgggccccttacctgggtaaggatgtcgtgacccggatctttccaaattcaatggaccttcaaaattacattacccaaaaggtcgatatcccgacaggggagagggctacaccgtattcttttaaattgacctggttggacacactccccaagaacagaagctttgtggatgagtacctgatcgtgatcgggacaaagtctcccatcacatgataaagttgcccaggcaattgcaaaagtaaaagaagctactgatgaaaactcggcactttctcaggagaagtttgctgatgaccttgcaattacaagcatggcaagactatgggacgtaggtcgttcagaaccgataaaagtaggcaaagcaagtcctactgagggaactcttcctggagctgtctacttcatactaaaatatgaaaacgaggaagatgggctaaaaaaagcactacaagcaaatacgatggtcggtggggacaatgcttcaaggggaattgctgtcggtatggttcttggtgcatacaaaggcgtaaatgcgattccattagagtggagagagaccttggatgaatgggattattgtgaagagatgctaagcaggcttccgttacttaaataaaaaagcaaaatagccgacccataagtaaactacgttgtaacaggcgttactacgatgatggccgcatcagtgggaaaggggttatgttaccgcgtcgatatcgacaatatctgcagacattgctggacctgacaatcccaatgctccagccactactactgcgcttataagaggttataacaaatctgtctttcattattttttaccaatggtggcaattgtgatccatgaccataggaccaatgccaatgccaaccccagtaccagaggaattagcataatccaaagtagtatctcaacgaatagattcatctctggttacacaccactttttcatatatttctccatatggttaatgagtaattatgataatttcatcagcggcgagagttaacgtaaatagtagcgatactgatatagcttggtgccgtgattttgaatataagttcaagtttcttgatggttagaaattgacatcaaggtatgggcgcaagttttctgaggttgagtccgtaaactgctgtaaatagatttaacttggtagctaccgcttcaatccaatcctacatcccaccataaaaagttttcttgttccgatctggtatgaaactgaaaaaactggagtgggcgcacattatgtaagttccgatcaagacgcagagctct

SEQ ID NO: 27 - DNA, 23961 bp, Artificial Sequence
  Synthetic Oligonucleotide
  misc_feature (1)..(6574): n is a, c, g, or t
nnnnnnnnnnnnnnnnnnnnnnnnnnnnnnnnnnnnnnnnnnnnnnnnnnnnnnnnnnnnnnnnnnnnnnnnnnnnnnnnnnnnnnnnnnnnnnnnnnnnnnnnnnnnnnnnnnnnnnnnnnnnnnnnnnnnnnnnnnnnnnnnnnnnnnnnnnnnnnnnnnnnnnnnnnnnnnnnnnnnnnnnnnnnnnnnnnnnnnnnnnnnnnnnnnnnnnnnnnnnnnnnnnnnnnnnnnnnnnnnnnnnnnnnnnnnnnnnnnnnnnnnnnnnnnnnnnnnnnnnnnnnnnnnnnnnnnnnnnnnnnnnnnnnnnnnnnnnnnnnnnnnnnnnnnnnnnnnnnnnnnnnnnnnnnnnnnnnnnnnnnnnnnnnnnnnnnnnnnnnnnnnnnnnnnnnnnnnnnnnnnnnnnnnnnnnnnnnnnnnnnnnnnnnnnnnnnnnnnnnnnnnnnnnnnnnnnnnnnnnnnnnnnnnnnnnnnnnnnnnnnnnnnnnnnnnnnnnnnnnnnnnnnnnnnnnnnnnnnnnnnnnnnnnnnnnnnnnnnnnnnnnnnnnnnnnnnnnnnnnnnnnnnnnnnnnnnnnnnnnnnnnnnnnnnnnnnnnnnnnnnnnnnnnnnnnnnnnnnnnnnnnnnnnnnnnnnnnnnnnnnnnnnnnnnnnnnnnnnnnnnnnnnnnnnnnnnnnnnnnnnnnnnnnnnnnnnnnnnnnnnnnnnnnnnnnnnnnnnnnnnnnnnnnnnnnnnnnnnnnnnnnnnnnnnnnnnnnnnnnnnnnnnnnnnnnnnnnnnnnnnnnnnnnnnnnnnnnnnnnnnnnnnnnnnnnnnnnnnnnnnnnnnnnnnnnnnnnnnnnnnnnnnnnnnnnnnnnnnnnnnnnnnnnnnnnnnnnnnnnnnnnnnnnnnnnnnnnnnnnnnnnnnnnnnnnnnnnnnnnnnnnnnnnnnnnnnnnnnnnnnnnnnnnnnnnnnnnnnnnnnnnnnnnnnnnnnnnnnnnnnnnnnnnnnnnnnnnnnnnnnnnnnnnnnnnnnnnnnnnnnnnnnnnnnnnnnnnnnnnnnnnnnnnnnnnnnnnnnnnnnnnnnnnnnnnnnnnnnnnnnnnnnnnnnnnnnnnnnnnnnnnnnnnnnnnnnnnnnnnnnnnnnnnnnnnnnnnnnnnnnnnnnnnnnnnnnnnnnnnnnnnnnnnnnnnnnnnnnnnnnnnnnnnnnnnnnnnnnnnnnnnnnnnnnnnnnnnnnnnnnnnnnnnnnnnnnnnnnnnnnnnnnnnnnnnnnnnnnnnnnnnnnnnnnnnnnnnnnnnnnnnnnnnnnnnnnnnnnnnnnnnnnnnnnnnnnnnnnnnnnnnnnnnnnnnnnnnnnnnnnnnnnnnnnnnnnnnnnnnnnnnnnnnnnnnnnnnnnnnnnnnnnnnnnnnnnnnnnnnnnnnnnnnnnnnnnnnnnnnnnnnnnnnnnnnnnnnnnnnnnnnnnnnnnnnnnnnnnnnnnnnnnnnnnnnnnnnnnnnnnnnnnnnnnnnnnnnnnnnnnnnnnnnnnnnnnnnnnnnnnnnnnnnnnnnnnnnnnnnnnnnnnnnnnnnnnnnnnnnnnnnnnnnnnnnnnnnnnnnnnnnnnnnnnnnnnnnnnnnnnnnnnnnnnnnnnnnnnnnnnnnnnnnnnnnnnnnnnnnnnnnnnnnnnnnnnnnnnnnnnnnnnnnnnnnnnnnnnnnnnnnnnnnnnnnnnnnnnnnnnnnnnnnnnnnnnnnnnnnnnnnnnnnnnnnnnnnnnnnnnnnnnnnnnnnnnnnnnnnnnnnnnnnnnnnnnnnnnnnnnnnnnnnnnnnnnnnnnnnnnnnnnnnnnnnnnnnnnnnnnnnnnnnnnnnnnnnnnnnnnnnnnnnnnnnnnnnnnnnnnnnnnnnnnnnnnnnnnnnnnnnnnnnnnnnnnnnnnnnnnnnnnnnnnnnnnnnnnnnnnnnnnnnnnnnnnnnnnnnnnnnnnnnnnnnnnnnnnnnnnnnnnnnnnnnnnnnnnnnnnnnnnnnnnnnnnnnnnnnnnnnnnnnnnnnnnnnnnnnnnnnnnnnnnnnnnnnnnnnnnnnnnnnnnnnnnnnnnnnnnnnnnnnnnnnnnnnnnnnnnnnnnnnnnnnnnnnnnnnnnnnnnnnnnnnnnnnnnnnnnnnnnnnnnnnnnnnnnnnnnnnnnnnnnnnnnnnnnnnnnnnnnnnnnnnnnnnnnnnnnnnnnnnnnnnnnnnnnnnnnnnnnnnnnnnnnnnnnnnnnnnnnnnnnnnnnnnnnnnnnnnnnnnnnnnnnnnnnnnnnnnnnnnnnnnnnnnnnnnnnnnnnnnnnnnnnnnnnnnnnnnnnnnnnnnnnnnnnnnnnnnnnnnnnnnnnnnnnnnnnnnnnnnnnnnnnnnnnnnnnnnnnnnnnnnnnnnnnnnnnnnnnnnnnnnnnnnnnnnnnnnnnnnnnnnnnnnnnnnnnnnnnnnnnnnnnnnnnnnnnnnnnnnnnnnnnnnnnnnnnnnnnnnnnnnnnnnnnnnnnnnnnnnnnnnnnnnnnnnnnnnnnnnnnnnnnnnnnnnnnnnnnnnnnnnnnnnnnnnnnnnnnnnnnnnnnnnnnnnnnnnnnnnnnnnnnnnnnnnnnnnnnnnnnnnnnnnnnnnnnnnnnnnnnnnnnnnnnnnnnnnnnnnnnnnnnnnnnnnnnnnnnnnnnnnnnnnnnnnnnnnnnnnnnnnnnnnnnnnnnnnnnnnnnnnnnnnnnnnnnnnnnnnnnnnnnnnnnnnnnnnnnnnnnnnnnnnnnnnnnnnnnnnnnnnnnnnnnnnnnnnnnnnnnnnnnnnnnnnnnnnnnnnnnnnnnnnnnnnnnnnnnnnnnnnnnnnnnnnnnnnnnnnnnnnnnnnnnnnnnnnnnnnnnnnnnnnnnnnnnnnnnnnnnnnnnnnnnnnnnnnnnnnnnnnnnnnnnnnnnnnnnnnnnnnnnnnnnnnnnnnnnnnnnnnnnnnnnnnnnnnnnnnnnnnnnnnnnnnnnnnnnnnnnnnnnnnnnnnnnnnnnnnnnnnnnnnnnnnnnnnnnnnnnnnnnnnnnnnnnnnnnnnnnnnnnnnnnnnnnnnnnnnnnnnnnnnnnnnnnnnnnnnnnnnnnnnnnnnnnnnnnnnnnnnnnnnnnnnnnnnnnnnnnnnnnnnnnnnnnnnnnnnnnnnnnnnnnnnnnnnnnnnnnnnnnnnnnnnnnnnnnnnnnnnnnnnnnnnnnnnnnnnnnnnnnnnnnnnnnnnnnnnnnnnnnnnnnnnnnnnnnnnnnnnnnnnnnnnnnnnnnnnnnnnnnnnnnnnnnnnnnnnnnnnnnnnnnnnnnnnnnnnnnnnnnnnnnnnnnnnnnnnnnnnnnnnnnnnnnnnnnnnnnnnnnnnnnnnnnnnnnnnnnnnnnnnnnnnnnnnnnnnnnnnnnnnnnnnnnnnnnnnnnnnnnnnnnnnnnnnnnnnnnnnnnnnnnnnnnnnnnnnnnnnnnnnnnnnnnnnnnnnnnnnnnnnnnnnnnnnnnnnnnnnnnnnnnnnnnnnnnnnnnnnnnnnnnnnnnnnnnnnnnnnnnnnnnnnnnnnnnnnnnnnnnnnnnnnnnnnnnnnnnnnnnnnnnnnnnnnnnnnnnnnnnnnnnnnnnnnnnnnnnnnnnnnnnnnnnnnnnnnnnnnnnnnnnnnnnnnnnnnnnnnnnnnnnnnnnnnnnnnnnnnnnnnnnnnnnnnnnnnnnnnnnnnnnnnnnnnnnnnnnnnnnnnnnnnnnnnnnnnnnnnnnnnnnnnnnnnnnnnnnnnnnnnnnnnnnnnnnnnnnnnnnnnnnnnnnnnnnnnnnnnnnnnnnnnnnnnnnnnnnnnnnnnnnnnnnnnnnnnnnnnnnnnnnnnnnnnnnnnnnnnnnnnnnnnnnnnnnnnnnnnnnnnnnnnnnnnnnnnnnnnnnnnnnnnnnnnnnnnnnnnnnnnnnnnnnnnnnnnnnnnnnnnnnnnnnnnnnnnnnnnnnnnnnnnnnnnnnnnnnnnnnnnnnnnnnnnnnnnnnnnnnnnnnnnnnnnnnnnnnnnnnnnnnnnnnnnnnnnnnnnnnnnnnnnnnnnnnnnnnnnnnnnnnnnnnnnnnnnnnnnnnnnnnnnnnnnnnnnnnnnnnnnnnnnnnnnnnnnnnnnnnnnnnnnnnnnnnnnnnnnnnnnnnnnnnnnnnnnnnnnnnnnnnnnnnnnnnnnnnnnnnnnnnnnnnnnnnnnnnnnnnnnnnnnnnnnnnnnnnnnnnnnnnnnnnnnnnnnnnnnnnnnnnnnnnnnnnnnnnnnnnnnnnnnnnnnnnnnnnnnnnnnnnnnnnnnnnnnnnnnnnnnnnnnnnnnnnnnnnnnnnnnnnnnnnnnnnnnnnnnnnnnnnnnnnnnnnnnnnnnnnnnnnnnnnnnnnnnnnnnnnnnnnnnnnnnnnnnnnnnnnnnnnnnnnnnnnnnnnnnnnnnnnnnnnnnnnnnnnnnnnnnnnnnnnnnnnnnnnnnnnnnnnnnnnnnnnnnnnnnnnnnnnnnnnnnnnnnnnnnnnnnnnnnnnnnnnnnnnnnnnnnnnnnnnnnnnnnnnnnnnnnnnnnnnnnnnnnnnnnnnnnnnnnnnnnnnnnnnnnnnnnnnnnnnnnnnnnnnnnnnnnnnnnnnnnnnnnnnnnnnnnnnnnnnnnnnnnnnnnnnnnnnnnnnnnnnnnnnnnnnnnnnnnnnnnnnnnnnnnnnnnnnnnnnnnnnnnnnnnnnnnnnnnnnnnnnnnnnnnnnnnnnnnnnnnnnnnnnnnnnnnnnnnnnnnnnnnnnnnnnnnnnnnnnnnnnnnnnnnnnnnnnnnnnnnnnnnnnnnnnnnnnnnnnnnnnnnnnnnnnnnnnnnnnnnnnnnnnnnnnnnnnnnnnnnnnnnnnnnnnnnnnnnnnnnnnnnnnnnnnnnnnnnnnnnnnnnnnnnnnnnnnnnnnnnnnnnnnnnnnnnnnnnnnnnnnnnnnnnnnnnnnnnnnnnnnnnnnnnnnnnnnnnnnnnnnnnnnnnnnnnnnnnnnnnnnnnnnnnnnnnnnnnnnnnnnnnnnnnnnnnnnnnnnnnnnnnnnnnnnnnnnnnnnnnnnnnnnnnnnnnnnnnnnnnnnnnnnnnnnnnnnnnnnnnnnnnnnnnnnnnnnnnnnnnnnnnnnnnnnnnnnnnnnnnnnnnnnnnnnnnnnnnnnnnnnnnnnnnnnnnnnnnnnnnnnnnnnnnnnnnnnnnnnnnnnnnnnnnnnnnnnnnnnnnnnnnnnnnnnnnnnnnnnnnnnnnnnnnnnnnnnnnnnnnnnnnnnnnnnnnnnnnnnnnnnnnnnnnnnnnnnnnnnnnnnnnnnnnnnnnnnnnnnnnnnnnnnnnnnnnnnnnnnnnnnnnnnnnnnnnnnnnnnnnnnnnnnnnnnnnnnnnnnnnnnnnnnnnnnnnnnnnnnnnnnnnnnnnnnnnnnnnnnnnnnnnnnnnnnnnnnnnnnnnnnnnnnnnnnnnnnnnnnnnnnnnnnnnnnnnnnnnnnnnnnnnnnnnnnnnnnnnnnnnnnnnnnnnnnnnnnnnnnnnnnnnnnnnnnnnnnnnnnnnnnnnnnnnnnnnnnnnnnnnnnnnnnnnnnnnnnnnnnnnnnnnnnnnnnnnnnnnnnnnnnnnnnnnnnnnnnnnnnnnnnnnnnnnnnnnnnnnnnnnnnnnnnnnnnnnnnnnnnnnnnnnnnnnnnnnnnnnnnnnnnnnnnnnnnnnnnnnnnnnnnnnnnnnnnnnnnnnnnnnnnnnnnnnnnnnnnnnnnnnnnnnnnnnnnnnnnnnnnnnnnnnnnnnnnnnnnnnnnnnnnnnnnnnnnnnnnnnnnnnnnnnnnnnnnnnnnnnnnnnnnnnnnnnnnnnnnnnnnnnnnnnnnnnnnnnnnnnnnnnnnnnnnnnnnnnnnnnnnnnnnnnnnnnnnnnnnnnnnnnnnnnnnnnnnnnnnnnnnnnnnnnnnnnnnnnnnnnnnnnnnnnnnnnnnnnnnnnnnnnnnnnnnnnnnnnnnnnnnnnnnnnnnnnnnnnnnnnnnnnnnnnnnnnnnnnnnnnnnnnnnnnnnnnnnnnnnnnnnnnnnnnnnnnnnnnnnnnnnnnnnnnnnnnnnnnnnnnnnnnnnnnnnnnnnnnnnnnnnnnnnnnnnnnnnnnnnnnnnnnnnnnnnnnnnnnnnnnnnnnnnnnnnnnnnnnnnnnnnnnnnnnnnnnnnnnnnnnnnnnnnnnnnnnnnnnnnnnnnnnnnnnnnnnnnnnnnnnnnnnnnnnnnnnnnnnnnnnnnnnnnnnnnnnnnnnnnnnnnnnnnnnnnnnnnnnnnnnnnnnnnnnnnnnnnnnnnnnnnnnnnnnnnnnnnnnnnnnnnnnnnnnnnnnnnnnnnnnnnnnnnnnnnnnnnnnnnnnnnnnnnnnnnnnnnnnnnnnnnnnnnnnnnnnnnnnnnnnnnnnnnnnnnnnnnnnnnnnnnnnnnnnnnnnnnnnnnnnnnnnnnnnnnnnnnnnnnnnnnnnnnnnnnnnnnnnnnnnnnnnnnnnnnnnnnnnnnnnnnnnnnnnnnnnnnnnnnnnnnnnnnnnnnnnnnnnnnnnnnnnnnnnnnnnnnnnnnnnnnnnnnnnnnnnnnnnnnnnnnnnnnnnnnnnnnnnnnnnnnnnnnnnnnnnnnaggccaacccatgcacgccacgcaccagcgcgagccgcgggtgcgaaagagagcgagggccggcgttgcatggtgtagatccagtggccggcgtgcagacgcgctgcacacaaaacatgattgtaatacttgggcaggcaataaaaaaacccggaaaatttgcaccatccagacagaaggcaaacacttcttccggagtacggccgtgcatgcgtaccgttttttctagcacggccatcacatcacctcatccaatttgtttattgctgccgcaccgaacggtgccgcgtagcgcgcccagtgagttggggctagggctctatcgaaactgcgcagataagagactacatcaaaagtattaattcctatagactgataaatcaagtccctgcttagctgtttttcacaacgaggtgccagtccatggatcacacaatcacaaaaccagcgcgcgtcgaaggctacgccgtccaccgtatggtcgccgctttggtagacgacgcacccgcgctgcatctcgatgccggcgacaccctaaccattcgcaccgatgcgcccctgcccagtgggcatattgtgggcttctcgttgcgtgcctgtgtctctgtcaagaacaaggggcggcaccgctatttccccagtgctgactggcgctctcgccacagttggctcgagcgaaaaggcgtacagcatggcttcgaagtcatcaccgtgcattgctctgccaaacacttggtcatcgaaaaacaatcacaatctggccaattcagtgttgatgacaccttgtttacgggtgtcctcaaagttgtcgattacgacaagtacaacgccgcgctgctatcgggcatcggcaacacggcacgcgccttcgggttcggcatgttagttatttaatcttcaccaagggaaaccatgccaaagcaaaccatcgttatcgacaccgttatcaccacacaaggcccgctgtctatcgccatgcccgtcgcacagggcacacgggcaaacgactacaacaactttccattgatggcccgtgggcaggatgaactgggcgccgtattgcaaacagcctacctgcccgctagtacggtgcgtgggttccttcgccgtgcggctggcattgccgcgatggaaaagcgcggcgtaggcaacaccacattgcagcaagcgtattccgatattttggggcagtctaaagacgccaaagaaacggtggacttggtccagctgtctgccatacgcgaggcagaccccatactcgacctctttggttcgtggtctatcaagtcgcgcttactggtgagtaacttcttgcccacaaccaacgtgttgccacaggccatcacgggtgtcagaaaagacttagaagacaccgaaggcgtgttgaccctcttgagtgagaccgaccaacaggcctattacaaccgcagtgacatcaacagccagcgcgcagccgctgacgcagtcgtcaagggcctcactcgtgacatcagaaaagccaaaaaagacggcaacgcactcactgacctagaggcggcgcttgtgatcgccgacgcgaaggccgtggccttaaaaacggatatgggcgagatggcgaactcatcacgcaccatcaccgagttttttgccttgcccgctaacatggccttgcacggacgcatcgtggttgagcaagccaaggagcgtgaccttgcattgatcgtggaggcgctagacaccctgtctattcgccccatgttgggcgcccaagtagcgcgcggctgtggcgaggtggcggggcagttcaccatcaaggtggatggcatcgtggtcaagacagtcaccacgggcggctgggtgcctgcgcaggtcgaagacttctcgtctgatgcgcctgcaccagccgctgtctaattgcacgtggaccagttacgaatcaccgcccacctcagcggcccccttgtgacggggggcggctacctcacctttgatgcgttgctcgcctctgccacttacagcttgacgcaagacattgagcaggcccacaaccagctgccacttaaacaagttgccggcctgtaccacgccagcgccgccatttatgaacccgttgccatcggggcattggctattgtgcaagccatgcgtcccgacgacctgtggcttgaccaccagtggttaaagaagaacaagcgcggcgctgtgcacaccaagttcgacaacctatccgacaacatactgaccacctacaagaccatagcggcaccgaccatgacctggtactgcgaaggtgatgcagaccgcattcgtgtcttactagcgcatctacccctcattggtaaaaagcgggtttgctccgtgacccagtggaccgttgaggcgggcgagcttgacggtctgcatggctatgccgatgagccactgcggcctgtacccgttgagctgtgggatggtgacaagagcagccccatcgtggacgcggcatggcgtcccgcttattgggatgcgactgggcgcaccgcttgttttgtgaactgagggcacaccatgacgacgcttgaatttttaatcagtacttcggtcgccacctcgttgcgcaaaccggtgatgcgcaggccgatgcaacgcgcacgctgtcgtctggccacaaaatggccaagggtggcacagcacaacgcattgcatcgggttgggcggtgatctcagaagatgtcagcacgcttcaattcaagctggcggccaccggcttaagttacggcggacagacgcgttacgaggcttggctagatgcgcttgaggcatttagcggcaagcccatcatgcttattgagtttgataagaagcctgtaccagttaccaacctgtttcgtacgcatgatttacgagcggtacaggtgtgttcgcccggcggggcggcgctatttgactttacgcaagaacccaccgctgagagtggtaaagcgcacaaagtgctgtgggaattaaaactagaaaggctaaaaagcgctgttgaatcaagcgcttgagccacatgagatcaagccaccctctaaatgggtggttactagaacaacgcaggtgtgaatccaacatgtccgccggatcaagccaccctctaaatgggtggttactagaaccgcgcaggtggttgattaaccgagcctaccgatcaagccaccctctaaatgggtggttactagaactcaccggtcagccactcgtttgttttgcggatcaagccaccgtctaaatgggtggttactagaacatcttgtggctcgacacagcgcttttcagcagatcaagccaccctctaaatgggtggttactagaactacagagccaccacatcgcgcaacgcattcggatcaagccaccctctaaatgggtggttacttatttacagacataccatgggccgccgtgcccttattaggagttcaccgatgtttcgttcctcagagcagcagcatttctgcaatgtgcttattaagcatttgaaacgcgtcgatgcgcccatattgctggaaggcggggtgggtcttgggaagacgcgtgcctacctggccgcactggcaactacgacgcaaacggttgccattgtgttacccacacaccaactgattgaccagttgctggctagcgctgacttgtcagccgttgccttgccattggccgtgttcaggccagccagtcggtttgacacacgggaggcgtaccaagcgcagcgagaggcggcccgtgctgcgcgtgtcatgctctgcaccgctgcaagcgtgattattgaccaacgccttgcgggggcttacaacggcgcaacacagcgtgatgtggtgttatttgatgaagccgaccagttacccgatatggcggcattgcagagcgactttgtgattgaggcggcgctactgcagggccagccgctgcacgcggccttagagcgcataagcaccacccgttcacagtcggttgaggccgagcaaaaggctgctgcgcgggtcatgcttgagatattggccgaaccggtgggctacgcatccgtcgggcttgatgatgatggcaatgcgcggctacaccacgccctgccaggtcgcttattaaagaaaattagcaatcgcggtagcacggtgtttctttctgcaacgctgacccacaacgataagtttgatgacttcaagatcgccatgggcctagacgcggtgagtagcctgtcaacaagcattgagccagaacagcatggcacgctcgacttcaccgtacacgcgcacgaggtggacacgcctgactggtttgcggccaccgttcagtgcatacaaagcgcgcagcgccccacgttggtggtcacacctagccatgaccgcacagagcggctacaacccgccgtgggtgagcaagcagacttgcttatacgtgcgggtgcatgggcgggtcttgacacgccaacgcgctggcgtaccgtggttattccgcgcgtgccatttggcgcaccagtcattgttgacggggtggcggtcacgtcttacttggccgccaaggtgacggccagtcggcggatgcgccaagcaattggccgtgggcttagaacacctgaggcggtgtgcacggttgtggttttggatgcgcgggcacacaacttaggtcgctttgtgccagagcgttttgcggcagattggtcgtctcggcaagtgtttgaggagggtgcccgccatgcggtggtgctgtccaaagcggagcgcgaccccgctttggccaaagccgcgctcagacactacggcgctcaatgccaacaagcgggttgttccgtgacagaggcgtgtcagctggacgtgcaccaccttgaccccgtaagcgaaggcgtgcgccgcacaaccttgaaggatgtgaccgtgctgtgtgcaaaccaccaccgacaggcccaccacgacatgaaaatggggctgaacgtgtcgtagcgcaacaaaaaacccgccatacctttgggtacgcgggttttgggagttctggcaaggcctgaaacctaaatgtggtggtgataggtggacttgaaccaccgaccccagcattatgaatgctgtgctctaaccaactgagctatatcaccgagcctgaaattatagccaaaattctcagggctttggcttgccgccaaaagtttttgttagccattttgtcgcgcccgtacgacgcgccaagcccttggttattggtgtttgaaggcgggtttgcgcttgtttatgaacgcatccatgccctctttttggtcttcggttgcaaacagcgcgtggaacagacggcgctcaaaacgcacgccttcgctgaggctgccttcaaacgcttggttcaccgcttcctttgccgccatgacactggggagggagtagttgcaaatcatcagggctgcgcccaaggcctcggtcatgagttggtcatcggcgaccacgcggctcaccagtccgccgcgctcggcttctgcagcgtccatcatgcggcctgtgagggccatgtccatggccttggctttgccaacggcgcgtggcaggcgctgcgtgccacctgcgccagggataacgcccaacttgatttcgggttggccaaatttggcgctctcgctggcaatgatgacgtcgcacatcatggccaattcacagccgccgccgagggcaaagccgctgacggcggcaataacgggcttgcgaacgctgcgaatggtttcccagttgcgcgtgatgtagtctgacttgtagacgtcagcaaaggtgtaggtcgccatagcgccaatgtcggcacccgcggcaaaggctttttcactgcctgtgagcacaatgcagccaatgtccgggtcggcgtcgaatgcggttagcgccgcgccaagctcgtccattagcgcactgttgagggcattgagttgtttggggcggtttagggtgagtatgcccacgcggccttcggtgcggattaaaaccagttgctcactcatgtctgtgttctccaatgtggtgcgaaaagttgcttagaaaaagttgtttcgaaagttgcttcgacgtaagcggttgatcatagccaagcggtgagcttgctagggtctttcaccaccagttcggcgatctggttggcgtgggtcgatggccagatgagggggcacgacaacatgcggccatcgcgcgcgacaccggcaaccaatgggtgctgggctacgtcggcgtggcgtctcgcaatgttctccacatcgctcagtgactttacccgccattgatcggtgccatcaaatagtgtcacccattcgtcacccgccgccatgcccgcttgttcgcctgcaccgcctcttgccacgtgggtgatgcggatgccgtctcgctcaacgacacgcatgcccaagcgctgggcgagggtgccgctcttggccgccacggcgacaccgtaatgactaagcagtgcgtgtaccggcaggtcttcggtgctgtgtacccagtgcgcgagctgtgtggcgacgttggcgtgcccttgctggttgagcagggcgtagatgtcggcctcactgatggtgccgcctttgcttttgacccataggccgcgcatgagggtgtcgagatcgccgccttgttggcgcagcatgaggtcggtgcacagcgctattagcgcccctttggtgtagtagctaacggtggcgttgggcgtgttttcgccaatgcggtagtacttgacccacgcgtcatagctagactgggcaacgctttgcagatgccgccctggggtggccgcaacgtggttaatggatttggccagcagcgtgagataggtgggcgtatcaatgagtttggcgcgttgcagaaacaggtcatcgtagtagctggtaaagccttcaaagaaccacagcagctcggtgtagttctcttggttgaagtcgatgcttgcaaactcggatgggcgcaggcgcttgacgttccatgtgtgaaagtactcatggctaatgaggccaagtaattggttgtagccagcgccttgtgcatgggggggcgctgcctcgccagcgacggccgttaggggcaagtcggcacgctggcaaatgagtgcggtgctggcgatgtgctctagcccgccgtagccgttttcagtggcgtgaagcatgaagacgtagcggtcaaagggtagttggcgttgcggttgtttgccgtgccaaaacgtgatctctgtttcgcaaattcggcgggtgtcggcaactaattttttgacatcaaacccgggcgcggtgtggttgccaatgcccgtgacaacgagttcatgcggtacgccagagaccttaaaccggctgacgtaaaaatcacccaaggtaaagggactgtcggcgagctcgccgcagttgcgggcggtgtagcgcccgaagccacgcgcgtcgatttgccgcgcgggcaatgcggtagacagccgccacgcattgaacgcgggcgcggtggggcgctcgacggagatggtttgtatctcgtcttcgcccccgaccacttgcaaacacaggctggtggggttaaagaagccgcgggtgttgtccaaaaaggcggttcgcaccgaggcgtcaaaggcgtagatttggtaattgagctccagcgggcgtttgccgtcggattccactagccactcatttttactgcactgcgtgatttggcaaggcgtgcggccttgcttggctgtgagcgcttgcaggtgttgcgaaaattcacgcaccaaataactacccgcaatccaaacgggtagacgcaggcgctgttgcttttttgggcttgagatgcgcagatgcacaccgaacaggtgcgcttccgcgctgtcaacgcgaatgttgtgatcgatgcgcatggtgttacttgatggcggccagacgcttctcaacttcggcggcagaaatggcgccggggacacgtgtgccgtctgagaagaaaagggcaggcgtgcccgagatacggtgcttttgaccaaacgcgatgttgcggtcaagcgcgctggtgtcgcagctgatggcggcggcgctggtggttagagggacttcattcaccatccagtcttcaaaggctacgccggggtttttgtcgcaccaaatggccttggacttgagcgttgaatccgcgccgagtatggggtacaaaaagatatgcagggtgatgttgtcgacattcatcatgtcacgttcaaagcgcttgcagaagccacagttggggtcttcaaaaaccgcgagttgacgcttgccgttaccgcgtttgatggtgaaggcatctttaaagggcagggcctcaaagggtattgcgctcaatttatcgaggcgctcctgcgtcaggttgcgtttgcccttgaggtcaacgagtacgccttgcagcaaaaattcaccgttggcatcggtgtacaaaatttcggtttcaccaaagcgaacttcgtagaggccggccatgggggtcttggtgacgctgttgatagcgggtaagttgggtagttgcttgggtagcatctcgcgaatcttggcttcctgtgcccagcccatgcttgccatgagagtgaatgcgatgcccacggccaagccgcgcaataaagagcgtgtgggggtgggtgcgagaggtgacgtgtggtgaagcatggtgtggttcgctaggtaggcgttgtttgggggtaagagggtgggtgggttggttcgtgggagggggctgttgggtagcggatgctcgctgttggagcaccatcgtggcaatcagttccccatgccaacacgctgtacccacgacttgagtgggcccatggcattaaagcccgacatgcctgcattgcgtagccaactggcggcggggttgcggcccaaggggttgttgaacaagtgaaagagtccgtgcgtgacccattgcatgggttcggtggcggcgcgtcgacgccgttggtagcgctgaagcacgcgtgaggcacccggagactcacctcgggcgcgtgccgcaacgcagtcactgagcgtttgtacgtcggccaagccaaggttgagaccttgccctgcgagggggtggatggtgtgcgccgcatcgccggctaacgcggtctgctgggcaacccattgcgtggttaagccgacgctcaaggggaaggcaacaggcccgctggtaagggagaggtgccctagcgcgccctgactggcttgggtgagttggtcttctagggcggcggtttgggcggtggtctccatgtccagccacgtctggtgcgcagcgtctggtagcgaccagacaacggccaggtcgtgcccgtcagcgccgcccatgggcagcagggccaaaatatgtgtgccgttaaaccactggtgggcgacgccgccgtggctgtgctcggcgcgcatgcgcaacgccaaggcacggtgggggtagtgcttacttaccatgtcaatacccaaggcggtgcgcgcgataccgctcttgccttcgcaaatgatggtcaatgcgctaggcggtgtctgggctgatggtgacgcgtggtcgtcaaattgcacgcgtgcatggcgtgtgacggcttcggcaagatggtcctctaggacaggcacatcgaccatccacgccaagggctgcgcttgctgtgggggtgcgtcgaattgcagcgcgcctgacgcatcgccaaacacccgcatatgggtcatgggggtcagccacgcggcctgatcgtcttgaggccagacaccgcatgctttgagggtgtctctcgaggtgtggttgatggcgtaggcgcgaatgtcgcgggtgtgcggttgcgcttggggcgcgggcaggctgacggaaaagccttgctctgccaataacaatgccgccgcgtgcgcggtgatgccagcgcctaaaacggtgatgtgccctgattgagtcatggcgttattctattgggacacccacttggggggccagcgatgaccctgccccggaagtgccttaaactctgggtcttgctttttgaggattgtcatgagtttgaaatgcggcatcgttggtctgcccaacgtcggtaaatctaccctgtttaatgcgcttaccaaggctggtatcgccgctgagaactaccctttttgcaccatcgagcccaacgttggcgtggtggaggtgcccgacacccgcctagcgcagctcagcgatatcgtgacgcctgagcgcattgttcctgcgattgttgaatttgtggatatagccggcttggtggcgggtgccagtacgggcgagggcttgggtaacaagtttttggcccatatccgcgaaaccgatgccacggttaacgttgtgcgttgttttgaagatgacaacgtggtgcacgtcgcgggcaaggtggatccgatttctgacattgaggtgattcaaacggagttgtgccttgccgacttaggcgcagtagagaaagccctgcaccgggtctccaagaccgcgcgttctggcgacaaagagtcggtgcgcttggtgtcgattttggagcgctgtcaggcggccttaaacgagggcaagcctgttcgcacgctagatttcagcaaagaagaagcgccgctgcttaagcagtttttcttgattacggccaagccagcgatgttcgttgcgaacgtgtctgaggatggctttgagaacaaccccctgcttgaccgcttgaccgcctttgccaacgagcagaacgcgcctgtggtggcgatctgcgccaagctagaggccgagatgagcgagatgagcgacgaggaccgcgatatgttcctggaagagctggggcagtccgagccgggcttaaaccgtctgatccgtgccgcctacagtttgttgggtttgcagacctacttcactgcgggtgtaaaagaggtgcgcgcttggactatccacgttggggatacggggccgcaggcggccggtgtgatccacactgatttcgaaaagggctacattcgcgcccaaaccattgcctttgatgacttcattgcattcaagggcgagcagggcgctaaggacgcgggcaagatgcgcgcagaaggcaaggagtatgtcgtgaaagacggcgatgtactcaacttcttgttcagctcataagccactgcgcactcgcggcaatggcaaggtagcgggcgaacttgccaatggccatgtacaccgcgcaggccagccagggcattcttagccagcctgcgagggtgcacaccacatcgccgaccacgggtagccaagccagcaaacacgccttgggtccgagtttttccagttgagccaaagcccacgcggcgagcctgccagccgttggggtggcctgagcatccgcgcgtcggtgcgggtgcgcacggttttggtaggcgcggtgcgctgattgcaggccaacgcccatcagccaactcaccatgccacccaaggtgttgcctaccgtcgctagtaacaaggcgggccaaaatagatggggtgagatggcgatgagacccattaatgccgcctccgaccccatgggaagccacgtcgcggagacgaatgccgtgacaaaaacggtagtcaacccccattcgggcagactgaaccagtgaagtaagctcgcaaaaaaggcatccattggcttgagtataggtacaatcatgcttaaattttcagcaagcaccgacgcgtcaatcggtgcttttttgtctctaactgccgtccaacgtgcatatcggtccctaccacctccgcaataacctgttcgtcgcgcctatggctggcgtgacagaccgcccgtttcgccagttgtgtaagcaactgggcgcgggctatgccgtgagcgaaatggtgacatcgcggcgcgatttgtgggactcgcttaaaacctcacgccgtgcaaatcacgccggtgagagcgggcccattgcggttcaaattgcggggaccgacgcccagatgatggccgatgccgcggtgtacaacattgaccgtggcgcacaaattattgatatcaacatggggtgccccgcaaaaaaggtgtgcaacaagtgggccggttctgcgttgatgcaagacgagaccttggcgatcgccattgtcgaagcggtggtgaacgcctgcgcctctaaggatgtcccggtgacattaaagatgcggacgggttgggcggcgcatgcgaagaatgccacgcggttggcgctggcggcggagcaagtgggggtgcagatgttgacgattcacggtcgcacgcgcgagcaaggctataagggttttgcagagcatgagacggtggcggacattaagtcgcgggtgcgtattcccgtggtggccaatggggatattgcatcgcccgaggcggcgcaacgtgtgttgcaagccacgggggccgatgcggtgatggtgggacgcgccgcgcaagggcgcccatggatatttagtgagatcgctcattttttagccaccggacgccacgcgccagcgcccagcgctgtggatatgcgggcgtggatggtggagcacctgcacgcgcactacgcgctttacggcgaatttacaggcgttcggtctgcgcgcaagcaccttggttggtatgcccaacacttgcccatgggtgagcttttgcgtcagcgcatcaatgccttaaccgattgcgcggagcagttggctgcagtcgaggcgtatttcgcagcgtgggacagtgatgatctggccgcgcttggtcgggcatggcaaccgacacagataccgggcagcgcgcagagccagtctgtgcgagagatgcctgtcgacatgacattggccccccttcattgagcgttatatgagccgtaaagacattgaaaagggcgtgcgtgaaagcatgcaaacctacttccaagacctcgccggtagcgagccacatggcctgtacgacatgatggttgatgttgtggagaagcccttgctggaggtggtgatggcgcaagcaggcaataaccagtctcgcgcggcgcagtggcttggtctcaatcgcaacaccttgcgcaaaaaattacttcaccacaagttactcagttaacgctgcaaacgcggcggcctaactcgtcatttccccctttatttttcacgactaccaagcaccatgaacgcactcttatctgtatccgacaaaaccggcattgtggcccttgcgcgcgcgctccacgcccaaggcattggcctgctgtctactggcggcacggccaagctgttggcggaagagggcctgcccgttaccgaggtggccgatatgaccggctttccagaaatgctcgatggtcgcgtcaaaaccttgcaccccaaggtgcacggcggcttgttggctagacgtgacgtgccagcgcacatggcggcgttggccgctcacgggatcgataccattgacgtgttggttgtgaacctgtacccctttgaggcgacggtggccaaagcgggttgcaccttggaagaggccattgagaacatcgatattggcggccccgcgatggtgcgtagtgctgccaaaaactggaaggacgtcgcggttttaacggatgccagccaatacgagaccgtcattgccgagctcgccgctaacggcgcggtgtctaccccgacgaagtttgcgctgtccgtggcggcgtttaaccgcatcagcaattacgatgcggcgatcagcgactacctgtcggcgtatcagttggagagcgataccttacaagcgttccctgcacaggcgaacggacgttttgtgaagttgcaagacctgcgttacggcgagaatccgcaccaatcagcagcgttttaccgtgacctacaccccgcgcccggctcgctggtaacggcgaaacagttgcaaggtaaggagctgtcctataacaacatcgccgatgcggatgcggcatgggagtgcgtgaaaagctttgacgtgcccgcctgtgtgatcgtgaagcacgccaacccctgcggtgtggcgttggccgaggatgcgttgggcgcctataccaaggcgtttcaaaccgaccccacatcggcctttggcggcatcatcgcgctcaacgttgtggtggatgaagcggctgccaaggccattagccagcagtttgtcgaggtgctgatggcgcccgcttataccgagggtgccttggcggtatttcaagccaaagccaatgtgcgcgttttgcaaattacgctgcctgcggcgggtggacagacggcgtgggagcgtgggcgcaacgtgcaagacataaagcgcgtggggtctggtttgttgattcaaacggcagacaaccatgacctgagtttggccgacctcaaagtggtgtccaaagtgcagccgaccgaggcgcagttgcaagacctcttgtttgcgtggaaggtggccacgtatgtgaagtcgaacgcgattgttttctgtaaagaccgcatgaccgtcggcgttggtgcggggcaaatgagccgtttagattcagcgcgaatcgcgcgtatcaaggccgaccatgccggtttgtcattggcgcagtcggtggtcgctagtgatgcgttcttccctttccgagacggtctcgatgtggtggtggaggcgggcgcgactgcggttattcatcccggtggttccatgcgtgatcaagaggtgattgatgcggcggatgagcatggcgtcgcgatggtgtttacgggcgtgcgccacttccgtcactaagccgttgcgggtgttgcttgcgtggccatgttgacctggttggatatctcgcagacggcgagcgatgacgactgggtgaccttagaggtctgcgcgtctgtgacccgtgctgaccagcatcgcgtcgatgctgccgtctgtgagttgcttggttatttgtacgcgcgctgtggccgtcccagcgaagaccccgacgtgccgcccggcccacagtcgtggctgatcgatgtgcaggcgtatgccgagtcggcagccaaagcgccgctggccgtcgccttggattggcgcgacgacgccacggtgtctctgcaatgggtcacagcgggagccgctgacgcgaccacggaagacacccggcgaacccttctcattagtttgggcttgtcacccgcgttagcgttcgcttgcgatgaggcattcgaactggggctctagctgacgccccctaacgcggtgtatgccccgctcgtgggactacagggttgcaaatgtccgctttgccgcggcgatggtgtcgtcaatgtcttgcgcggtgtgcgcggcgctcacaaagccagcctcaaatagcgcgggcgcaaagtaaacaccttggtccaacatgccgtggaagaagcggttaaacaccgcgccgtctgtggtcatgaccttggcgtagttttgtggcaactcagggaagaagaagaagccaaacatgcccccttcgctgtcgccacaaaacgggatacccgcttccttggctgcggcggtcatgccgctgacgagttgttgggtgtgttgattcagttgggtgaaaaagccgtccttttgaatctcttttaaggttgccaaaccgcaggcggtggcgacggggttccctgacaaggtgcccgcttggtagaccgcgccaagtggtgcgaggtgggacatgacttcgcgcttaccgccgaacgcggctaacggcatgccgccgccaatgactttgcccatcacggtcatgtcaggctcaaagcccggaatttctttggcgtacaagctctgagcgcttcccagtgccacgcggaaaccacacatcacttcatcaaatgcgagtagcgctccgtgggcagtgcagagttcgcgacagcgttttacaaatggcacgctggcccgcacgaagttcatgttgccagcaatgggctccatcatcaaacaggcgacttcatcgccgtgttccttaaaggcggcctctagcgcttccacgtcattgaagggcagtactaaagtgtgttgcacaacctctggcgggacgcctgcgctggtggggttaccaaacgtggcgaggccagagccggccttaaccaacagggcatcggcgtggccgtggtagcagccttcaaacttaatgattttgctgcgtcccgtggcgccccgagccagtcgaatggcgctcatgccggcctcggtgcctgagctgaccagtctcaccatttcaatggatggaaccagcttgatgatttcttcggccagttctatttcgcgttcagtcggtgcaccaaatgacagcccttgctctgcagcgctcagcaccgcggcgtgtacggcggggtggcggtgccccaagatcatcgggccccaagagccaatgtagtcaatgtagcgctgatcttctgcgtcccaaaaataggcgccatcgccccgcgtgatgaagcggggtgttccgccgacggctttgaaggcgcgtacgggtgagttaaccccacccggaatggctagcttggcgcgtgtaaataattggtcgtttttgttcatgatgtgtttccggttacgttgcacggttcagtgtttggtgtcgtctagcgggaagtcgcctaacgtgtggtgaccgacatccagcgtcggtgtgtcgggggcgtcggtatcctcggtatcgtctatgccgtcatcttcgccgcgtccccaaaacaagcggtcgggtaaggcgtgtcccatgccgggtgcaaagcctgcatccagactctggtcgagataggtcagcgcttctgcgcaggcggactgcaagtcttcgcctgcacccagcagggccgtgagggcggctgacagggtttccccagccccggtgaaggtggtgtcaaaccgctcgaagcgtgcggtggccaacacggtctcaggggacgctaggtggttttctaagaattgttcaggtgcatttaacccggtgaccaaggtgtaactcactccgtgtagctgcgcggcgcgagctacgtcgcgcggtgtggggggcttttcgctcgcccagtcgggtaataaccagcgacacaaggtgctgtagttgcccacgagaacggcggtttgcgggagcattaactcggtaaatgcgtctaagtaggcatctagagcgatatcgtccatccacgtcaaactgggcatataggcaacgacgggggtgtccgcgtagtcgttggcaatttgcgccactgcgctgatgttttccggactgcccaaaaagccgactttgaaactggtcacgggaatgtcttcgagcaccatgcgggcttggtcgttgatggcatcagcgtccagcgagacgtggtcttggacggcggtggtgtctcggatgagcaccgcggtgaccacgggcagcatgtgcacagaggcggaacccatggcgccgatgtcagcggccaaaccgccagcacccgttgggtcattggcattgaacgacagcacgcacggcagcgttagctggtgcgcggtcgtgcttgtgtcccgtttgctgggctgcttgggcggcgaatctaaagcatcggtcatgggtttgctcgttg

SEQ ID NO: 28 - DNA, 23242 bp, Artificial Sequence
  Synthetic Oligonucleotide
tgcacaacgccacaatgctgctgcggtgagcggacgttacacgcgtctttaaacgtgatccaagggtgtccggtttcgaacaacatggtcaacatcttgcgccacaggtccttcgcaggcaggcgacggtagtgcgtaatttctccgctatccgctttggcttcataggccacgtacgcggtctcaaaggctgacccaaataggtcgtgcaggtcttccacgtcggcgggtgagaacagcgtccagtcgccgccctccattacgcggcgcataaataagtcgggaatccagttggcggtgttcatgtcgtgcgtacggcgacggtcatcacccgtgtttttacgcaactctaggaattcttccacgtctaagtgccaagactcgaggtacgtacaaaccgcacctttgcgcttgccgccttggttaacagcgacggcggtatcgttcacgaccttgaggaacggaacaacaccctgagactcgccgttggtgcccttgatgtgtgagcccagcgcacgcacgcgcgtccagtcattacccaagccaccagcgaactttgacagcagcgcattttctttgatcgactcgtaaatgccgtccaaatgatcaggcacggtggtcaagtagcacgatgacaactggctacgcaaggtaccgctattaaatagtgtcggtgtgctggacatgaagtcaaagctggacagaatttcgtagaactcaattgcgcgggcttcgcggtcaatctcctcgagtgccagacccatggcgacccgcatgaagaaagcttgcggcaactcaatgcgctgcttccgcacgtgcaagaagtagcggtcatatagcgtttgcaagcccaagtagtcaaactgcagatcacgctcaggcttcaaggcggcgcctaagcgctccaagtcgtactgcgcgaggcgctcgtctaacaagtctgcggcaacgcccttgtgaataaaggtagggaagtactcggggtagcttgctgtgagctcttcagggctaacgaagcgtccgagaacctctttaccaatggtttgcagtaacaaacgcgcggtcgcgtaggtgtagtcaggctctttttcaatcagggtgcgcgccgccaagatggacgccttttgaacttcgtcaaatggcacgccgtcatataggttacgaatggtttcgttcaggatgggctcagcgcggacatcggcattgaggccagagcaggctgactcgatggcgtggcgcagcgtggccatatcgagtggaatacgttcgccgttgtcaatcaccgtcaatgttggctcggagctgacgggggcttcggtgtggctcgccttgcgttcctgcgagcgacgctcacggtacagcacgtaggcacgcgccacttcgtggtgactgccgcgcatcaggccgagctcaacttggtcttggatgtcttcaatatggaaggtgccgccacccgggcgtgagcgcaccagcgcgcgaacgacgccttgtgtcaactcgtcaaccgtttcgcgcacactcgcagacgccgccccttgcgtgccgtgaacggccaagaaggctttcatcattgcgacggcaactttgttgggtgtgaacggcacgaccgcaccgttacgacgaatgatttgatactgactgtaggcctgagcgtccgagaatggcgcgggggcttggggcgtcgcggaggcttggcgtggggcatccgacacggcagcggctgtttgcataaagggctttcagttattgttttgcagggtatccgaacgcgcggaacggcggttcagggctgaaattagtggcgctactgcgcatattgcgaatctcagcagacactatacctagtgtttggccctgcatcaacacactaggggtagtgttttcactatattttaaggtgatcaaaaatactttgtatttttttgaaaaccaatggcttagtgtgggcgatggaatgtgatcaaatcaatttttatcgacaaaaaacgcccaatcaaaaccgacgccggggtcgaattttctgccgggtgccacgtcttcgtgacccaccatgtcggtgagcgtcgggtaggccagcctgagcgcgcccaacaggctttgtaagcagtcgtactgcggttgctcaaagcgcccaccttccaagccctctagctcgatcccaatggtgtagtcgttgcagttgctacgaccttgccagctagacgcccctgcgtgccacgcgcgttggtcggcactaacgaattgaatgaggctaccgtcacgctgaataaaaaaatgcgccgatacctccgcccctctaatagtttgaaagtaggggtgggcatcccagtcgagccggttggtaaataagtcgaccacgaacggggtgccgaactcgcccggtggcaagctaattgagtggatcaccaccaagtcaatggccatgcccgcagggcgcgggccacagttgggtgacggtatggccgtggcctgcgaccaccaaccgtcttgccacgtggcatcgtgacgcgacagcgcagcggaggcgtggggtaacttcacgctagtctaggggcttatccccgtgcacgttgcaatgggctttgctgcagtagcgaccgagtcggccttgtacggtttctgccagatcgaggtgggtaccgcagtgcaagcacggaatgatggggcgcggcaggttggtgacggttgccgacgttgccttgggtttctttgcggccttgacggcctcatctcggccctcttggcggccacgcttccaaagccaaatgccgaacaaaatggccagaagaacaacaaaaatcttaatcatgagagtggggtagttaaacgcgggccacgggcactaggcgggggcgacgagcacgacctcaaggacaaaacgggcgccaacgtaagccatgagaagcagacccgctgatatatatagtaggcggcctgcacgcttgccgcgccagccatagcgccaacgggcaatgagcaacgacgccaaagacaaccaggccaatacagagaaaacgcttttgtgatcccaacgccaccccgagtcatacagcacctcggtaaagccgacacctgcgatcagcgtagcactcaaaaacacaaagccagcgccaataaactgaaacatcaggcgctcttgcgtcagtaccgggcggtgcccctcatcgggcaaggcgtggcgaatggcggtatcggcgcggcgcaacaaaatggcgtgaaaaaccgcggcgccaatcaggccgtaagacgcgatacccagtgcccagtgcacgggcagccaaacggacggcaactgcgggtgaacaataccggggaaaagcacgttgagtgccacagcggcaatgccaagccccgcaagcggccagcgcgcccgcaacggcaacttgagtcgggtttcgataccgtatatggtggataccatccagacagtgactgacagcgcggccgcgaacccaaagcgccccgggctctctatccagtaagctagcagcgaggcaccatgaaacgccaaggtcagcgcaaatagcgcttgcaggcttttgacgcctaaggcacggtgggccaaggcgatcgcaaggtagccaaccgccgttgcaaaggcgcagccgagaaacagagggctggtcgttagaatcatggctacagtttaacgctgagtgaggccttgaggggtcaccacctagaaagcagccacaacaaattttcaccttagaggtgacccgtttttttagattgagagtgccatggcttccgccttatcagaacgcctatccagaatcgttaagaccatgcgtggtcaggcgcgtatcaccgaaagcaacgtggcggacatgttgcgtgaggtgcgtatggccttgctggaagccgacgtggccttgcccgtggtgcgcgcattcatcgccgaggtaaaagaaaaggccttgggcgaaagtgttgtcggctcccttacgccagggcaggcgttggtgggcgtggtcaaccgtgagttggtcgagctgatgtctggtggcgacgggggcggctcctccgagctaaacctagccgcccagccaccagccgtagtactcatggcgggtttgcaaggggcgggtaagaccaccacaaccgctaagttggccaagtggttggtggcgcgcaaaaagaaagtactaacagtcagcggtgacgtttaccgtcctgccgctattgagcagctcaaaaccgttactgcgcaagcgggcgccgattggtttccgagtacggcggaccaaaagcccgtagatatcgccaaagccgcgttggactacgcacgtaaacattactttgatgtcttgttggttgataccgccggtcgcttggctattgacgaagccttgatggctgaaatcaaggcactgcatgaggccgtacgaccggttgagacgctcttcgtggtggatgccatgcagggtcaagacgccatcaacaccgcacgggcatttaaagaggcgctgcccctaaccggtattgtgttgaccaaaaccgatggcgactcgcgcggtggtgcggcgttatcggttcgtcacgtgactggtgtgcccattaagtttgcgggcgtcagtgaaaaaattgacggcctcgaagcgtttgacgccgagcgccatgcctcccgcgtgctgggcatgggcgatatcttggccttggttgagcaagttagcgcgggcgttgacatggccgcggcacaaaaactagccgccaaagtcaaaagcggtagtggctttgacctcaatgacttcttagatcagctacggcaaatgcgcagcatgggtggcctgtcgcagttggtcgacaaactgcccgcacaaatggcggccaaagcaggtgagatggacatggacaaaaccgagcgcgacatgcggcgcaaagaaggcattgtgtgcagcatgaccttgcatgagcgtaccaagcccgagttgattaaggccacacgcaagcgccgtattgcggcgggcgctggcgttcaggtgcaagaagtgaatcgtctgctcaaagagtttgaacaaatgcagggcatgatgaaaaagatgaagggcggcggcctcatgaaaatgatgaagcgcatgggcggcatgaaaggcatgggtggctttcccggtatgggataagccaccgcagcatgtgcaacgcctggccagagcgggctttacgccaccaccacctcgccgcgcaaagagtgcggcaacgcctgcgtaatacgaatatcgagcatctgacccttcaggcgctcggggttggggccgccagcgaagttcacgatgcggttgcattcggttcggcccatgtactcggtggcatcctttttggacggcccctcaaccaacacccgttgcaccgtgtgctcgcgacgggcgctgatggtgcgcacgttgtcttcgatcacgctttgcaaatgctgtagacgcttgagcttgaccgcgtgcggtgtctcgtcatgtagcgttgcggcaggcgtgccggggcgggggctaaaaatgaagctaaagctggtgtcaaagccaacatcggtaatgagcttcatcatttttgcaaagtcatcttccgtctcgcccgggaagcccacaatgaagtcagagctcatagaaatatctggcctgatcgcgcgcaacttgcgcaccgtgctcttgaactccaaggcggtgtaaccgcgcttcatggccatcaagatacggtcactaccgtgttgcacaggcaagtgcaagtgattgaccagttggggcacgcgcgcatagacatcaatgaggcgctgtgtaaattctttcgggtggctggtggtgaagcgtatgcgctccacgccgggcaatgcggctacatactcaatgagcagggcgaagtcagcaatctcagccgttccgcccatcacaccgcggtaggcgttcacgttttgacccaacaacgtgatctccttgaccccttgctcggtcaaccccgcgacctctgccaacacgtcgtcaaacgggcggcttacttcttcgccgcgtgtgtagggcacgacgcagtagctacagtactttgagcagccttccataatggagacgaaggcgctggcgccatcgacgcgcgctggcggcaggtgatcaaacttctcaatctcagggaagctgatatcaacctgcggcttctgagcgcgttcgcgctcattcaacagatcgggcaagcggtgcagggtttgagggccaaacaccacatcgacaaacggggcacgcgcaataattgccgcgccctcttggcttgccacacaaccgcccacaccaatgagcacgccttttttcttgaggtgcttcacacggcctaagtcactaaacaccttctcttgcgccttttcgcgcacagagcaggtgttgaacaaaatcagatcggcctcatccacatcttgggtgggctcatagccttgtgccgcttgcaagacgtcagacatcttgtctgagtcgtacacattcatttggcagccgaaggtcttgataaaaacttttttgctcatgtcgcgttgcttgggttaggccaacccatgcacgccacgcaccagcgcgagccgcgggtgcgaaagagagcgagggccggcgttgcatggtgtagatccagtggccggcgtgcagacgcgctgcacacaaaacatgattgtaatacttgggcaggcaataaaaaaacccggaaaatttgcaccatccagacagaaggcaaacacttcttccggagtacggccgtgcatgcgtaccgttttttctagcacggccatcacatcacctcatccaatttgtttattgctgccgcaccgaacggtgccgcgtagcgcgcccagtgagttggggctagggctctatcgaaactgcgcagataagagactacatcaaaagtattaattcctatagactgataaatcaagtccctgcttagctgtttttcacaacgaggtgccagtccatggatcacacaatcacaaaaccagcgcgcgtcgaaggctacgccgtccaccgtatggtcgccgctttggtagacgacgcacccgcgctgcatctcgatgccggcgacaccctaaccattcgcaccgatgcgcccctgcccagtgggcatattgtgggcttctcgttgcgtgcctgtgtctctgtcaagaacaaggggcggcaccgctatttccccagtgctgactggcgctctcgccacagttggctcgagcgaaaaggcgtacagcatggcttcgaagtcatcaccgtgcattgctctgccaaacacttggtcatcgaaaaacaatctggccaattcagtgttgatgacaccttgtttacgggtgtcctcaaagttgtcgattacgacaagtacaacgccgcgctgctatcgggcatcggcaacacggcacgcgccttcgggttcggcatgttagttatttaatcttcaccaagggaaaccatgccaaagcaaaccatcgttatcgacaccgttatcaccacacaaggcccgctgtctatcgccatgcccgtcgcacagggcacacgggcaaacgactacaacaactttccattgatggcccgtgggcaggatgaactgggcgccgtattgcaaacagcctacctgcccgctagtacggtgcgtgggttccttcgccgtgcggctggcattgccgcgatggaaaagcgcggcgtaggcaacaccacattgcagcaagcgtattccgatattttggggcagtctaaagacgccaaagaaacggtggacttggtccagctgtctgccatacgcgaggcagaccccatactcgacctctttggttcgtggtctatcaagtcgcgcttactggtgagtaacttcttgcccacaaccaacgtgttgccacaggccatcacgggtgtcagaaaagacttagaagacaccgaaggcgtgttgaccctcttgagtgagaccgaccaacaggcctattacaaccgcagtgacatcaacagccagcgcgcagccgctgacgcagtcgtcaagggcctcactcgtgacatcagaaaagccaaaaaagacggcaacgcactcactgacctagaggcggcgcttgtgatcgccgacgcgaaggccgtggccttaaaaacggatatgggcgagatggcgaactcatcacgcaccatcaccgagttttttgccttgcccgctaacatggccttgcacggacgcatcgtggttgagcaagccaaggagcgtgaccttgcattgatcgtggaggcgctagacaccctgtctattcgccccatgttgggcgcccaagtagcgcgcggctgtggcgaggtggcggggcagttcaccatcaaggtggatggcatcgtggtcaagacagtcaccacgggcggctgggtgcctgcgcaggtcgaagacttctcgtctgatgcgcctgcaccagccgctgtctaattgcacgtggaccagttacgaatcaccgcccacctcagcggcccccttgtgacggggggcggctacctcacctttgatgcgttgctcgcctctgccacttacagcttgacgcaagacattgagcaggcccacaaccagctgccacttaaacaagttgccggcctgtaccacgccagcgccgccatttatgaacccgttgccatcggggcattggctattgtgcaagccatgcgtcccgacgacctgtggcttgaccaccagtggttaaagaagaacaagcgcggcgctgtgcacaccaagttcgacaacctatccgacaacatactgaccacctacaagaccatagcggcaccgaccatgacctggtactgcgaaggtgatgcagaccgcattcgtgtcttactagcgcatctacccctcattggtaaaaagcgggtttgctccgtgacccagtggaccgttgaggcgggcgagcttgacggtctgcatggctatgccgatgagccactgcggcctgtacccgttgagctgtgggatggtgacaagagcagccccatcgtggacgcggcatggcgtcccgcttattgggatgcgactgggcgcaccgcttgttttgtgaactgagggcacaccatgacgacgcttgaatttttaatcagtacttcggtcgccacctcgttgcgcaaaccggtgatgcgcaggccgatgcaacgcgcacgctgtcgtctggccacaaaatggccaagggtggcacagcacaacgcattgcatcgggttgggcggtgatctcagaagatgtcagcacgcttcaattcaagctggcggccaccggcttaagttacggcggacagacgcgttacgaggcttggctagatgcgcttgaggcatttagcggcaagcccatcatgcttattgagtttgataagaagcctgtaccagttaccaacctgtttcgtacgcatgatttacgagcggtacaggtgtgttcgcccggcggggcggcgctatttgactttacgcaagaacccaccgctgagagtggtaaagcgcacaaagtgctgtggaaattaaaactagaaaggctaaaaagcgctgttgaatcaagcgcttgagccacatgagatcaagccaccctctaaatgggtggttactagaactcaccggtcagccactcgtttgttttgcggatcaagccaccgtctaaatgggtggttactagaacatgtcgctagttgcgctttacgaaggcaaagatcaagccaccctctaaatgggtggttactagaacgacgtgcttggtgacatacaacgcgtgcgcagatcaagccaccctctaaatgggtggttactagaactatgccgtccagcccgttcgtttcaagccttgatcaagccaccctctaaatgggtggttactagaactatgccgtccagcccgttcgtttcaagccttgatcaagccaccctctaaatgggtggttattagaaccaatcaaatatctacgcctaccgtaaaaatgatcaagccaccctctaaatgggtggttacttatttacagacataccatgggccgccgtgcccttattaggagttcaccgatgtttcgttcctcagagcagcagcatttctgcaatgtgcttattaagcatttgaaacgcgtcgatgcgcccatattgctggaaggcggggtgggtcttgggaagacgcgtgcctacctggccgcactggcaactacgacgcaaacggttgccattgtgttacccacacaccaactgattgaccagttgctggctagcgctgacttgtcagccgttgccttgccattggccgtgttcaggccagccagtcggtttgacacacgggaggcgtaccaagcgcagcgagaggcggcccgtgctgcgcgtgtcatgctctgcaccgctgcaagcgtgattattgaccaacgccttgcgggggcttacaacggcgcaacacagcgtgatgtggtgttatttgatgaagccgaccagttacccgatatggcggcattgcagagcgactttgtgattgaggcggcgctactgcagggccagccgctgcacgcggccttagagcgcataagcaccacccgttcacagtcggttgaggccgagcaaaaggctgctgcgcgggtcatgcttgagatattggccgaaccggtgggctacgcatccgtcgggcttgatgatgatggcaatgcgcggctacaccacgccctgccaggtcgcttattaaagaaaattagcaatcgcggtagcacggtgtttctttctgcaacgctgacccacaacgataagtttgatgacttcaagatcgccatgggcctagacgcggtgagtagcctgtcaacaagcattgagccagaacagcatggcacgctcgacttcaccgtacacgcgcacgaggtggacacgcctgactggtttgcggccaccgttcagtgcatacaaagcgcgcagcgccccacgttggtggtcacacctagccatgacctcacagagcggctacaaaccgccgtgggtgagcaagcagacttgcttatacgtgcgggtgcatgggcgggtcttgacacgccaacgcgctggcgtaccgtggttattccgcgcgtgccatttggcgcaccagtcattgttgacggggtggcggtcacgtcttacttggccgccaaggtgacggccagtcggcggatgcgccaagcaattggccgtgggcttagaacacctgaggcggtgtgcacggttgtggttttggatgcgcgggcacacaacttaggtcgctttgtgccagagcgttttgcggcagattggtcgtctcggcaagtgtttgaggagggtgcccgccatgcggtggtgctgtccaaagcggagcgcgaccccgctttggccaaagccgcgctcagacactacggcgctcaatgccaacaagcgggttgttccgtgacagaggcgtgtcagctggacgtgcaccaccttgaccccgtaagcgaaggcgtgcgccgcacaaccttgaaggatgtgaccgtgctgtgtgcaaaccaccaccgacaggcccaccacgacatgaaaatggggctgaacgtgtcgtagcgcaacaaaaaacccgccatacctttgggtacgcgggttttgggagttctggcaaggcctgaaacctaaatgtggtggtgataggtggacttgaaccaccgaccccagcattatgaatgctgtgctctaaccaactgagctatatcaccgagcctgaaattatagccaaaattctcagggctttggcttgccgccaaaagtttttgttagccattttgtcgcgcccgtacgacgcgccaagcccttggttattggtgtttgaaggcgggtttgcgcttgtttatgaacgcatccatgccctctttttggtcttcggttgcaaacagcgcgtggaacagacggcgctcaaaacgcacgccttcgctgaggctgccttcaaacgcttggttcaccgcttcctttgccgccatgacactggggagggagtagttgcaaatcatcagggctgcgcccaaggcctcggtcatgagttggtcatcggcgaccacgcggctcaccagtccgccgcgctcggcttctgcagcgtccatcatgcggcctgtgagggccatgtccatggccttggctttgccaacggcgcgtggcaggcgctgcgtgccacctgcgccagggataacgcccaacttgatttcgggttggccaaatttggcgctctcgctggcaatgatgacgtcgcacatcatggccaattcacagccgccgccgagggcaaagccgctgacggcggcaataacgggcttgcgaacgctgcgaatggtttcccagttgcgcgtgatgtagtctgacttgtagacgtcagcaaaggtgtaggtcgccatagcgccaatgtcggcacccgcggcaaaggctttttcactgcctgtgagcacaatgcagccaatgtccgggtcggcgtcgaatgcggttagcgccgcgccaagctcgtccattagcgcactgttgagggcattgagttgtttggggcggtttagggtgagtatgcccacgcggccttcgatgcggattaaaaccagttgctcactcatgtctgtgttctccaatgtggtgcgaaaagttgcttagaaaaagttgtttcgaaagttgcttcgacgtaagcggttgatcatagccaagcggtgagcttgctagggtctttcaccaccagttcggcgatctggttggcgtgggtcgatggccagatgagggggcacgacaacatgcggccatcgcgcgcgacaccggcaaccaatgggtgctgggctacgtcggcgtggcgtctcgcaatgttctccacatcgctcagtgactttacccgccattgatcggtgccatcaaatagtgtcacccattcgtcacccgccgccatgcccgcttgttcgcctgcaccgcctcttgccacgtgggtgatgcggatgccgtctcgctcaacgacacgcatgcccaagcgctgggcgagggtgccgctcttggccgccacggcgacaccgtaatgactaagcagtgcgtgtaccggcaggtcttcggtgctgtgtacccagtgcgcgagctgtgtggcgacgttggcgtgcccttgctggttgagcagggcgtagatgtcggcctcactgatggtgccgcctttgcttttgacccataggccgcgcatgagggtgtcgagatcgccgccttgttggcgcagcatgaggtcggtgcacagcgctattagcgcccctttggtgtagtagctaacggtggcgttgggcgtgttttcgccaatgcggtagtacttgacccacgcgtcatagctagactgggcaacgctttgcagatgccgccctggggtggccgcaacgtggttaatggatttggccagcagcgtgagataggtgggcgtatcaatgagtttggcgcgttgcagaaacaggtcatcgtagtagctggtaaagccttcaaagaaccacagcagctcggtgtagttctcttggttgaagtcgatgcttgcaaactcggatgggcgcaggcgcttgacgttccatgtgtgaaagtactcatggctaatgaggccaagtaattggttgtagccagcgccttgtgcatgggggggcgctgcctcgccagcgacggccgttaggggcaagtcggcacgctggcaaatgagtgcggtgctggcgatgtgctctagcccgccgtagccgttttcagtggcgtgaagcatgaagacgtagcggtcaaagggtagttggcgttgcggttgtttgccgtgccaaaacgtgatctctgtttcgcaaattcggcgggtgtcggcaactaattttttgacatcaaacccgggcgcggtgtggttgccaatgcccgtgacaacgagttcatgcggtacgccagagaccttaaaccggctgacgtaaaaatcacccaaggtaaagggactgtcggcgagctcgccgcagttgcgggcggtgtagcgcccgaagccacgcgcgtcgatttgccgcgcgggcaatgcggtagacagccgccacgcattgaacgcgggcgcggtggggcgctcgacggagatggtttgtatctcgtcttcgcccccgaccacttgcaaacacaggctggtggggttaaagaagccgcgggtgttgtccaaaaaggcggttcgcaccgaggcgtcaaaggcgtagatttggtaattgagctccagcgggcgtttgccgtcggattccactagccactcatttttactgcactgcgtgatttggcaaggcgtgcggccttgcttggctgtgagcgcttgcaggtgttgcgaaaattcacgcaccaaataactacccgcaatccaaacgggtagacgcaggcgctgttgcttttttgggcttgagatgcgcagatgcacaccgaacaggtgcgcttccgcgctgtcaacgcgaatgttgtgatcgatgcgcatggtgttacttgatggcggccagacgcttctcaacttcggcggcagaaatggcgccggggacacgtgtgccgtctgagaagaaaagggcaggcgtgcccgagatacggtgcttttgaccaaacgcgatgttgcggtcaagcgcgctggtgtcgcagctgatggcggcggcgctggtggttagagggacttcattcaccatccagtcttcaaaggctacgccggggtttttgtcgcaccaaatggccttggacttgagcgttgaatccgcgccgagtatggggtacaaaaagatatgcagggtgatgttgtcgacattcatcatgtcacgttcaaagcgcttgcagaagccacagttggggtcttcaaaaaccgcgagttgacgcttgccgttaccgcgtttgatggtgaaggcatctttaaagggcagggcctcaaagggtattgcgctcaatttatcgaggcgctcctgcgtcaggttgcgtttgcccttgaggtcaacgagtacgccttgcagcaaaaattcaccgttggcatcggtgtacaaaatttcggtttcaccaaagcgaacttcgtagaggccggccatgggggtcttggtgacgctgttgatagcgggtaagttgggtagttgcttgggtagcatctcgcgaatcttggcttcctgtgcccagcccatgcttgccatgagagtgaatgcgatgcccacggccaagccgcgcaataaagagcgtgtgggggtgggtgcgagaggtgacgtgtggtgaagcatggtgtggttcgctaggtaggcgttgtttgggggtaagagggtgggtgggttggttcgtgggagggggctgttgggtagcggatgctcgctgttggagcaccatcgtggcaatcagttccccatgccaacacgctgtacccacgacttgagtgggcccatggcattaaagcccgacatgcctgcattgcgtagccaactggcggcggggttgcggcccaaggggttgttgaacaagtgaaagagtccgtgcgtgacccattgcatgggttcggtggcggcgcgtcgacgccgttggtagcgctgaagcacgcgtgaggcacccggagactcacctcgggcgcgtgccgcaacgcagtcactgagcgtttgtacgtcggccaagccaaggttgagaccttgccctgcgagggggtggatggtgtgcgccgcatcgccggctaacgcggtctgctgggcaacccattgcgtggttaagccgacgctcaaggggaaggcaacaggcccgctggtaagggagaggtgccctagcgcgccctgactggcttgggtgagttggtcttctagggcggcggtttgggcggtggtctccatgtccagccacgtctggtgcgcagcgtctggtagcgaccagacaacggccaggtcgtgcccgtcagcgccgcccatgggcagcagggccaaaatatgtgtgccgttaaaccactggtgggcgacgccgccgtggctgtgctcggcgcgcatgcgcaacgccaaggcacggtgggggtagtgcttacttaccatgtcaatacccaaggcggtgcgcgcgataccgctcttgccttcgcaaatgatggtcaatgcgctaggcggtgtctgggctgatggtgacgcgtggtcgtcaaattgcacgcgtgcatggcgtgtgacggcttcggcaagatggtcctctaggacaggcacatcgaccatccacgccaagggctgcgcttgctgtgggggtgcgtcgaattgcagcgcgcctgacgcatcgccaaacacccgcatatgggtcatgggggtcagccacgcggcctgatcgtcttgaggccagacaccgcatgctttgagggtgtctctcgaggtgtggttgatggcgtaggcgcgaatgtcgcgggtgtgcggtggcgcttggggcgcgggcaggctgacggaaaagccttgctctgccaataacaatgccgccgcgtgcgcggtgatgccagcgcctaaaacggtgatgtgccctgattgagtcatggcgttattctattgggacacccacttggggggccagcgatgaccctgccccggaagtgccttaaactctgggtcttgctttttgaggattgtcatgagtttgaaatgcggcatcgttggtctgcccaacgtcggtaaatctaccctgtttaacgcgcttaccaaggctggtatcgccgctgagaactaccctttttgcaccatcgagcccaacgttggcgtggtggaggtgcccgacacccgcctagcgcagctcagcgatatcgtgacgcctgagcgcattgttcctgcgattgttgaatttgtggatatagccggcttggtggcgggtgccagtacgggcgagggcttgggtaacaagtttttggcccatatccgcgaaaccgatgccacggttaacgttgtgcgttgttttgaagatgacaacgtggtgcacgtcgcgggcaaggtggatccgatttctgacattgaggtgattcaaacggagttgtgccttgccgacttaggcgcagtagagaaagccctgcaccgggtctccaagaccgcgcgttctggcgacaaagagtcggtgcgcttggtgtcgattttggagcgctgtcaggcggccttaaacgagggcaagcctgttcgcacgctagatttcagcaaagaagaagcgccgctgcttaagcagtttttcttgattacggccaagccagcgatgttcgttgcgaacgtgtctgaggatggctttgagaacaaccccctgcttgaccgcttgaccgcctttgccaacgagcagaacgcgcctgtggtggcgatctgcgccaagctagaggccgagatgagcgagatgagcgacgaggaccgcgatatgttcctggaagagctggggcagtccgagccgggcttaaaccgtctgatccgtgccgcctacagtttgttgggtttgcagacctacttcactgcgggtgtaaaagaggtgcgcgcttggactatccacgttggggatacggggccgcaggcggccggtgtgatccacactgatttcgaaaagggctacattcgcgcccaaaccattgcctttgatgacttcattgcattcaagggcgagcagggcgctaaggacgcgggcaagatgcgcgcagaaggcaaggagtatgtcgtgaaagacggcgatgtactcaacttcttgttcagctcataagccactgcgcactcgcggcaatggcaaggtagcgggcgaacttgccaatggccatgtacaccgcgcaggccagccagggcattcttagccagcctgcgagggtgcacaccacatcgccgaccacgggtagccaagccagcaaacacgccttgggtccgagtttttccagttgagccaaagcccacgcggcgagcctgccagccgttggggtggcctgagcatccgcgcgtcggtgcgggtgcgcacggttttggtaggcgcggtgcgctgattgcaggccaacgcccatcagccaactcaccatgccacccaaggtgttgcctaccgtcgctagtaacaaggcgggccaaaatagatggggtgagatggcgatgagacccattaatgccgcctccgaccccatgggaagccacgtcgcggagacgaatgccgtgacaaaaacggtagtcaacccccattcgggcagactgaaccagtgaagtaagctcgcaaaaaaggcatccattggcttgagtataggtacaatcatgcttaaattttcagcaagcaccgacgcgtcaatcggtgcttttttgtctctaactgccgtccaacgtgcatatcggtccctaccacctccgcaataacctgttcgtcgcgcctatggctggcgtgacagaccgcccgtttcgccagttgtgtaagcaactgggcgcgggctatgccgtgagcgaaatggtgacatcgcggcgcgatttgtgggactcgcttaaaacctcacgccgtgcaaatcacgccggtgagagcgggcccattgcggttcaaattgcggggaccgacgcccagatgatggccgatgccgcggtgtacaacattgaccgtggcgcacaaattattgatatcaacatggggtgccccgcaaaaaaggtgtgcaacaagtgggccggttctgcgttgatgcaagacgagaccttggcgatcgccattgtcgaagcggtggtgaacgcctgcgcctctaaggatgtcccggtgacattaaagatgcggacgggttgggcggcgcatgcgaagaatgccacgcggttggcgctggcggcggagcaagtgggggtgcagatgttgacgattcacggtcgcacgcgcgagcaaggctataagggttttgcagagcatgagacggtggcggacattaagtcgcgggtgcgtattcccgtggtggccaatggggatattgcatcgcccgaggcggcgcaacgtgtgttgcaagccacgggggccgatgcggtgatggtgggacgcgccgcgcaagggcgcccatggatatttagtgagatcgctcattttttagccaccggacgccacgcgccagcgcccagcgctgtggatatgcgggcgtggatggtggagcacctgcacgcgcactacgcgctttacggcgaatttacaggcgttcggtctgcgcgcaagcaccttggttggtatgcccaacacttgcccatgggtgagcttttgcgtcagcgcatcaatgccttaaccgattgcgcggagcagttggctgcagtcgaggcgtatttcgcagcgtgggacagtgatgatctggccgcgcttggtcgggcatggcaaccgacacagataccgggcagcgcgcagagccagtctgtgcgagagatgcctgtcgacatgacattggccccccttcattgagcgttatatgagccgtaaagacattgaaaagggcgtgcgtgaaagcatgcaaacctacttccaagacctcgccggtagcgagccacatggcctgtacgacatgatggttgatgttgtggagaagcccttgctggaggtggtgatggcgcaagcaggcaataaccagtctcgcgcggcgcagtggcttggtctcaatcgcaacaccttgcgcaaaaaattacttcaccacaagttactcagttaacgctgcaaacgcggcggcctaactcgtcatttccccctttatttttcacgactaccaagcaccatgaacgcactcttatctgtatccgacaaaaccggcattgtggcccttgcgcgcgcgctccacgcccaaggcattggcctgctgtctactggcggcacggccaagctgttggcggaagagggcctgcccgttaccgaggtggccgatatgaccggctttccagaaatgctcgatggtcgcgtcaaaaccttgcaccccaaggtgcacggcggcttgttggctagacgtgacgtgccagcgcacatggcggcgttggccgctcacgggatcgataccattgacgtgttggttgtgaacctgtacccctttgaggcgacggtggccaaagcgggttgcaccttggaagaggccattgagaacatcgatattggcggccccgcgatggtgcgtagtgctgccaaaaactggaaggacgtcgcggttttaacggatgccagccaatacgagaccgtcattgccgagctcgccgctaacggcgcggtgtctaccccgacgaagtttgcgctgtccgtggcggcgtttaaccgcatcagcaattacgatgcggcgatcagcgactacctgtcggcgtatcagttggagagcgataccttacaagcgttccctgcacaggcgaacggacgttttgtgaagttgcaagacctgcgttacggcgagaatccgcaccaatcagcagcgttttaccgtgacctacaccccgcgcccggctcgctggtaacggcgaaacagttgcaaggtaaggagctgtcctataacaacatcgccgatgcggatgcggcatgggagtgcgtgaaaagctttgacgtgcccgcctgtgtgatcgtgaagcacgccaacccctgcggtgtggcgttggccgaggatgcgttgggcgcctataccaaggcgtttcaaaccgaccccacatcggcctttggcggcatcatcgcgctcaacgttgtggtggatgaagcggctgccaaggccattagccagcagtttgtcgaggtgctgatggcgcccgcttataccgagggtgccttggcggtatttcaagccaaagccaatgtgcgcgttttgcaaattacgctgcctgcggcgggtggacagacggcgtgggagcgtgggcgcaacgtgcaagacataaagcgcgtggggtctggtttgttgattcaaacggcagacaaccatgacctgagtttggccgacctcaaagtggtgtccaaagtgcagccgaccgaggcgcagttgcaagacctcttgtttgcgtggaaggtggccacgtatgtgaagtcgaacgcgattgttttctgtaaagaccgcatgaccgtcggcgttggtgcggggcaaatgagccgtttagattcagcgcgaatcgcgcgtatcaaggccgaccatgccggtttgtcattggcgcagtcggtggtcgctagtgatgcgttcttccctttccgagacggtctcgatgtggtggtggaggcgggcgcgactgcggttattcatcccggtggttccatgcgtgatcaagaggtgattgatgcggcggatgagcatggcgtcgcgatggtgtttacgggcgtgcgccacttccgtcactaagccgttgcgggtgttgcttgcgtggccatgttgacctggttggatatctcgcagacggcgagcgatgacgactgggtgaccttagaggtctgcgcgtctgtgacccgtgctgaccagcatcgcgtcgatgctgccgtctgtgagttgcttggttatttgtacgcgcgctgtggccgtcccagcgaagaccccgacgtgccgcccggcccacagtcgtggctgatcgatgtgcaggcgtatgccgagtcggcagccaaagcgccgctggccgtcgccttggattggcgcgacgacgccacggtgtctctgcaatgggtcacagcgggagccgctgacgcgaccacggaagacacccggcgaacccttctcattagtttgggcttgtcacccgcgttagcgttcgcttgcgatgaggcattcgaactggggctctagctgacgccccctaacgcggtgtatgccccgctcgtgggactacagggttgcaaatgtccgctttgccgcggcgatggtgtcgtcaatgtcttgcgcggtgtgcgcggcgctcacaaagccagcctcaaatagcgcgggcgcaaagtaaacaccttggtccaacatgccgtggaagaagcggttaaacaccgcgccgtctgtggtcatgaccttggcgtagttttgtggcaactcagggaagaagaagaagccaaacatgcccccttcgctgtcgccacaaaacgggatacccgcttccttggctgcggcggtcatgccgctgacgagttgttgggtgtgttgattcagttgggtgaaaaagccgtccttttgaatctcttttaaggttgccaaaccgcaggcggtggcgacggggttccctgacaaggtgcccgcttggtagaccgcgccaagtggtgcgaggtgggacatgacttcgcgcttaccgccgaacgcggctaacggcatgccgccgccaatgactttgcccatcacggtcatgtcaggctcaaagcccggaatttctttggcgtacaagctctgagcgcttcccagtgccacgcggaaaccacacatcacttcatcaaatgcgagtagcgctccgtgggcagtgcagagttcgcgacagcgttttacaaatggcacgctggcccgcacgaagttcatgttgccagcaatgggctccatcatcaaacaggcgacttcatcgccgtgttccttaaaggcggcctctagcgcttccacgtcattgaagggcagtactaaagtgtgttgcacaacctctggcgggacgcctgcgctggtggggttaccaaacgtggcgaggccagagccggccttaaccaacagggcatcggcgtggccgtggtagcagccttcaaacttaatgattttgctgcgtcccgtggcgccccgagccagtcgaatggcgctcatgccggcctcggtgcctgagctgaccagtctcaccatttcaatggatggaaccagcttgatgatttcttcggccagttctatttcgcgttcagtcggtgcaccaaatgacagcccttgctctgcagcgctcagcaccgcggcgtgtacggcggggtggcggtgccccaagatcatcgggccccaagagccaatgtagtcaatgtagcgctgatcttctgcgtcccaaaaataggcgccatcgccccgcgtgatgaagcggggtgttccgccgacggctttgaaggcgcgtacgggtgagttaaccccacccggaatggctagcttggcgcgtgtaaataattggtcgtttttgttcatgatgtgtttccggttacgttgcacggttcagtgtttggtgtcgtctagcgggaagtcgcctaacgtgtggtgaccgacatccagcgtcggtgtgtcgggggcgtcggtatcctcggtatcgtctatgccgtcatcttcgccgcgtccccaaaacaagcggtcgggtaaggcgtgtcccatgccgggtgcaaagcctgcatccagactctggtcgagataggtcagcgcttctgcgcaggcggactgcaagtcttcgcctgcacccagcagggccgtgagggcggctgacagggtttc

SEQ ID NO: 29 - DNA, 23242 bp, Artificial Sequence
  Synthetic Oligonucleotide
  misc_feature (1)..(9786): n is a, c, g, or t
nnnnnnnnnnnnnnnnnnnnnnnnnnnnnnnnnnnnnnnnnnnnnnnnnnnnnnnnnnnnnnnnnnnnnnnnnnnnnnnnnnnnnnnnnnnnnnnnnnnnnnnnnnnnnnnnnnnnnnnnnnnnnnnnnnnnnnnnnnnnnnnnnnnnnnnnnnnnnnnnnnnnnnnnnnnnnnnnnnnnnnnnnnnnnnnnnnnnnnnnnnnnnnnnnnnnnnnnnnnnnnnnnnnnnnnnnnnnnnnnnnnnnnnnnnnnnnnnnnnnnnnnnnnnnnnnnnnnnnnnnnnnnnnnnnnnnnnnnnnnnnnnnnnnnnnnnnnnnnnnnnnnnnnnnnnnnnnnnnnnnnnnnnnnnnnnnnnnnnnnnnnnnnnnnnnnnnnnnnnnnnnnnnnnnnnnnnnnnnnnnnnnnnnnnnnnnnnnnnnnnnnnnnnnnnnnnnnnnnnnnnnnnnnnnnnnnnnnnnnnnnnnnnnnnnnnnnnnnnnnnnnnnnnnnnnnnnnnnnnnnnnnnnnnnnnnnnnnnnnnnnnnnnnnnnnnnnnnnnnnnnnnnnnnnnnnnnnnnnnnnnnnnnnnnnnnnnnnnnnnnnnnnnnnnnnnnnnnnnnnnnnnnnnnnnnnnnnnnnnnnnnnnnnnnnnnnnnnnnnnnnnnnnnnnnnnnnnnnnnnnnnnnnnnnnnnnnnnnnnnnnnnnnnnnnnnnnnnnnnnnnnnnnnnnnnnnnnnnnnnnnnnnnnnnnnnnnnnnnnnnnnnnnnnnnnnnnnnnnnnnnnnnnnnnnnnnnnnnnnnnnnnnnnnnnnnnnnnnnnnnnnnnnnnnnnnnnnnnnnnnnnnnnnnnnnnnnnnnnnnnnnnnnnnnnnnnnnnnnnnnnnnnnnnnnnnnnnnnnnnnnnnnnnnnnnnnnnnnnnnnnnnnnnnnnnnnnnnnnnnnnnnnnnnnnnnnnnnnnnnnnnnnnnnnnnnnnnnnnnnnnnnnnnnnnnnnnnnnnnnnnnnnnnnnnnnnnnnnnnnnnnnnnnnnnnnnnnnnnnnnnnnnnnnnnnnnnnnnnnnnnnnnnnnnnnnnnnnnnnnnnnnnnnnnnnnnnnnnnnnnnnnnnnnnnnnnnnnnnnnnnnnnnnnnnnnnnnnnnnnnnnnnnnnnnnnnnnnnnnnnnnnnnnnnnnnnnnnnnnnnnnnnnnnnnnnnnnnnnnnnnnnnnnnnnnnnnnnnnnnnnnnnnnnnnnnnnnnnnnnnnnnnnnnnnnnnnnnnnnnnnnnnnnnnnnnnnnnnnnnnnnnnnnnnnnnnnnnnnnnnnnnnnnnnnnnnnnnnnnnnnnnnnnnnnnnnnnnnnnnnnnnnnnnnnnnnnnnnnnnnnnnnnnnnnnnnnnnnnnnnnnnnnnnnnnnnnnnnnnnnnnnnnnnnnnnnnnnnnnnnnnnnnnnnnnnnnnnnnnnnnnnnnnnnnnnnnnnnnnnnnnnnnnnnnnnnnnnnnnnnnnnnnnnnnnnnnnnnnnnnnnnnnnnnnnnnnnnnnnnnnnnnnnnnnnnnnnnnnnnnnnnnnnnnnnnnnnnnnnnnnnnnnnnnnnnnnnnnnnnnnnnnnnnnnnnnnnnnnnnnnnnnnnnnnnnnnnnnnnnnnnnnnnnnnnnnnnnnnnnnnnnnnnnnnnnnnnnnnnnnnnnnnnnnnnnnnnnnnnnnnnnnnnnnnnnnnnnnnnnnnnnnnnnnnnnnnnnnnnnnnnnnnnnnnnnnnnnnnnnnnnnnnnnnnnnnnnnnnnnnnnnnnnnnnnnnnnnnnnnnnnnnnnnnnnnnnnnnnnnnnnnnnnnnnnnnnnnnnnnnnnnnnnnnnnnnnnnnnnnnnnnnnnnnnnnnnnnnnnnnnnnnnnnnnnnnnnnnnnnnnnnnnnnnnnnnnnnnnnnnnnnnnnnnnnnnnnnnnnnnnnnnnnnnnnnnnnnnnnnnnnnnnnnnnnnnnnnnnnnnnnnnnnnnnnnnnnnnnnnnnnnnnnnnnnnnnnnnnnnnnnnnnnnnnnnnnnnnnnnnnnnnnnnnnnnnnnnnnnnnnnnnnnnnnnnnnnnnnnnnnnnnnnnnnnnnnnnnnnnnnnnnnnnnnnnnnnnnnnnnnnnnnnnnnnnnnnnnnnnnnnnnnnnnnnnnnnnnnnnnnnnnnnnnnnnnnnnnnnnnnnnnnnnnnnnnnnnnnnnnnnnnnnnnnnnnnnnnnnnnnnnnnnnnnnnnnnnnnnnnnnnnnnnnnnnnnnnnnnnnnnnnnnnnnnnnnnnnnnnnnnnnnnnnnnnnnnnnnnnnnnnnnnnnnnnnnnnnnnnnnnnnnnnnnnnnnnnnnnnnnnnnnnnnnnnnnnnnnnnnnnnnnnnnnnnnnnnnnnnnnnnnnnnnnnnnnnnnnnnnnnnnnnnnnnnnnnnnnnnnnnnnnnnnnnnnnnnnnnnnnnnnnnnnnnnnnnnnnnnnnnnnnnnnnnnnnnnnnnnnnnnnnnnnnnnnnnnnnnnnnnnnnnnnnnnnnnnnnnnnnnnnnnnnnnnnnnnnnnnnnnnnnnnnnnnnnnnnnnnnnnnnnnnnnnnnnnnnnnnnnnnnnnnnnnnnnnnnnnnnnnnnnnnnnnnnnnnnnnnnnnnnnnnnnnnnnnnnnnnnnnnnnnnnnnnnnnnnnnnnnnnnnnnnnnnnnnnnnnnnnnnnnnnnnnnnnnnnnnnnnnnnnnnnnnnnnnnnnnnnnnnnnnnnnnnnnnnnnnnnnnnnnnnnnnnnnnnnnnnnnnnnnnnnnnnnnnnnnnnnnnnnnnnnnnnnnnnnnnnnnnnnnnnnnnnnnnnnnnnnnnnnnnnnnnnnnnnnnnnnnnnnnnnnnnnnnnnnnnnnnnnnnnnnnnnnnnnnnnnnnnnnnnnnnnnnnnnnnnnnnnnnnnnnnnnnnnnnnnnnnnnnnnnnnnnnnnnnnnnnnnnnnnnnnnnnnnnnnnnnnnnnnnnnnnnnnnnnnnnnnnnnnnnnnnnnnnnnnnnnnnnnnnnnnnnnnnnnnnnnnnnnnnnnnnnnnnnnnnnnnnnnnnnnnnnnnnnnnnnnnnnnnnnnnnnnnnnnnnnnnnnnnnnnnnnnnnnnnnnnnnnnnnnnnnnnnnnnnnnnnnnnnnnnnnnnnnnnnnnnnnnnnnnnnnnnnnnnnnnnnnnnnnnnnnnnnnnnnnnnnnnnnnnnnnnnnnnnnnnnnnnnnnnnnnnnnnnnnnnnnnnnnnnnnnnnnnnnnnnnnnnnnnnnnnnnnnnnnnnnnnnnnnnnnnnnnnnnnnnnnnnnnnnnnnnnnnnnnnnnnnnnnnnnnnnnnnnnnnnnnnnnnnnnnnnnnnnnnnnnnnnnnnnnnnnnnnnnnnnnnnnnnnnnnnnnnnnnnnnnnnnnnnnnnnnnnnnnnnnnnnnnnnnnnnnnnnnnnnnnnnnnnnnnnnnnnnnnnnnnnnnnnnnnnnnnnnnnnnnnnnnnnnnnnnnnnnnnnnnnnnnnnnnnnnnnnnnnnnnnnnnnnnnnnnnnnnnnnnnnnnnnnnnnnnnnnnnnnnnnnnnnnnnnnnnnnnnnnnnnnnnnnnnnnnnnnnnnnnnnnnnnnnnnnnnnnnnnnnnnnnnnnnnnnnnnnnnnnnnnnnnnnnnnnnnnnnnnnnnnnnnnnnnnnnnnnnnnnnnnnnnnnnnnnnnnnnnnnnnnnnnnnnnnnnnnnnnnnnnnnnnnnnnnnnnnnnnnnnnnnnnnnnnnnnnnnnnnnnnnnnnnnnnnnnnnnnnnnnnnnnnnnnnnnnnnnnnnnnnnnnnnnnnnnnnnnnnnnnnnnnnnnnnnnnnnnnnnnnnnnnnnnnnnnnnnnnnnnnnnnnnnnnnnnnnnnnnnnnnnnnnnnnnnnnnnnnnnnnnnnnnnnnnnnnnnnnnnnnnnnnnnnnnnnnnnnnnnnnnnnnnnnnnnnnnnnnnnnnnnnnnnnnnnnnnnnnnnnnnnnnnnnnnnnnnnnnnnnnnnnnnnnnnnnnnnnnnnnnnnnnnnnnnnnnnnnnnnnnnnnnnnnnnnnnnnnnnnnnnnnnnnnnnnnnnnnnnnnnnnnnnnnnnnnnnnnnnnnnnnnnnnnnnnnnnnnnnnnnnnnnnnnnnnnnnnnnnnnnnnnnnnnnnnnnnnnnnnnnnnnnnnnnnnnnnnnnnnnnnnnnnnnnnnnnnnnnnnnnnnnnnnnnnnnnnnnnnnnnnnnnnnnnnnnnnnnnnnnnnnnnnnnnnnnnnnnnnnnnnnnnnnnnnnnnnnnnnnnnnnnnnnnnnnnnnnnnnnnnnnnnnnnnnnnnnnnnnnnnnnnnnnnnnnnnnnnnnnnnnnnnnnnnnnnnnnnnnnnnnnnnnnnnnnnnnnnnnnnnnnnnnnnnnnnnnnnnnnnnnnnnnnnnnnnnnnnnnnnnnnnnnnnnnnnnnnnnnnnnnnnnnnnnnnnnnnnnnnnnnnnnnnnnnnnnnnnnnnnnnnnnnnnnnnnnnnnnnnnnnnnnnnnnnnnnnnnnnnnnnnnnnnnnnnnnnnnnnnnnnnnnnnnnnnnnnnnnnnnnnnnnnnnnnnnnnnnnnnnnnnnnnnnnnnnnnnnnnnnnnnnnnnnnnnnnnnnnnnnnnnnnnnnnnnnnnnnnnnnnnnnnnnnnnnnnnnnnnnnnnnnnnnnnnnnnnnnnnnnnnnnnnnnnnnnnnnnnnnnnnnnnnnnnnnnnnnnnnnnnnnnnnnnnnnnnnnnnnnnnnnnnnnnnnnnnnnnnnnnnnnnnnnnnnnnnnnnnnnnnnnnnnnnnnnnnnnnnnnnnnnnnnnnnnnnnnnnnnnnnnnnnnnnnnnnnnnnnnnnnnnnnnnnnnnnnnnnnnnnnnnnnnnnnnnnnnnnnnnnnnnnnnnnnnnnnnnnnnnnnnnnnnnnnnnnnnnnnnnnnnnnnnnnnnnnnnnnnnnnnnnnnnnnnnnnnnnnnnnnnnnnnnnnnnnnnnnnnnnnnnnnnnnnnnnnnnnnnnnnnnnnnnnnnnnnnnnnnnnnnnnnnnnnnnnnnnnnnnnnnnnnnnnnnnnnnnnnnnnnnnnnnnnnnnnnnnnnnnnnnnnnnnnnnnnnnnnnnnnnnnnnnnnnnnnnnnnnnnnnnnnnnnnnnnnnnnnnnnnnnnnnnnnnnnnnnnnnnnnnnnnnnnnnnnnnnnnnnnnnnnnnnnnnnnnnnnnnnnnnnnnnnnnnnnnnnnnnnnnnnnnnnnnnnnnnnnnnnnnnnnnnnnnnnnnnnnnnnnnnnnnnnnnnnnnnnnnnnnnnnnnnnnnnnnnnnnnnnnnnnnnnnnnnnnnnnnnnnnnnnnnnnnnnnnnnnnnnnnnnnnnnnnnnnnnnnnnnnnnnnnnnnnnnnnnnnnnnnnnnnnnnnnnnnnnnnnnnnnnnnnnnnnnnnnnnnnnnnnnnnnnnnnnnnnnnnnnnnnnnnnnnnnnnnnnnnnnnnnnnnnnnnnnnnnnnnnnnnnnnnnnnnnnnnnnnnnnnnnnnnnnnnnnnnnnnnnnnnnnnnnnnnnnnnnnnnnnnnnnnnnnnnnnnnnnnnnnnnnnnnnnnnnnnnnnnnnnnnnnnnnnnnnnnnnnnnnnnnnnnnnnnnnnnnnnnnnnnnnnnnnnnnnnnnnnnnnnnnnnnnnnnnnnnnnnnnnnnnnnnnnnnnnnnnnnnnnnnnnnnnnnnnnnnnnnnnnnnnnnnnnnnnnnnnnnnnnnnnnnnnnnnnnnnnnnnnnnnnnnnnnnnnnnnnnnnnnnnnnnnnnnnnnnnnnnnnnnnnnnnnnnnnnnnnnnnnnnnnnnnnnnnnnnnnnnnnnnnnnnnnnnnnnnnnnnnnnnnnnnnnnnnnnnnnnnnnnnnnnnnnnnnnnnnnnnnnnnnnnnnnnnnnnnnnnnnnnnnnnnnnnnnnnnnnnnnnnnnnnnnnnnnnnnnnnnnnnnnnnnnnnnnnnnnnnnnnnnnnnnnnnnnnnnnnnnnnnnnnnnnnnnnnnnnnnnnnnnnnnnnnnnnnnnnnnnnnnnnnnnnnnnnnnnnnnnnnnnnnnnnnnnnnnnnnnnnnnnnnnnnnnnnnnnnnnnnnnnnnnnnnnnnnnnnnnnnnnnnnnnnnnnnnnnnnnnnnnnnnnnnnnnnnnnnnnnnnnnnnnnnnnnnnnnnnnnnnnnnnnnnnnnnnnnnnnnnnnnnnnnnnnnnnnnnnnnnnnnnnnnnnnnnnnnnnnnnnnnnnnnnnnnnnnnnnnnnnnnnnnnnnnnnnnnnnnnnnnnnnnnnnnnnnnnnnnnnnnnnnnnnnnnnnnnnnnnnnnnnnnnnnnnnnnnnnnnnnnnnnnnnnnnnnnnnnnnnnnnnnnnnnnnnnnnnnnnnnnnnnnnnnnnnnnnnnnnnnnnnnnnnnnnnnnnnnnnnnnnnnnnnnnnnnnnnnnnnnnnnnnnnnnnnnnnnnnnnnnnnnnnnnnnnnnnnnnnnnnnnnnnnnnnnnnnnnnnnnnnnnnnnnnnnnnnnnnnnnnnnnnnnnnnnnnnnnnnnnnnnnnnnnnnnnnnnnnnnnnnnnnnnnnnnnnnnnnnnnnnnnnnnnnnnnnnnnnnnnnnnnnnnnnnnnnnnnnnnnnnnnnnnnnnnnnnnnnnnnnnnnnnnnnnnnnnnnnnnnnnnnnnnnnnnnnnnnnnnnnnnnnnnnnnnnnnnnnnnnnnnnnnnnnnnnnnnnnnnnnnnnnnnnnnnnnnnnnnnnnnnnnnnnnnnnnnnnnnnnnnnnnnnnnnnnnnnnnnnnnnnnnnnnnnnnnnnnnnnnnnnnnnnnnnnnnnnnnnnnnnnnnnnnnnnnnnnnnnnnnnnnnnnnnnnnnnnnnnnnnnnnnnnnnnnnnnnnnnnnnnnnnnnnnnnnnnnnnnnnnnnnnnnnnnnnnnnnnnnnnnnnnnnnnnnnnnnnnnnnnnnnnnnnnnnnnnnnnnnnnnnnnnnnnnnnnnnnnnnnnnnnnnnnnnnnnnnnnnnnnnnnnnnnnnnnnnnnnnnnnnnnnnnnnnnnnnnnnnnnnnnnnnnnnnnnnnnnnnnnnnnnnnnnnnnnnnnnnnnnnnnnnnnnnnnnnnnnnnnnnnnnnnnnnnnnnnnnnnnnnnnnnnnnnnnnnnnnnnnnnnnnnnnnnnnnnnnnnnnnnnnnnnnnnnnnnnnnnnnnnnnnnnnnnnnnnnnnnnnnnnnnnnnnnnnnnnnnnnnnnnnnnnnnnnnnnnnnnnnnnnnnnnnnnnnnnnnnnnnnnnnnnnnnnnnnnnnnnnnnnnnnnnnnnnnnnnnnnnnnnnnnnnnnnnnnnnnnnnnnnnnnnnnnnnnnnnnnnnnnnnnnnnnnnnnnnnnnnnnnnnnnnnnnnnnnnnnnnnnnnnnnnnnnnnnnnnnnnnnnnnnnnnnnnnnnnnnnnnnnnnnnnnnnnnnnnnnnnnnnnnnnnnnnnnnnnnnnnnnnnnnnnnnnnnnnnnnnnnnnnnnnnnnnnnnnnnnnnnnnnnnnnnnnnnnnnnnnnnnnnnnnnnnnnnnnnnnnnnnnnnnnnnnnnnnnnnnnnnnnnnnnnnnnnnnnnnnnnnnnnnnnnnnnnnnnnnnnnnnnnnnnnnnnnnnnnnnnnnnnnnnnnnnnnnnnnnnnnnnnnnnnnnnnnnnnnnnnnnnnnnnnnnnnnnnnnnnnnnnnnnnnnnnnnnnnnnnnnnnnnnnnnnnnnnnnnnnnnnnnnnnnnnnnnnnnnnnnnnnnnnnnnnnnnnnnnnnnnnnnnnnnnnnnnnnnnnnnnnnnnnnnnnnnnnnnnnnnnnnnnnnnnnnnnnnnnnnnnnnnnnnnnnnnnnnnnnnnnnnnnnnnnnnnnnnnnnnnnnnnnnnnnnnnnnnnnnnnnnnnnnnnnnnnnnnnnnnnnnnnnnnnnnnnnnnnnnnnnnnnnnnnnnnnnnnnnnnnnnnnnnnnnnnnnnnnnnnnnnnnnnnnnnnnnnnnnnnnnnnnnnnnnnnnnnnnnnnnnnnnnnnnnnnnnnnnnnnnnnnnnnnnnnnnnnnnnnnnnnnnnnnnnnnnnnnnnnnnnnnnnnnnnnnnnnnnnnnnnnnnnnnnnnnnnnnnnnnnnnnnnnnnnnnnnnnnnnnnnnnnnnnnnnnnnnnnnnnnnnnnnnnnnnnnnnnnnnnnnnnnnnnnnnnnnnnnnnnnnnnnnnnnnnnnnnnnnnnnnnnnnnnnnnnnnnnnnnnnnnnnnnnnnnnnnnnnnnnnnnnnnnnnnnnnnnnnnnnnnnnnnnnnnnnnnnnnnnnnnnnnnnnnnnnnnnnnnnnnnnnnnnnnnnnnnnnnnnnnnnnnnnnnnnnnnnnnnnnnnnnnnnnnnnnnnnnnnnnnnnnnnnnnnnnnnnnnnnnnnnnnnnnnnnnnnnnnnnnnnnnnnnnnnnnnnnnnnnnnnnnnnnnnnnnnnnnnnnnnnnnnnnnnnnnnnnnnnnnnnnnnnnnnnnnnnnnnnnnnnnnnnnnnnnnnnnnnnnnnnnnnnnnnnnnnnnnnnnnnnnnnnnnnnnnnnnnnnnnnnnnnnnnnnnnnnnnnnnnnnnnnnnnnnnnnnnnnnnnnnnnnnnnnnnnnnnnnnnnnnnnnnnnnnnnnnnnnnnnnnnnnnnnnnnnnnnnnnnnnnnnnnnnnnnnnnnnnnnnnnnnnnnnnnnnnnnnnnnnnnnnnnnnnnnnnnnnnnnnnnnnnnnnnnnnnnnnnnnnnnnnnnnnnnnnnnnnnnnnnnnnnnnnnnnnnnnnnnnnnnnnnnnnnnnnnnnnnnnnnnnnnnnnnnnnnnnnnnnnnnnnnnnnnnnnnnnnnnnnnnnnnnnnnnnnnnnnnnnnnnnnnnnnnnnnnnnnnnnnnnnnnnnnnnnnnnnnnnnnnnnnnnnnnnnnnnnnnnnnnnnnnnnnnnnnnnnnnnnnnnnnnnnnnnnnnnnnnnnnnnnnnnnnnnnnnnnnnnnnnnnnnnnnnnnnnnnnnnnnnnnnnnnnnnnnnnnnnnnnnnnnnnnnnnnnnnnnnnnnnnnnnnnnnnnnnnnnnnnnnnnnnnnnnnnnnnnnnnnnnnnnnnnnnnnnnnnnnnnnnnnnnnnnnnnnnnnnnnnnnnnnnnnnnnnnnnnnnnnnnnnnnnnnnnnnnnnnnnnnnnnnnnnnnnnnnnnnnnnnnnnnnnnnnnnnnnnnnnnnnnnnnnnnnnnnnnnnnnnnnnnnnnnnnnnnnnnnnnnnnnnnnnnnnnnnnnnnnnnnnnnnnnnnnnnnnnnnnnnnnnnnnnnnnnnnnnnnnnnnnnnnnnnnnnnnnnnnnnnnnnnnnnnnnnnnnnnnnnnnnnnnnnnnnnnnnnnnnnnnnnnnnnnnnnnnnnnnnnnnnnnnnnnnnnnnnnnnnnnnnnnnnnnnnnnnnnnnnnnnnnnnnnnnnnnnnnnnnnnnnnnnnnnnnnnnnnnnnnnnnnnnnnnnnnnnnnnnnnnnnnnnnnnnnnnnnnnnnnnnnnnnnnnnnnnnnnnnnnnnnnnnnnnnnnnnnnnnnnnnnnnnnnnnnnnnnnnnnnnnnnnnnnnnnnnnnnnnnnnnnnnnnnnnnnnnnnnnnnnnnnnnnnnnnnnnnnnnnnnnnnnnnnnnnnnnnnnnnnnnnnnnnnnnnnnnnnnnnnnnnnnnnnnnnnnnnnnnnnnnnnnnnnnnnnnnnnnnnnnnnnnnnnnnnnnnnnnnnnnnnnnnnnnnnnnnnnnnnnnnnnnnnnnnnnnnnnnnnnnnnnnnnnnnnnnnnnnnnnnnnnnnnnnnnnnnnnnnnnnnnnnnnnnnnnnnnnnnnnnnnnnnnnnnnnnnnnnnnnnnnnnnnnnnnnnnnnnnnnnnnnnnnnnnnnnnnnnnnnnnnnnnnnnnnnnnnnnnnnnngatcaagccaccctctaaatgggtggttactagaactatgccgtccagcccgttcgtttcaagccttgatcaagccaccctctaaatgggtggttattagaaccaatcaaatatctacgcctaccgtaaaaatgatcaagccaccctctaaatgggtggttacttatttacagacataccatgggccgccgtgcccttattaggagttcaccgatgtttcgttcctcagagcagcagcatttctgcaatgtgcttattaagcatttgaaacgcgtcgatgcgcccatattgctggaaggcggggtgggtcttgggaagacgcgtgcctacctggccgcactggcaactacgacgcaaacggttgccattgtgttacccacacaccaactgattgaccagttgctggctagcgctgacttgtcagccgttgccttgccattggccgtgttcaggccagccagtcggtttgacacacgggaggcgtaccaagcgcagcgagaggcggcccgtgctgcgcgtgtcatgctctgcaccgctgcaagcgtgattattgaccaacgccttgcgggggcttacaacggcgcaacacagcgtgatgtggtgttatttgatgaagccgaccagttacccgatatggcggcattgcagagcgactttgtgattgaggcggcgctactgcagggccagccgctgcacgcggccttagagcgcataagcaccacccgttcacagtcggttgaggccgagcaaaaggctgctgcgcgggtcatgcttgagatattggccgaaccggtgggctacgcatccgtcgggcttgatgatgatggcaatgcgcggctacaccacgccctgccaggtcgcttattaaagaaaattagcaatcgcggtagcacggtgtttctttctgcaacgctgacccacaacgataagtttgatgacttcaagatcgccatgggcctagacgcggtgagtagcctgtcaacaagcattgagccagaacagcatggcacgctcgacttcaccgtacacgcgcacgaggtggacacgcctgactggtttgcggccaccgttcagtgcatacaaagcgcgcagcgccccacgttggtggtcacacctagccatgacctcacagagcggctacaaaccgccgtgggtgagcaagcagacttgcttatacgtgcgggtgcatgggcgggtcttgacacgccaacgcgctggcgtaccgtggttattccgcgcgtgccatttggcgcaccagtcattgttgacggggtggcggtcacgtcttacttggccgccaaggtgacggccagtcggcggatgcgccaagcaattggccgtgggcttagaacacctgaggcggtgtgcacggttgtggttttggatgcgcgggcacacaacttaggtcgctttgtgccagagcgttttgcggcagattggtcgtctcggcaagtgtttgaggagggtgcccgccatgcggtggtgctgtccaaagcggagcgcgaccccgctttggccaaagccgcgctcagacactacggcgctcaatgccaacaagcgggttgttccgtgacagaggcgtgtcagctggacgtgcaccaccttgaccccgtaagcgaaggcgtgcgccgcacaaccttgaaggatgtgaccgtgctgtgtgcaaaccaccaccgacaggcccaccacgacatgaaaatggggctgaacgtgtcgtagcgcaacaaaaaacccgccatacctttgggtacgcgggttttgggagttctggcaaggcctgaaacctaaatgtggtggtgataggtggacttgaaccaccgaccccagcattatgaatgctgtgctctaaccaactgagctatatcaccgagcctgaaattatagccaaaattctcagggctttggcttgccgccaaaagtttttgttagccattttgtcgcgcccgtacgacgcgccaagcccttggttattggtgtttgaaggcgggtttgcgcttgtttatgaacgcatccatgccctctttttggtcttcggttgcaaacagcgcgtggaacagacggcgctcaaaacgcacgccttcgctgaggctgccttcaaacgcttggttcaccgcttcctttgccgccatgacactggggagggagtagttgcaaatcatcagggctgcgcccaaggcctcggtcatgagttggtcatcggcgaccacgcggctcaccagtccgccgcgctcggcttctgcagcgtccatcatgcggcctgtgagggccatgtccatggccttggctttgccaacggcgcgtggcaggcgctgcgtgccacctgcgccagggataacgcccaacttgatttcgggttggccaaatttggcgctctcgctggcaatgatgacgtcgcacatcatggccaattcacagccgccgccgagggcaaagccgctgacggcggcaataacgggcttgcgaacgctgcgaatggtttcccagttgcgcgtgatgtagtctgacttgtagacgtcagcaaaggtgtaggtcgccatagcgccaatgtcggcacccgcggcaaaggctttttcactgcctgtgagcacaatgcagccaatgtccgggtcggcgtcgaatgcggttagcgccgcgccaagctcgtccattagcgcactgttgagggcattgagttgtttgggacggtttagggtgagtatgcccacgcggccttcgatgcggattaaaaccagttgctcactcatgtctgtgttctccaatgtggtgcgaaaagttgcttagaaaaagttgtttcgaaagttgcttcgacgtaagcggttgatcatagccaagcggtgagcttgctagggtctttcaccaccagttcggcgatctggttggcgtgggtcgatggccagatgagggggcacgacaacatgcggccatcgcgcgcgacaccggcaaccaatgggtgctgggctacgtcggcgtggcgtctcgcaatgttctccacatcgctcagtgactttacccgccattgatcggtgccatcaaatagtgtcacccattcgtcacccgccgccatgcccgcttgttcgcctgcaccgcctcttgccacgtgggtgatgcggatgccgtctcgctcaacgacacgcatgcccaagcgctgggcgagggtgccgctcttggccgccacggcgacaccgtaatgactaagcagtgcgtgtaccggcaggtcttcggtgctgtgtacccagtgcgcgagctgtgtggcgacgttggcgtgcccttgctggttgagcagggcgtagatgtcggcctcactgatggtgccgcctttgcttttgacccataggccgcgcatgagggtgtcgagatcgccgccttgttggcgcagcatgaggtcggtgcacagcgctattagcgcccctttggtgtagtagctaacggtggcgttgggcgtgttttcgccaatgcggtagtacttgacccacgcgtcatagctagactgggcaacgctttgcagatgccgccctggggtggccgcaacgtggttaatggatttggccagcagcgtgagataggtgggcgtatcaatgagtttggcgcgttgcagaaacaggtcatcgtagtagctggtaaagccttcaaagaaccacagcagctcggtgtagttctcttggttgaagtcgatgcttgcaaactcggatgggcgcaggcgcttgacgttccatgtgtgaaagtactcatggctaatgaggccaagtaattggttgtagccagcgccttgtgcatgggggggcgctgcctcgccagcgacggccgttaggggcaagtcggcacgctggcaaatgagtgcggtgctggcgatgtgctctagcccgccgtagccgttttcagtggcgtgaagcatgaagacgtagcggtcaaagggtagttggcgttgcggttgtttgccgtgccaaaacgtgatctctgtttcgcaaattcggcgggtgtcggcaactaattttttgacatcaaacccgggcgcggtgtggttgccaatgcccgtgacaacgagttcatgcggtacgccagagaccttaaaccggctgacgtaaaaatcacccaaggtaaagggactgtcggcgagctcgccgcagttgcgggcggtgtagcgcccgaagccacgcgcgtcgatttgccgcgcgggcaatgcggtagacagccgccacgcattgaacgcgggcgcggtggggcgctcgacggagatggtttgtatctcgtcttcgcccccgaccacttgcaaacacaggctggtggggttaaagaagccgcgggtgttgtccaaaaaggcggttcgcaccgaggcgtcaaaggcgtagatttggtaattgagctccagcgggcgtttgccgtcggattccactagccactcatttttactgcactgcgtgatttggcaaggcgtgcggccttgcttggctgtgagcgcttgcaggtgttgcgaaaattcacgcaccaaataactacccgcaatccaaacgggtagacgcaggcgctgttgcttttttgggcttgagatgcgcagatgcacaccgaacaggtgcgcttccgcgctgtcaacgcgaatgttgtgatcgatgcgcatggtgttacttgatggcggccagacgcttctcaacttcggcggcagaaatggcgccggggacacgtgtgccgtctgagaagaaaagggcaggcgtgcccgagatacggtgcttttgaccaaacgcgatgttgcggtcaagcgcgctggtgtcgcagctgatggcggcggcgctggtggttagagggacttcattcaccatccagtcttcaaaggctacgccggggtttttgtcgcaccaaatggccttggacttgagcgttgaatccgcgccgagtatggggtacaaaaagatatgcagggtgatgttgtcgacattcatcatgtcacgttcaaagcgcttgcagaagccacagttggggtcttcaaaaaccgcgagttgacgcttgccgttaccgcgtttgatggtgaaggcatctttaaagggcagggcctcaaagggtattgcgctcaatttatcgaggcgctcctgcgtcaggttgcgtttgcccttgaggtcaacgagtacgccttgcagcaaaaattcaccgttggcatcggtgtacaaaatttcggtttcaccaaagcgaacttcgtagaggccggccatgggggtcttggtgacgctgttgatagcgggtaagttgggtagttgcttgggtagcatctcgcgaatcttggcttcctgtgcccagcccatgcttgccatgagagtgaatgcgatgcccacggccaagccgcgcaataaagagcgtgtgggggtgggtgcgagaggtgacgtgtggtgaagcatggtgtggttcgctaggtaggcgttgtttgggggtaagagggtgggtgggttggttcgtgggagggggctgttgggtagcggatgctcgctgttggagcaccatcgtggcaatcagttccccatgccaacacgctgtacccacgacttgagtgggcccatggcattaaagcccgacatgcctgcattgcgtagccaactggcggcggggttgcggcccaaggggttgttgaacaagtgaaagagtccgtgcgtgacccattgcatgggttcggtggcggcgcgtcgacgccgttggtagcgctgaagcacgcgtgaggcacccggagactcacctcgggcgcgtgccgcaacgcagtcactgagcgtttgtacgtcggccaagccaaggttgagaccttgccctgcgagggggtggatggtgtgcgccgcatcgccggctaacgcggtctgctgggcaacccattgcgtggttaagccgacgctcaaggggaaggcaacaggcccgctggtaagggagaggtgccctagcgcgccctgactggcttgggtgagttggtcttctagggcggcggtttgggcggtggtctccatgtccagccacgtctggtgcgcagcgtctggtagcgaccagacaacggccaggtcgtgcccgtcagcgccgcccatgggcagcagggccaaaatatgtgtgccgttaaaccactggtgggcgacgccgccgtggctgtgctcggcgcgcatgcgcaacgccaaggcacggtgggggtagtgcttacttaccatgtcaatacccaaggcggtgcgcgcgataccgctcttgccttcgcaaatgatggtcaatgcgctaggcggtgtctgggctgatggtgacgcgtggtcgtcaaattgcacgcgtgcatggcgtgtgacggcttcggcaagatggtcctctaggacaggcacatcgaccatccacgccaagggctgcgcttgctgtgggggtgcgtcgaattgcagcgcgcctgacgcatcgccaaacacccgcatatgggtcatgggggtcagccacgcggcctgatcgtcttgaggccagacaccgcatgctttgagggtgtctctcgaggtgtggttgatggcgtaggcgcgaatgtcgcgggtgtgcggtggcgcttggggcgcgggcaggctgacggaaaagccttgctctgccaataacaatgccgccgcgtgcgcggtgatgccagcgcctaaaacggtgatgtgccctgattgagtcatggcgttattctattgggacacccacttggggggccagcgatgaccctgccccggaagtgccttaaactctgggtcttgctttttgaggattgtcatgagtttgaaatgcggcatcgttggtctgcccaacgtcggtaaatctaccctgtttaacgcgcttaccaaggctggtatcgccgctgagaactaccctttttgcaccatcgagcccaacgttggcgtggtggaggtgcccgacacccgcctagcgcagctcagcgatatcgtgacgcctgagcgcattgttcctgcgattgttgaatttgtggatatagccggcttggtggcgggtgccagtacgggcgagggcttgggtaacaagtttttggcccatatccgcgaaaccgatgccacggttaacgttgtgcgttgttttgaagatgacaacgtggtgcacgtcgcgggcaaggtggatccgatttctgacattgaggtgattcaaacggagttgtgccttgccgacttaggcgcagtagagaaagccctgcaccgggtctccaagaccgcgcgttctggcgacaaagagtcggtgcgcttggtgtcgattttggagcgctgtcaggcggccttaaacgagggcaagcctgttcgcacgctagatttcagcaaagaagaagcgccgctgcttaagcagtttttcttgattacggccaagccagcgatgttcgttgcgaacgtgtctgaggatggctttgagaacaaccccctgcttgaccgcttgaccgcctttgccaacgagcagaacgcgcctgtggtggcgatctgcgccaagctagaggccgagatgagcgagatgagcgacgaggaccgcgatatgttcctggaagagctggggcagtccgagccgggcttaaaccgtctgatccgtgccgcctacagtttgttgggtttgcagacctacttcactgcgggtgtaaaagaggtgcgcgcttggactatccacgttggggatacggggccgcaggcggccggtgtgatccacactgatttcgaaaagggctacattcgcgcccaaaccattgcctttgatgacttcattgcattcaagggcgagcagggcgctaaggacgcgggcaagatgcgcgcagaaggcaaggagtatgtcgtgaaagacggcgatgtactcaacttcttgttcagctcataagccactgcgcactcgcggcaatggcaaggtagcgggcgaacttgccaatggccatgtacaccgcgcaggccagccagggcattcttagccagcctgcgagggtgcacaccacatcgccgaccacgggtagccaagccagcaaacacgccttgggtccgagtttttccagttgagccaaagcccacgcggcgagcctgccagccgttggggtggcctgagcatccgcgcgtcggtgcgggtgcgcacggttttggtaggcgcggtgcgctgattgcaggccaacgcccatcagccaactcaccatgccacccaaggtgttgcctaccgtcgctagtaacaaggcgggccaaaatagatggggtgagatggcgatgagacccattaatgccgcctccgaccccatgggaagccacgtcgcggagacgaatgccgtgacaaaaacggtagtcaacccccattcgggcagactgaaccagtgaagtaagctcgcaaaaaaggcatccattggcttgagtataggtacaatcatgcttaaattttcagcaagcaccgacgcgtcaatcggtgcttttttgtctctaactgccgtccaacgtgcatatcggtccctaccacctccgcaataacctgttcgtcgcgcctatggctggcgtgacagaccgcccgtttcgccagttgtgtaagcaactgggcgcgggctatgccgtgagcgaaatggtgacatcgcggcgcgatttgtgggactcgcttaaaacctcacgccgtgcaaatcacgccggtgagagcgggcccattgcggttcaaattgcggggaccgacgcccagatgatggccgatgccgcggtgtacaacattgaccgtggcgcacaaattattgatatcaacatggggtgccccgcaaaaaaggtgtgcaacaagtgggccggttctgcgttgatgcaagacgagaccttggcgatcgccattgtcgaagcggtggtgaacgcctgcgcctctaaggatgtcccggtgacattaaagatgcggacgggttgggcggcgcatgcgaagaatgccacgcggttggcgctggcggcggagcaagtgggggtgcagatgttgacgattcacggtcgcacgcgcgagcaaggctataagggttttgcagagcatgagacggtggcggacattaagtcgcgggtgcgtattcccgtggtggccaatggggatattgcatcgcccgaggcggcgcaacgtgtgttgcaagccacgggggccgatgcggtgatggtgggacgcgccgcgcaagggcgcccatggatatttagtgagatcgctcattttttagccaccggacgccacgcgccagcgcccagcgctgtggatatgcgggcgtggatggtggagcacctgcacgcgcactacgcgctttacggcgaatttacaggcgttcggtctgcgcgcaagcaccttggttggtatgcccaacacttgcccatgggtgagcttttgcgtcagcgcatcaatgccttaaccgattgcgcggagcagttggctgcagtcgaggcgtatttcgcagcgtgggacagtgatgatctggccgcgcttggtcgggcatggcaaccgacacagataccgggcagcgcgcagagccagtctgtgcgagagatgcctgtcgacatgacattggccccccttcattgagcgttatatgagccgtaaagacattgaaaagggcgtgcgtgaaagcatgcaaacctacttccaagacctcgccggtagcgagccacatggcctgtacgacatgatggttgatgttgtggagaagcccttgctggaggtggtgatggcgcaagcaggcaataaccagtctcgcgcggcgcagtggcttggtctcaatcgcaacaccttgcgcaaaaaattacttcaccacaagttactcagttaacgctgcaaacgcggcggcctaactcgtcatttccccctttatttttcacgactaccaagcaccatgaacgcactcttatctgtatccgacaaaaccggcattgtggcccttgcgcgcgcgctccacgcccaaggcattggcctgctgtctactggcggcacggccaagctgttggcggaagagggcctgcccgttaccgaggtggccgatacgaccggctttccagaaatgctcgatggtcgcgtcaaaaccttgcaccccaaggtgcacggcggcttgttggctagacgtgacgtgccagcgcacatggcggcgttggccgctcacgggatcgataccattgacgtgttggttgtgaacctgtacccctttgaggcgacggtggccaaagcgggttgcaccttggaagaggccattgagaacatcgatattggcggccccgcgatggtgcgtagtgctgccaaaaactggaaggacgtcgcggttttaacggatgccagccaatacgagaccgtcattgccgagctcgccgctaacggcgcggtgtctaccccgacgaagtttgcgctgtccgtggcggcgtttaaccgcatcagcaattacgatgcggcgatcagcgactacctgtcggcgtatcagttggagagcgataccttacaagcgttccctgcacaggcgaacggacgttttgtgaagttgcaagacctgcgttacggcgagaatccgcaccaatcagcagcgttttaccgtgacctacaccccgcgcccggctcgctggtaacggcgaaacagttgcaaggtaaggagctgtcctataacaacatcgccgatgcggatgcggcatgggagtgcgtgaaaagctttgacgtgcccgcctgtgtgatcgtgaagcacgccaacccctgcggtgtggcgttggccgaggatgcgttgggcgcctataccaaggcgtttcaaaccgaccccacatcggcctttggcggcatcatcgcgctcaacgttgtggtggatgaagcggctgccaaggccattagccagcagtttgtcgaggtgctgatggcgcccgcttataccgagggtgccttggcggtatttcaagccaaagccaatgtgcgcgttttgcaaattacgctgcctgcggcgggtggacagacggcgtgggagcgtgggcgcaacgtgcaagacataaagcgcgtggggtctggtttgttgattcaaacggcagacaaccatgacctgagtttggccgacctcaaagtggtgtccaaagtgcagccgaccgaggcgcagttgcaagacctcttgtttgcgtggaaggtggccacgtatgtgaagtcgaacgcgattgttttctgtaaagaccgcatgaccgtcggcgttggtgcggggcaaatgagccgtttagattcagcgcgaatcgcgcgtatcaaggccgaccatgccggtttgtcattggcgcagtcggtggtcgctagtgatgcgttcttccctttccgagacggtctcgatgtggtggtggaggcgggcgcgactgcggttattcatcccggtggttccatgcgtgatcaagaggtgattgatgcggcggatgagcatggcgtcgcgatggtgtttacgggcgtgcgccacttccgtcactaagccgttgcgggtgttgcttgcgtggccatgttgacctggttggatatctcgcagacggcgagcgatgacgactgggtgaccttagaggtctgcgcgtctgtgacccgtgctgaccagcatcgcgtcgatgctgccgtctgtgagttgcttggttatttgtacgcgcgctgtggccgtcccagcgaagaccccgacgtgccgcccggcccacagtcgtggctgatcgatgtgcaggcgtatgccgagtcggcagccaaagcgccgctggccgtcgccttggattggcgcgacgacgccacggtgtctctgcaatgggtcacagcgggagccgctgacgcgaccacggaagacacccggcgaacccttctcattagtttgggcttgtcacccgcgttagcgttcgcttgcgatgaggcattcgaactggggctctagctgacgccccctaacgcggtgtatgccccgctcgtgggactacagggttgcaaatgtccgctttgccgcggcgatggtgtcgtcaatgtcttgcgcggtgtgcgcggcgctcacaaagccagcctcaaatagcgcgggcgcaaagtaaacaccttggtccaacatgccgtggaagaagcggttaaacaccgcgccgtctgtggtcatgaccttggcgtagttttgtggcaactcagggaagaagaagaagccaaacatgcccccttcgctgtcgccacaaaacgggatacccgcttccttggctgcggcggtcatgccgctgacgagttgttgggtgtgttgattcagttgggtgaaaaagccgtccttttgaatctcttttaaggttgccaaaccgcaggcggtggcgacggggttccctgacaaggtgcccgcttggtagaccgcgccaagtggtgcgaggtgggacatgacttcgcgcttaccgccgaacgcggctaacggcatgccgccgccaatgactttgcccatcacggtcatgtcaggctcaaagcccggaatttctttggcgtacaagctctgagcgcttcccagtgccacgcggaaaccacacatcacttcatcaaatgcgagtagcgctccgtgggcagtgcagagttcgcgacagcgttttacaaatggcacgctggcccgcacgaagttcatgttgccagcaatgggctccatcatcaaacaggcgacttcatcgccgtgttccttaaaggcggcctctagcgcttccacgtcattgaagggcagtactaaagtgtgttgcacaacctctggcgggacgcctgcgctggtggggttaccaaacgtggcgaggccagagccggccttaaccaacagggcatcggcgtggccgtggtagcagccttcaaacttaatgattttgctgcgtcccgtggcgccccgagccagtcgaatggcgctcatgccggcctcggtgcctgagctgaccagtctcaccatttcaatggatggaaccagcttgatgatttcttcggccagttctatttcgcgttcagtcggtgcaccaaatgacagcccttgctctgcagcgctcagcaccgcggcgtgtacggcggggtggcggtgccccaagatcatcgggccccaagagccaatgtagtcaatgtagcgctgatcttctgcgtcccaaaaataggcgccatcgccccgcgtgatgaagcggggtgttccgccgacggctttgaaggcgcgtacgggtgagttaaccccacccggaatggctagcttggcgcgtgtaaataattggtcgtttttgttcatgatgtgtttccggttacgttgcacggttcagtgtttggtgtcgtctagcgggaagtcgcctaacgtgtggtgaccgacatccagcgtcggtgtgtcgggggcgtcggtatcctcggtatcgtctatgccgtcatcttcgccgcgtccccaaaacaagcggtcgggtaaggcgtgtcccatgccgggtgcaaagcctgcatccagactctggtcgagataggtcagcgcttctgcgcaggcggactgcaagtcttcgcctgcacccagcagggccgtgagggcggctgacagggtttc

SEQ ID NO: 30 - DNA, 22678 bp, Artificial Sequence
  Synthetic Oligonucleotide
  misc_feature (1)..(9598): n is a, c, g, or t
nnnnnnnnnnnnnnnnnnnnnnnnnnnnnnnnnnnnnnnnnnnnnnnnnnnnnnnnnnnnnnnnnnnnnnnnnnnnnnnnnnnnnnnnnnnnnnnnnnnnnnnnnnnnnnnnnnnnnnnnnnnnnnnnnnnnnnnnnnnnnnnnnnnnnnnnnnnnnnnnnnnnnnnnnnnnnnnnnnnnnnnnnnnnnnnnnnnnnnnnnnnnnnnnnnnnnnnnnnnnnnnnnnnnnnnnnnnnnnnnnnnnnnnnnnnnnnnnnnnnnnnnnnnnnnnnnnnnnnnnnnnnnnnnnnnnnnnnnnnnnnnnnnnnnnnnnnnnnnnnnnnnnnnnnnnnnnnnnnnnnnnnnnnnnnnnnnnnnnnnnnnnnnnnnnnnnnnnnnnnnnnnnnnnnnnnnnnnnnnnnnnnnnnnnnnnnnnnnnnnnnnnnnnnnnnnnnnnnnnnnnnnnnnnnnnnnnnnnnnnnnnnnnnnnnnnnnnnnnnnnnnnnnnnnnnnnnnnnnnnnnnnnnnnnnnnnnnnnnnnnnnnnnnnnnnnnnnnnnnnnnnnnnnnnnnnnnnnnnnnnnnnnnnnnnnnnnnnnnnnnnnnnnnnnnnnnnnnnnnnnnnnnnnnnnnnnnnnnnnnnnnnnnnnnnnnnnnnnnnnnnnnnnnnnnnnnnnnnnnnnnnnnnnnnnnnnnnnnnnnnnnnnnnnnnnnnnnnnnnnnnnnnnnnnnnnnnnnnnnnnnnnnnnnnnnnnnnnnnnnnnnnnnnnnnnnnnnnnnnnnnnnnnnnnnnnnnnnnnnnnnnnnnnnnnnnnnnnnnnnnnnnnnnnnnnnnnnnnnnnnnnnnnnnnnnnnnnnnnnnnnnnnnnnnnnnnnnnnnnnnnnnnnnnnnnnnnnnnnnnnnnnnnnnnnnnnnnnnnnnnnnnnnnnnnnnnnnnnnnnnnnnnnnnnnnnnnnnnnnnnnnnnnnnnnnnnnnnnnnnnnnnnnnnnnnnnnnnnnnnnnnnnnnnnnnnnnnnnnnnnnnnnnnnnnnnnnnnnnnnnnnnnnnnnnnnnnnnnnnnnnnnnnnnnnnnnnnnnnnnnnnnnnnnnnnnnnnnnnnnnnnnnnnnnnnnnnnnnnnnnnnnnnnnnnnnnnnnnnnnnnnnnnnnnnnnnnnnnnnnnnnnnnnnnnnnnnnnnnnnnnnnnnnnnnnnnnnnnnnnnnnnnnnnnnnnnnnnnnnnnnnnnnnnnnnnnnnnnnnnnnnnnnnnnnnnnnnnnnnnnnnnnnnnnnnnnnnnnnnnnnnnnnnnnnnnnnnnnnnnnnnnnnnnnnnnnnnnnnnnnnnnnnnnnnnnnnnnnnnnnnnnnnnnnnnnnnnnnnnnnnnnnnnnnnnnnnnnnnnnnnnnnnnnnnnnnnnnnnnnnnnnnnnnnnnnnnnnnnnnnnnnnnnnnnnnnnnnnnnnnnnnnnnnnnnnnnnnnnnnnnnnnnnnnnnnnnnnnnnnnnnnnnnnnnnnnnnnnnnnnnnnnnnnnnnnnnnnnnnnnnnnnnnnnnnnnnnnnnnnnnnnnnnnnnnnnnnnnnnnnnnnnnnnnnnnnnnnnnnnnnnnnnnnnnnnnnnnnnnnnnnnnnnnnnnnnnnnnnnnnnnnnnnnnnnnnnnnnnnnnnnnnnnnnnnnnnnnnnnnnnnnnnnnnnnnnnnnnnnnnnnnnnnnnnnnnnnnnnnnnnnnnnnnnnnnnnnnnnnnnnnnnnnnnnnnnnnnnnnnnnnnnnnnnnnnnnnnnnnnnnnnnnnnnnnnnnnnnnnnnnnnnnnnnnnnnnnnnnnnnnnnnnnnnnnnnnnnnnnnnnnnnnnnnnnnnnnnnnnnnnnnnnnnnnnnnnnnnnnnnnnnnnnnnnnnnnnnnnnnnnnnnnnnnnnnnnnnnnnnnnnnnnnnnnnnnnnnnnnnnnnnnnnnnnnnnnnnnnnnnnnnnnnnnnnnnnnnnnnnnnnnnnnnnnnnnnnnnnnnnnnnnnnnnnnnnnnnnnnnnnnnnnnnnnnnnnnnnnnnnnnnnnnnnnnnnnnnnnnnnnnnnnnnnnnnnnnnnnnnnnnnnnnnnnnnnnnnnnnnnnnnnnnnnnnnnnnnnnnnnnnnnnnnnnnnnnnnnnnnnnnnnnnnnnnnnnnnnnnnnnnnnnnnnnnnnnnnnnnnnnnnnnnnnnnnnnnnnnnnnnnnnnnnnnnnnnnnnnnnnnnnnnnnnnnnnnnnnnnnnnnnnnnnnnnnnnnnnnnnnnnnnnnnnnnnnnnnnnnnnnnnnnnnnnnnnnnnnnnnnnnnnnnnnnnnnnnnnnnnnnnnnnnnnnnnnnnnnnnnnnnnnnnnnnnnnnnnnnnnnnnnnnnnnnnnnnnnnnnnnnnnnnnnnnnnnnnnnnnnnnnnnnnnnnnnnnnnnnnnnnnnnnnnnnnnnnnnnnnnnnnnnnnnnnnnnnnnnnnnnnnnnnnnnnnnnnnnnnnnnnnnnnnnnnnnnnnnnnnnnnnnnnnnnnnnnnnnnnnnnnnnnnnnnnnnnnnnnnnnnnnnnnnnnnnnnnnnnnnnnnnnnnnnnnnnnnnnnnnnnnnnnnnnnnnnnnnnnnnnnnnnnnnnnnnnnnnnnnnnnnnnnnnnnnnnnnnnnnnnnnnnnnnnnnnnnnnnnnnnnnnnnnnnnnnnnnnnnnnnnnnnnnnnnnnnnnnnnnnnnnnnnnnnnnnnnnnnnnnnnnnnnnnnnnnnnnnnnnnnnnnnnnnnnnnnnnnnnnnnnnnnnnnnnnnnnnnnnnnnnnnnnnnnnnnnnnnnnnnnnnnnnnnnnnnnnnnnnnnnnnnnnnnnnnnnnnnnnnnnnnnnnnnnnnnnnnnnnnnnnnnnnnnnnnnnnnnnnnnnnnnnnnnnnnnnnnnnnnnnnnnnnnnnnnnnnnnnnnnnnnnnnnnnnnnnnnnnnnnnnnnnnnnnnnnnnnnnnnnnnnnnnnnnnnnnnnnnnnnnnnnnnnnnnnnnnnnnnnnnnnnnnnnnnnnnnnnnnnnnnnnnnnnnnnnnnnnnnnnnnnnnnnnnnnnnnnnnnnnnnnnnnnnnnnnnnnnnnnnnnnnnnnnnnnnnnnnnnnnnnnnnnnnnnnnnnnnnnnnnnnnnnnnnnnnnnnnnnnnnnnnnnnnnnnnnnnnnnnnnnnnnnnnnnnnnnnnnnnnnnnnnnnnnnnnnnnnnnnnnnnnnnnnnnnnnnnnnnnnnnnnnnnnnnnnnnnnnnnnnnnnnnnnnnnnnnnnnnnnnnnnnnnnnnnnnnnnnnnnnnnnnnnnnnnnnnnnnnnnnnnnnnnnnnnnnnnnnnnnnnnnnnnnnnnnnnnnnnnnnnnnnnnnnnnnnnnnnnnnnnnnnnnnnnnnnnnnnnnnnnnnnnnnnnnnnnnnnnnnnnnnnnnnnnnnnnnnnnnnnnnnnnnnnnnnnnnnnnnnnnnnnnnnnnnnnnnnnnnnnnnnnnnnnnnnnnnnnnnnnnnnnnnnnnnnnnnnnnnnnnnnnnnnnnnnnnnnnnnnnnnnnnnnnnnnnnnnnnnnnnnnnnnnnnnnnnnnnnnnnnnnnnnnnnnnnnnnnnnnnnnnnnnnnnnnnnnnnnnnnnnnnnnnnnnnnnnnnnnnnnnnnnnnnnnnnnnnnnnnnnnnnnnnnnnnnnnnnnnnnnnnnnnnnnnnnnnnnnnnnnnnnnnnnnnnnnnnnnnnnnnnnnnnnnnnnnnnnnnnnnnnnnnnnnnnnnnnnnnnnnnnnnnnnnnnnnnnnnnnnnnnnnnnnnnnnnnnnnnnnnnnnnnnnnnnnnnnnnnnnnnnnnnnnnnnnnnnnnnnnnnnnnnnnnnnnnnnnnnnnnnnnnnnnnnnnnnnnnnnnnnnnnnnnnnnnnnnnnnnnnnnnnnnnnnnnnnnnnnnnnnnnnnnnnnnnnnnnnnnnnnnnnnnnnnnnnnnnnnnnnnnnnnnnnnnnnnnnnnnnnnnnnnnnnnnnnnnnnnnnnnnnnnnnnnnnnnnnnnnnnnnnnnnnnnnnnnnnnnnnnnnnnnnnnnnnnnnnnnnnnnnnnnnnnnnnnnnnnnnnnnnnnnnnnnnnnnnnnnnnnnnnnnnnnnnnnnnnnnnnnnnnnnnnnnnnnnnnnnnnnnnnnnnnnnnnnnnnnnnnnnnnnnnnnnnnnnnnnnnnnnnnnnnnnnnnnnnnnnnnnnnnnnnnnnnnnnnnnnnnnnnnnnnnnnnnnnnnnnnnnnnnnnnnnnnnnnnnnnnnnnnnnnnnnnnnnnnnnnnnnnnnnnnnnnnnnnnnnnnnnnnnnnnnnnnnnnnnnnnnnnnnnnnnnnnnnnnnnnnnnnnnnnnnnnnnnnnnnnnnnnnnnnnnnnnnnnnnnnnnnnnnnnnnnnnnnnnnnnnnnnnnnnnnnnnnnnnnnnnnnnnnnnnnnnnnnnnnnnnnnnnnnnnnnnnnnnnnnnnnnnnnnnnnnnnnnnnnnnnnnnnnnnnnnnnnnnnnnnnnnnnnnnnnnnnnnnnnnnnnnnnnnnnnnnnnnnnnnnnnnnnnnnnnnnnnnnnnnnnnnnnnnnnnnnnnnnnnnnnnnnnnnnnnnnnnnnnnnnnnnnnnnnnnnnnnnnnnnnnnnnnnnnnnnnnnnnnnnnnnnnnnnnnnnnnnnnnnnnnnnnnnnnnnnnnnnnnnnnnnnnnnnnnnnnnnnnnnnnnnnnnnnnnnnnnnnnnnnnnnnnnnnnnnnnnnnnnnnnnnnnnnnnnnnnnnnnnnnnnnnnnnnnnnnnnnnnnnnnnnnnnnnnnnnnnnnnnnnnnnnnnnnnnnnnnnnnnnnnnnnnnnnnnnnnnnnnnnnnnnnnnnnnnnnnnnnnnnnnnnnnnnnnnnnnnnnnnnnnnnnnnnnnnnnnnnnnnnnnnnnnnnnnnnnnnnnnnnnnnnnnnnnnnnnnnnnnnnnnnnnnnnnnnnnnnnnnnnnnnnnnnnnnnnnnnnnnnnnnnnnnnnnnnnnnnnnnnnnnnnnnnnnnnnnnnnnnnnnnnnnnnnnnnnnnnnnnnnnnnnnnnnnnnnnnnnnnnnnnnnnnnnnnnnnnnnnnnnnnnnnnnnnnnnnnnnnnnnnnnnnnnnnnnnnnnnnnnnnnnnnnnnnnnnnnnnnnnnnnnnnnnnnnnnnnnnnnnnnnnnnnnnnnnnnnnnnnnnnnnnnnnnnnnnnnnnnnnnnnnnnnnnnnnnnnnnnnnnnnnnnnnnnnnnnnnnnnnnnnnnnnnnnnnnnnnnnnnnnnnnnnnnnnnnnnnnnnnnnnnnnnnnnnnnnnnnnnnnnnnnnnnnnnnnnnnnnnnnnnnnnnnnnnnnnnnnnnnnnnnnnnnnnnnnnnnnnnnnnnnnnnnnnnnnnnnnnnnnnnnnnnnnnnnnnnnnnnnnnnnnnnnnnnnnnnnnnnnnnnnnnnnnnnnnnnnnnnnnnnnnnnnnnnnnnnnnnnnnnnnnnnnnnnnnnnnnnnnnnnnnnnnnnnnnnnnnnnnnnnnnnnnnnnnnnnnnnnnnnnnnnnnnnnnnnnnnnnnnnnnnnnnnnnnnnnnnnnnnnnnnnnnnnnnnnnnnnnnnnnnnnnnnnnnnnnnnnnnnnnnnnnnnnnnnnnnnnnnnnnnnnnnnnnnnnnnnnnnnnnnnnnnnnnnnnnnnnnnnnnnnnnnnnnnnnnnnnnnnnnnnnnnnnnnnnnnnnnnnnnnnnnnnnnnnnnnnnnnnnnnnnnnnnnnnnnnnnnnnnnnnnnnnnnnnnnnnnnnnnnnnnnnnnnnnnnnnnnnnnnnnnnnnnnnnnnnnnnnnnnnnnnnnnnnnnnnnnnnnnnnnnnnnnnnnnnnnnnnnnnnnnnnnnnnnnnnnnnnnnnnnnnnnnnnnnnnnnnnnnnnnnnnnnnnnnnnnnnnnnnnnnnnnnnnnnnnnnnnnnnnnnnnnnnnnnnnnnnnnnnnnnnnnnnnnnnnnnnnnnnnnnnnnnnnnnnnnnnnnnnnnnnnnnnnnnnnnnnnnnnnnnnnnnnnnnnnnnnnnnnnnnnnnnnnnnnnnnnnnnnnnnnnnnnnnnnnnnnnnnnnnnnnnnnnnnnnnnnnnnnnnnnnnnnnnnnnnnnnnnnnnnnnnnnnnnnnnnnnnnnnnnnnnnnnnnnnnnnnnnnnnnnnnnnnnnnnnnnnnnnnnnnnnnnnnnnnnnnnnnnnnnnnnnnnnnnnnnnnnnnnnnnnnnnnnnnnnnnnnnnnnnnnnnnnnnnnnnnnnnnnnnnnnnnnnnnnnnnnnnnnnnnnnnnnnnnnnnnnnnnnnnnnnnnnnnnnnnnnnnnnnnnnnnnnnnnnnnnnnnnnnnnnnnnnnnnnnnnnnnnnnnnnnnnnnnnnnnnnnnnnnnnnnnnnnnnnnnnnnnnnnnnnnnnnnnnnnnnnnnnnnnnnnnnnnnnnnnnnnnnnnnnnnnnnnnnnnnnnnnnnnnnnnnnnnnnnnnnnnnnnnnnnnnnnnnnnnnnnnnnnnnnnnnnnnnnnnnnnnnnnnnnnnnnnnnnnnnnnnnnnnnnnnnnnnnnnnnnnnnnnnnnnnnnnnnnnnnnnnnnnnnnnnnnnnnnnnnnnnnnnnnnnnnnnnnnnnnnnnnnnnnnnnnnnnnnnnnnnnnnnnnnnnnnnnnnnnnnnnnnnnnnnnnnnnnnnnnnnnnnnnnnnnnnnnnnnnnnnnnnnnnnnnnnnnnnnnnnnnnnnnnnnnnnnnnnnnnnnnnnnnnnnnnnnnnnnnnnnnnnnnnnnnnnnnnnnnnnnnnnnnnnnnnnnnnnnnnnnnnnnnnnnnnnnnnnnnnnnnnnnnnnnnnnnnnnnnnnnnnnnnnnnnnnnnnnnnnnnnnnnnnnnnnnnnnnnnnnnnnnnnnnnnnnnnnnnnnnnnnnnnnnnnnnnnnnnnnnnnnnnnnnnnnnnnnnnnnnnnnnnnnnnnnnnnnnnnnnnnnnnnnnnnnnnnnnnnnnnnnnnnnnnnnnnnnnnnnnnnnnnnnnnnnnnnnnnnnnnnnnnnnnnnnnnnnnnnnnnnnnnnnnnnnnnnnnnnnnnnnnnnnnnnnnnnnnnnnnnnnnnnnnnnnnnnnnnnnnnnnnnnnnnnnnnnnnnnnnnnnnnnnnnnnnnnnnnnnnnnnnnnnnnnnnnnnnnnnnnnnnnnnnnnnnnnnnnnnnnnnnnnnnnnnnnnnnnnnnnnnnnnnnnnnnnnnnnnnnnnnnnnnnnnnnnnnnnnnnnnnnnnnnnnnnnnnnnnnnnnnnnnnnnnnnnnnnnnnnnnnnnnnnnnnnnnnnnnnnnnnnnnnnnnnnnnnnnnnnnnnnnnnnnnnnnnnnnnnnnnnnnnnnnnnnnnnnnnnnnnnnnnnnnnnnnnnnnnnnnnnnnnnnnnnnnnnnnnnnnnnnnnnnnnnnnnnnnnnnnnnnnnnnnnnnnnnnnnnnnnnnnnnnnnnnnnnnnnnnnnnnnnnnnnnnnnnnnnnnnnnnnnnnnnnnnnnnnnnnnnnnnnnnnnnnnnnnnnnnnnnnnnnnnnnnnnnnnnnnnnnnnnnnnnnnnnnnnnnnnnnnnnnnnnnnnnnnnnnnnnnnnnnnnnnnnnnnnnnnnnnnnnnnnnnnnnnnnnnnnnnnnnnnnnnnnnnnnnnnnnnnnnnnnnnnnnnnnnnnnnnnnnnnnnnnnnnnnnnnnnnnnnnnnnnnnnnnnnnnnnnnnnnnnnnnnnnnnnnnnnnnnnnnnnnnnnnnnnnnnnnnnnnnnnnnnnnnnnnnnnnnnnnnnnnnnnnnnnnnnnnnnnnnnnnnnnnnnnnnnnnnnnnnnnnnnnnnnnnnnnnnnnnnnnnnnnnnnnnnnnnnnnnnnnnnnnnnnnnnnnnnnnnnnnnnnnnnnnnnnnnnnnnnnnnnnnnnnnnnnnnnnnnnnnnnnnnnnnnnnnnnnnnnnnnnnnnnnnnnnnnnnnnnnnnnnnnnnnnnnnnnnnnnnnnnnnnnnnnnnnnnnnnnnnnnnnnnnnnnnnnnnnnnnnnnnnnnnnnnnnnnnnnnnnnnnnnnnnnnnnnnnnnnnnnnnnnnnnnnnnnnnnnnnnnnnnnnnnnnnnnnnnnnnnnnnnnnnnnnnnnnnnnnnnnnnnnnnnnnnnnnnnnnnnnnnnnnnnnnnnnnnnnnnnnnnnnnnnnnnnnnnnnnnnnnnnnnnnnnnnnnnnnnnnnnnnnnnnnnnnnnnnnnnnnnnnnnnnnnnnnnnnnnnnnnnnnnnnnnnnnnnnnnnnnnnnnnnnnnnnnnnnnnnnnnnnnnnnnnnnnnnnnnnnnnnnnnnnnnnnnnnnnnnnnnnnnnnnnnnnnnnnnnnnnnnnnnnnnnnnnnnnnnnnnnnnnnnnnnnnnnnnnnnnnnnnnnnnnnnnnnnnnnnnnnnnnnnnnnnnnnnnnnnnnnnnnnnnnnnnnnnnnnnnnnnnnnnnnnnnnnnnnnnnnnnnnnnnnnnnnnnnnnnnnnnnnnnnnnnnnnnnnnnnnnnnnnnnnnnnnnnnnnnnnnnnnnnnnnnnnnnnnnnnnnnnnnnnnnnnnnnnnnnnnnnnnnnnnnnnnnnnnnnnnnnnnnnnnnnnnnnnnnnnnnnnnnnnnnnnnnnnnnnnnnnnnnnnnnnnnnnnnnnnnnnnnnnnnnnnnnnnnnnnnnnnnnnnnnnnnnnnnnnnnnnnnnnnnnnnnnnnnnnnnnnnnnnnnnnnnnnnnnnnnnnnnnnnnnnnnnnnnnnnnnnnnnnnnnnnnnnnnnnnnnnnnnnnnnnnnnnnnnnnnnnnnnnnnnnnnnnnnnnnnnnnnnnnnnnnnnnnnnnnnnnnnnnnnnnnnnnnnnnnnnnnnnnnnnnnnnnnnnnnnnnnnnnnnnnnnnnnnnnnnnnnnnnnnnnnnnnnnnnnnnnnnnnnnnnnnnnnnnnnnnnnnnnnnnnnnnnnnnnnnnnnnnnnnnnnnnnnnnnnnnnnnnnnnnnnnnnnnnnnnnnnnnnnnnnnnnnnnnnnnnnnnnnnnnnnnnnnnnnnnnnnnnnnnnnnnnnnnnnnnnnnnnnnnnnnnnnnnnnnnnnnnnnnnnnnnnnnnnnnnnnnnnnnnnnnnnnnnnnnnnnnnnnnnnnnnnnnnnnnnnnnnnnnnnnnnnnnnnnnnnnnnnnnnnnnnnnnnnnnnnnnnnnnnnnnnnnnnnnnnnnnnnnnnnnnnnnnnnnnnnnnnnnnnnnnnnnnnnnnnnnnnnnnnnnnnnnnnnnnnnnnnnnnnnnnnnnnnnnnnnnnnnnnnnnnnnnnnnnnnnnnnnnnnnnnnnnnnnnnnnnnnnnnnnnnnnnnnnnnnnnnnnnnnnnnnnnnnnnnnnnnnnnnnnnnnnnnnnnnnnnnnnnnnnnnnnnnnnnnnnnnnnnnnnnnnnnnnnnnnnnnnnnnnnnnnnnnnnnnnnnnnnnnnnnnnnnnnnnnnnnnnnnnnnnnnnnnnnnnnnnnnnnnnnnnnnnnnnnnnnnnnnnnnnnnnnnnnnnnnnnnnnnnnnnnnnnnnnnnnnnnnnnnnnnnnnnnnnnnnnnnnnnnnnnnnnnnnnnnnnnnnnnnnnnnnnnnnnnnnnnnnnnnnnnnnnnnnnnnnnnnnnnnnnnnnnnnnnnnnnnnnnnnnnnnnnnnnnnnnnnnnnnnnnnnnnnnnnnnnnnnnnnnnnnnnnnnnnnnnnnnnnnnnnnnnngcccacggtggtgacacccgtgaattgggtggctacgacaacttgcggcgcgacatggcgctcatagcggcaggtgaagccacacgtgaattgggtggctactacaaccacacggggcaaacgtgaaagttggttttcggtgaagccacccgtgaattgggtggctactacaactccggggtccggggcagcaatttgagctttggtgaagccacccgtgaattgggtggctactacaacagaaaccagaagcggctctcgccctcctgaggtgaagccacccgtgaattgggtggctactacaacaggataagccgccccgtggccgtggtgaagggtgaagccacccgtgaattgggtggctattataagtaatagttttatgtcttctcaggcacatcatgttcagatcaaaagaacaggcaaacttcgccgccatagtcgcggcgcatataaaaaaagctgatggcccgttactgcttgaaggtggtacgggcattggcaagacacgcgcttacctgtctgcactgattgcttcaggcaagcgtgtggccatcgcgctgccaacccaccagcttatcgaccagctgctggcatccactgatatggccgaagccaacaaagccaatgtaacggtagccgcttttcgtcctgcacggaccttcgccacgcgtgctgaatacttagcgcagcgcgatgtagttaccagtgcacaggtaatgctctgcaccagcgccagcgtcattatagatcagcggcttaagggcgaatacaacggcgcaactgagcgggactacctgtttttcgatgaagcagatcagcttcccaatgcggcagcgctgcagtccgacatggagatcacaggtgcggaactcaaagaacttggcatcgaaggcgacaatccccgcgaactggcggaggaagttgttgcctgcaaggaggctgaaccggaacagcgtgctgccgccaagatgatccttgaagctctggatgaaccggcatggttccatgccgccggcgctgatgctggcggcatcaagcttttccaccgtctgccgggccgtctgctgcgcaagaccgccaacaagcccaacgtggcctttgtcagtgccaccatcaccatcggcggcaagtttgatgacttcaagcgggcgctggggatccagcaggagagtgagctatccgacatcattgagcctgagcgccatggcacggtgaacttccgcactgtcagtcaccttgctgtcgatggtgaaggctggctggaaatggtggcggcgaaagtgagagaggccgagccaccggcattggttgttaccccatccttcgaccttgccaccagaattggcgcactggtcgaaggcgcagtggttcgccagaagggtgaattgatcggcgccgccatggaacggctgggcgataccaaaatactgttggccgccgccgcttgggcaggactggatgcgcccattcagtggcgctcgatcattgtccccgtggtgccttacgataagcccactattatcgatgaccacgttgagagccgctatatcgatgcccgcaacacagcgctgcggcggctacgccaagtcattggacggggcctgcgttctccagatgccagctgcaccgtctacttccttgatccccgtgtgcagaggcttccggcgttctggccgatgcgctttgccaccgaatggcagagaaggctgaccgatcccggcgtcatggaaggctctaggggagaagtcgtgctttcaaaggctgagcgggacccgtcaaatcggaagaacgcactgaagcattatggcactcattgtcaggcgtgcggactagtgccgaaagttgcggcaattatcgaggttcatcacctacaccctgtctcagagggtgtgcgccgcacgcaaattgaagatctatgccccctgtgccggaactgtcacggacttgcccacacgacggtgccacccatgcccatcgagcagcttaggcagttcgtgacggcttaggacaggaccgagccctgacagttcctagctacccaccccatccccagcacaccggatcgcccgagcaaaaccgtaagtatggggagcgtaggtaccatcaacggaaaacgggggtatgccggggtagtggggtctgacctagggggattttggagggcctaggtgttgtcgtgagactaggtgctagccgggcggtggctagatggcgcttgccccccacacggtggatcggacgaacagattagtgagtaggggtgaccgtaggtaccattctcaggtttaggggggtgcccggtgggtgggtctggcttaggggggattttggatgcgcgtggctttgaggtgcgggggtgcccccgtggactaggtgctagctggacggtggctagaagacgctaaagtcggcgcacttcacatggcctgaggtgtttttccccgcgcgtccggtcaatgtccggttcattcgtagatagaaaacgtgaccataatattggcgggttcaactacctgacttcatgaggaaaattggtgggtgatgcagggatcgaacctgcgacaagctgattaagagtcagctgctctaccaactgagctaatcacccacgccgccctttgggggcgggaggcggcttatagccaacgggggtggggctgtccataagcctgtaaaacaagcctgtgactagataatcccaacggaatgcctggggatttccacttgccggtggacatgcacgctcatcagcagtccgaaaccgaacatcacggtcagcatggcggtgccgccataggacagcagcggcatgggaatgccgaccaccgggatcagccccatcaccatcaggccattgatcatgatgtagaagaagaaattgagggtaatgcccatcgccagcaaccggccaaactggctgcgggcgcccatggcgatctgcaggccatagccgatcaccaccgcaaacaggatcagcagcgccaccgagccgacaaagccgaattcctcgccgaaattggtgaagatgaaatcggtctgtttttccggcaggaagttgagccggctctgggtgccctgcaaaaagcccttgcccgaaatcccgcccgagccgatggcgatcttggcttgggtgatgttccagcccgcgcccagggcgtcggattccggattgaggaaggtcatcacccgcgccttctgataatcatgcagcacaaagcgccaggcggtgggcaccgccaccgcaatcgccgccagcgccggggcgatccagtaccagctcagcccggccaggaacaaaagcgagcagccgtccatgacaattatcaaggtggtgcccagattgggctccatcaccaccagcatggcgggaagcccgatcatggcaagcgcaatcgccaaattcagcggcttggaaacttcttccacgctcttgccgtgcaggaagcgcgcaagcgccagcaccagcgaaatcttcatcagctcggagggctgcaactccagcggccccagggtgatccagcgctgggcgcccaggccgacatggcccgccaccaccaccgcgatcaacaggatgaatgccacgccgtaagcgggataggccaggctcatccatacccgcacatcaatcatcgccaccgcgaccaggatgaaagcgcccacgatgaaacgaatgatctgcggcgtcgcccagggattgaaatacccgcccgccaccgaataaagcatggcgaacccggcacaggccagcatggtgatcatcagcaccatgccccaattcacatccagcaacttgtcggcgaacgacaaggtgcgcttggctgctgcgtaagcgcgaatagccatcagccacctgccttgggaacagtgggcgcgggaacaccggcctgggcgtccttcaccggataggcgttgggtttgcccaatatatcgcgcgtctgggcgagggtgaggatatcgcgcgcgaacttcacctgtggctcggtatgggcgttgccgccatgttcaagcaccaccgaaatggcgtagcgcggcttgtcgatcggcgcgaaaccgatgaacaacgcatgttcgcgataggcccagggctgctggctctgcggtgtcagaccattatggcgttctgcatcggtgatgcgccgcacctgggccgtgccggtcttgccgcccatctcaaagccggcttgcagaatccgcgagccataggccgtgccgcccggcgcgttgacggccatgcccatgccttcacgcaccatggcgaatgccgtgtccgagaagggtagcggcgcgggctgtgggtttcgctttagcgtggcgccgacctgatgggtcagtcgcggtgagaccgccctgccggatgcaatccgcgcggcttgcatgcagagctggagcggcgtggcgagcacatagccctggccgatgccgttgacgagcgtctcgccctgttgccacggaacgccgaaccgcttcatcttccaggcccgggttgggataagcccccccaactctccaggcagttcgatgccggttggcgaaccaagccccagggcatgggccgcctcggccatcttgtctatgcccagccgcttcgccacttcatagaaatagacatcgcacgagacctggatgccgcgctgcaggctgcaattgccgtggccgccgattttccacgcatcgcaatagaaaatatggtcgccaagccgcgtcgagccggtgcaattgacgacaagatcggacatcccattgtccacggccgccagcgccatcgcggtcttgaaggtggagccgggcggataggtgccgccgatggccttgttcagcagcggcttgtagtcatttgttgtcagttcgcgccattgcgggccggtgacgccggtgttgaaccagttggggtcgaaaccgggtgtggaggcaagcgtcagcacatcgccgctatccacatccatcaccacgcaggcggcgctttcgccctccagacacttggcggcatattgctggagctcggcatcaatggtcagccagacatcttttcccggaatgcccggctcatggcccagttcgcggatgacgcggccataggcgttgacctcgacctgcgaagcacccgcttcgccgcatacatccttgtcgaaggtcttttcgataccgcgcttgccgatgcgaaaccccggctggctgagcaagggatcattatcgcccttcatgtcttcgggcgagacggcggcgacatagcccaataagtgcgccatgctggggccatacggataatcgcgggtttcaccgacatcgggctgaacgcccggcaaataaggcagatgcatgttaatgcgggaaaattcctcccaggacagattctccgccaccggcaccggcatgaatttcttgttctcggcaatcgtctgggcgacgcgctttttctgcgcgtcgctgatctcgatcacttttgaaagcgtgtcgagcgcaccggcaacgccttcggtggcctgttccgacaccagcagcacgcgatagttgcgcttgttgttggccagttcggtgccgaaacggtcgaaaatgcggccgcgcggcggcgcgatcagccgttgggaaacgcggttgtcttcggcttcggccttgtactgatcgccgtcgcggatctgcaactgatacaggcgccccgccagcacggcgaacaccaacgtcatgccgccgccaacgcccacgctgcggcgcgtgaaagtggcgtaacggcttttgtcctttttatcgaacagcggcatcagaagtcactccgcagcggcccgaccagccggcgatgcagcgagcctatcacgaaggcgcccgggatatagaacagcacggtgatggccagctcggccacaatgggccccagcggcgccaagtgccagaaataggccgtggtggtgaaataggcggtggcgcagacaatcgctgtggcggtggcaaagcccagcaccgctgcgccgcccgcaagaccggcaaaggcatcgcgctggcgctggatcacggcataggccacgacaaagctgagggtccagatacccggcggcccgcccgacatcacgtcctgcagaatgccgatgccgaaggccgccgccggggtcatcagatcggggcgcaccaggcaccagaaatagaccgggatgaagcccagcagcggcggcggcaccaggccgccgaacagggtcacgggcaggttggacaggattacgccgagcagaccgcaggtcacgggcaagagggccgccagcagcttggcccccgtcatcagcttggcgcggtcctgggcggccatggcgttactgcgccccgccggcggcgggacgcgcggcctgggcggacaggttggcgccaagcgggggggcggcaggcttgggcgcggttggcaaaggtgtagcgggcgttgcggcgccgggtgcagcggtggcaggcgcgggaatcggaacggacgcgggcgccgcggcgggcggcaagccggcagccacggcgggaagctggctgggtgtggtggcgggcagaatctcggcaggcttgcggaagcccagcacttcaacatcctcgctggaggcgggatcggccagcagcgcgacgcgcgccgtgtcgccatcgcccaccacggtgccgatggccaggcccggcggcaacagcccgccatcgcccgaggaaacaacctggtcgccggcatgcaaggtcaccacctgctgcaaggtatcgagcaggggcatggcggtgttgtcgccggtcatgatcgcctgcaaggtcgcggtcttgccgtcagcgctggcgatggtgacgggaatgcggctgttgagatcggtcagcaggatcacccagctggtgtgatcgcccgagaggtaaatgcgcccgatcatgccgcgcgaatccaccaccgcctcgcccggtttgacggcgcggctttcgccggcgtccaggatcatggtctgcaaaaagggacggctggcgcggccaatgacgcgggccagcaccgaattgatatcgggatcgggcaccgcatgcagcatgtcctggtaatggcgcacccggtcctgcatcaccacggcgacattgcgccattgcttcagccgggcattctcatccttgagctgcagattttcctgatagaccacgaagagttcgtcggcggatgagatccagcggttgaaggcctgcaccggggcatgcacggactctagggtcggcgccatccagtcggtgatgcgcatgcgggcgcggtcgaacaggcccgattgcgccttgcccagcagcaccagcaccaccgccaacgccagcacgatcaccagcggaagctgcgcgttgctccggcgggcgattttccagctgttgttgggcatgacggtgggttccccgaccccgtgctagaatgccgttgaaagaacgtgacgcatgcccttggtgttctcgagcacccggccggtgcccagcgcgacgcaggacaaaggatcatcggcaatggagaccggcaagccggtttcttcccgcagaacctgatccagattggccagcagcgagccgccgcccgtcagcacaatacccttgtccacgatgtcggcggccagttccggcggcgttgcttccagcgccactttcaccgcttcgacaatcgcgcccacgggttcggccagggcctcggcgatatgacgctgggtgatggtgatttccttcgggaccccgttcagaagatctcggcccttgatttccatggtgatgccgttgccgtcggcgggcgcacaggccgaaccgatttcctttttgatgcgctcggagctggcttcaccgatcagcagattctggtgacggcggatataggcgatgatggcttcgtccatcttgtcgccgccgacgcgcacgctgcgcgaatagacaatgccgcccagcgacagcaccgcgacttccgtggtgccgccgccgatatccaccaccatcgagccggtgggctcagacacgggcagtccggcgccaatggcggccgccatgggctcttcgatcagatagacgcgccgggcgcccgccgacaaagcggattcctgaatggcgcggcgttccacggcggtcgaaccggacggcacgcagacgatgatcatgggattggcgaaggagcggcggttatgcaccttgcggatgaagtgcttgatcatctgctccgcgacttcgaaatcggcgatgacgccgtcgcgcatgggacggatggcttcgatattgccgggggtgcgccccagcatcatcttggcgtcgttgccgacggcgcgcacagattttttgccgccgcgcgtggtgatggtggccaccaccgacggctcgttcagcacaatgccgcggcctttgacatagaccagcgtgttggccgttccgaggtcgattgccatgtcgctcgaaaaggcacccaaaagactgccgaacatgcttaacccaattccctagactgaatattcctcaaaaccctgcaagcctcatacctgaaagggcggccccggcggcgatccgccggggccaattctgtttcatcttgcgacagtgagcgcttccggcgccgacttttcacgtttcaccagcaacttgttcagcgcattgacataggcgtaggccgccgccgccatcgtgtcggtgtccgacgccttgccggtgacggtacggccattctcctccagacgcacgctcacgctggcctgggcgtcggtgccttcggtcacggcgttgatctggaacagctgcaaggtcgcggtgtgcggatagagcgcctggatcgccttgaaaatggcgtccacaggcccgtcgccgacgctggtgacgcgccgctcctcgccatgaacgaccagagtgagcgccgccaccggctcgatgccggtgccgctttcgacccgcaattgcttgacgccaatggcgtcctggccgcggatgatctcgtcatccaccagggccataatgtcttcgtcgaagacatgctttttcttgtccgccaggtccttgaagcgcttgaaagcgtcttcaaaggccgtgtcttccaaccggtaacccatggcttccagcttgtcgcggaaggcatggcggcccgacagcttgcccagcatcaggctggtggcatgcacgccgacatcttccggacgcatgatttcataggtttcgacatttttgagcatgccgtcctggtgaatgccgctttcatggctgaacgcgttctttcccacgatggccttgttgtactgcaccggaaagccggtgacgttcgataccagcttggaggcgcgcgacagcattttggtgttgatgcccgtggtgaagggcatgatgtccttgcggaccttcagcgccatcacgatttcttccagtgcggcattgccggcgcgttcgccgatgccgttgatggtgcattccacctgccgcgcgcccgccagtacgccggccagcgaattggccaccgccaggcccagatcattatggacatgggtggagaagatcaccttgtgcgcattgggcacgcgttcgcgcagcatggtgatgatctggaaatattcctgcggcgtggaatagcccaccgtgtcaggcacattgatcaccgtggcgccggaatgaatggcgacttccacgcatttgcacagaaaatccggcacggtgcgggtggcatcttccgccgaccattccacgtcgctggtgaagttacgcgcccgcgtcaccgaggcgcctatcgcctccagcacggcgttttcgcccatattcagcttgtgtttcatgtgcactgggctggtggaaatgaaggtatggatgcgtggccggaacgcgcctttcagcgcctcgccggcccggtcgatgtccttgaagcctgcccgcgccaacccgcaaaccgatgcgcgcttgaccagcttggccacctcggtgacggccttgaaatcgcccggcgaggaaatgggaaagcccgcctcgatgatatccacgcccatttcgtccagcagttcggcgatctgcattttttcttcatgcgacatggaagcgccaggcgattgctcgccgtcacgcaaggtggtgtcgaatatcaggatcggctgagtgtctgtcgtcgtcatgacaaaagtccttctgttcgtcgcatagggcgacttcgatttctcctttggcgttgtcccctacacaccgcccgcgcgaaccattcgcgagggcaagcgcctaggggccgctaagaagaagaagcgcgtgcgaagaaccgagggaaggacggggctgcatgcggccgcgcgcacggctgcgaacggcaaagccgcttttcgcaatcgtgatgtgcacgccgttcgtcataaaacctgtcgccgttccgcccgccgagattatcggtgtgcccagagccgtaaccatgggaaagcggtccaatcaccgttttttcccatcgtttgcaaggttttacgccgaagccgcgcaatggcgcaagtgcgaaaagcccggcttttacggggcctttgcccaagcgccggtaataaatacattttttgtaatgtatattttcccggccccggatcgcgctcctgtcacaaaagtccggcacacaaacccacccacaaaccaccccgccgacgccccgccaacgaaagacatgatgccccccgccggcgacgctttccccgctgttttcctttggcctttcaaagtggttgccagcggccacgaacgcgcctatcggggcggcagaactgtcattccacccgccaacccgtgtttcgagggccggatatgaagatcctgccgcccgtctcgatcgaagcgcgccgcctgctgcccagccgctgggacctgctggcggcggtgctggtgcttggcttcatcatcctgttcgcggacgccagccgcagcctggtgctgccgctcagttcgatcaccggcaagggcctcagcctcaatatctgggatctgcccggttatgccgtacgcacggccctgcgcatgctgatcgcgctgggcgtttcgctggtctttaccttcacctatgccacctgggcggcgaaaagcgcccgcgccggcagccttttggtgccgctgctcgatatcctgcaatcggtgccgatccttggctttctgtcggtgacggtggtgtggttcctgtcgctgtcgccgggcaaggtgttcggcgccgagctggcctgcgtcttcgccatcttcaccggccaggcctggaacatggccttcagcttctaccagtcgctgcgcaccgtgcccgaagaactgaccgaagccggccgcatgttcggtctcaatgcctgggcgcgtttctggcgcatcgaggcgcctttcgccacgccgccgctgatctggaacatgatgatgtccatgtcgggcggctggttctttgtcaccgtcgccgaagccatcagcgtgggcaataccaatatcgccctgcccggcatcgggtcctggatcgcggtcgccatcgcgcaaaagaatctgcccgcgatcttcgaggcgatcttcgccatgctggtcgtgatcctgatctatgaccagttgatgttccgaccgctggtggcctgggctgaccgtttccgtatcgacaatgagcagtccgaagaccagcccgaaagctgggccctcagcgtctatcgccgctcccgcctgctggatctgctgacggtgccgttcgaccagatgatgcattggagctatcaatggcagccgccccatttcggcgtgcgcggcgcctttcgcgacaccgataacaggatcgccgacattgtctggtatgcggtcctgaccttgctgggcctgtatggcgcctatcgcatctatgatttcgcccatatcaacctggcctggagcgatcttggcatcgcggtgggctttggcatcctgaccatgctgcgggtgatgatcctgatcgccatcgcaagcctggtttggacgcccattggcgtctatgtcggcctcagcccgtccttgacgcgcgtcgtacagccggtggcgcagttcctggccgccttcccgaacaatcttctgttcccgctggtggtatcgctgatcgtgttctggaaactcaatcccgatatctggctgtcgccgctgatcatcctgggcacgcaatggtacatcctgttcaacgtgatcgccggcgccgccgccatgcccaaggaactgcgcgatgctgccgacagtttcggcgtgcgcggctggctgtggtggcgcaaggtcgcgctgccttgcgtctttccctattacgtcaccggcgcgatcaccgcttcgggcggcgcctggaacgccagcgtgctggcggaggtggcaagctggggcaacaccacgcttaaggcgcacggcctgggcgcctatatcgccgatgccaccgccaagggcgattttcgccgtatcgtgctgggcatcgcggtgatgagctgttttgtgctggtggtgaaccgcatcctgtggcggcccctatactggtacgccgaacgcaaattccgtttaacatgaggctctattttttggtcgcacggccggacggaaaaccgcagaccctcgctttgggcgagcagacagcaagggtctgcaattttcctggccgatgctcccggaggcataacgatggctgatctgctgaacgttgaacatgtccgccgcaccttcccgcgcggcggcggcgaggaattgctggtgctggatgacgtcaacctcaccctgaaagagggcgagattgtcggcctgctgggccgttccggctcgggcaaatccaccttgctgcgcctgatcgcgggcctggcgcggccgcagggcggcgccctgcattatctgggcgcgcccatcgaaggtccggcacagggcgtctccatggtgttccagggctttgccctgtttccctggctgaccgtgctggaaaatgtgcagctgggcctggaagcgctgggcctgccgcagacggaaatccgcacccgcgccttggccgcgatcgacctgatcggcctggacggttatgaaagcgcctatccgcgcgaattgtccggcggcatgcgccagcgcgtcggctttgcccgcgccttggtggtgcatcccaacattcttttgatggacgagcctttcagcgcgctcgatgtgctg

SEQ ID NO: 31 - DNA, 22528 bp, Artificial Sequence
  Synthetic Oligonucleotide
  misc_feature (1)..(9847): n is a, c, g, or t
nnnnnnnnnnnnnnnnnnnnnnnnnnnnnnnnnnnnnnnnnnnnnnnnnnnnnnnnnnnnnnnnnnnnnnnnnnnnnnnnnnnnnnnnnnnnnnnnnnnnnnnnnnnnnnnnnnnnnnnnnnnnnnnnnnnnnnnnnnnnnnnnnnnnnnnnnnnnnnnnnnnnnnnnnnnnnnnnnnnnnnnnnnnnnnnnnnnnnnnnnnnnnnnnnnnnnnnnnnnnnnnnnnnnnnnnnnnnnnnnnnnnnnnnnnnnnnnnnnnnnnnnnnnnnnnnnnnnnnnnnnnnnnnnnnnnnnnnnnnnnnnnnnnnnnnnnnnnnnnnnnnnnnnnnnnnnnnnnnnnnnnnnnnnnnnnnnnnnnnnnnnnnnnnnnnnnnnnnnnnnnnnnnnnnnnnnnnnnnnnnnnnnnnnnnnnnnnnnnnnnnnnnnnnnnnnnnnnnnnnnnnnnnnnnnnnnnnnnnnnnnnnnnnnnnnnnnnnnnnnnnnnnnnnnnnnnnnnnnnnnnnnnnnnnnnnnnnnnnnnnnnnnnnnnnnnnnnnnnnnnnnnnnnnnnnnnnnnnnnnnnnnnnnnnnnnnnnnnnnnnnnnnnnnnnnnnnnnnnnnnnnnnnnnnnnnnnnnnnnnnnnnnnnnnnnnnnnnnnnnnnnnnnnnnnnnnnnnnnnnnnnnnnnnnnnnnnnnnnnnnnnnnnnnnnnnnnnnnnnnnnnnnnnnnnnnnnnnnnnnnnnnnnnnnnnnnnnnnnnnnnnnnnnnnnnnnnnnnnnnnnnnnnnnnnnnnnnnnnnnnnnnnnnnnnnnnnnnnnnnnnnnnnnnnnnnnnnnnnnnnnnnnnnnnnnnnnnnnnnnnnnnnnnnnnnnnnnnnnnnnnnnnnnnnnnnnnnnnnnnnnnnnnnnnnnnnnnnnnnnnnnnnnnnnnnnnnnnnnnnnnnnnnnnnnnnnnnnnnnnnnnnnnnnnnnnnnnnnnnnnnnnnnnnnnnnnnnnnnnnnnnnnnnnnnnnnnnnnnnnnnnnnnnnnnnnnnnnnnnnnnnnnnnnnnnnnnnnnnnnnnnnnnnnnnnnnnnnnnnnnnnnnnnnnnnnnnnnnnnnnnnnnnnnnnnnnnnnnnnnnnnnnnnnnnnnnnnnnnnnnnnnnnnnnnnnnnnnnnnnnnnnnnnnnnnnnnnnnnnnnnnnnnnnnnnnnnnnnnnnnnnnnnnnnnnnnnnnnnnnnnnnnnnnnnnnnnnnnnnnnnnnnnnnnnnnnnnnnnnnnnnnnnnnnnnnnnnnnnnnnnnnnnnnnnnnnnnnnnnnnnnnnnnnnnnnnnnnnnnnnnnnnnnnnnnnnnnnnnnnnnnnnnnnnnnnnnnnnnnnnnnnnnnnnnnnnnnnnnnnnnnnnnnnnnnnnnnnnnnnnnnnnnnnnnnnnnnnnnnnnnnnnnnnnnnnnnnnnnnnnnnnnnnnnnnnnnnnnnnnnnnnnnnnnnnnnnnnnnnnnnnnnnnnnnnnnnnnnnnnnnnnnnnnnnnnnnnnnnnnnnnnnnnnnnnnnnnnnnnnnnnnnnnnnnnnnnnnnnnnnnnnnnnnnnnnnnnnnnnnnnnnnnnnnnnnnnnnnnnnnnnnnnnnnnnnnnnnnnnnnnnnnnnnnnnnnnnnnnnnnnnnnnnnnnnnnnnnnnnnnnnnnnnnnnnnnnnnnnnnnnnnnnnnnnnnnnnnnnnnnnnnnnnnnnnnnnnnnnnnnnnnnnnnnnnnnnnnnnnnnnnnnnnnnnnnnnnnnnnnnnnnnnnnnnnnnnnnnnnnnnnnnnnnnnnnnnnnnnnnnnnnnnnnnnnnnnnnnnnnnnnnnnnnnnnnnnnnnnnnnnnnnnnnnnnnnnnnnnnnnnnnnnnnnnnnnnnnnnnnnnnnnnnnnnnnnnnnnnnnnnnnnnnnnnnnnnnnnnnnnnnnnnnnnnnnnnnnnnnnnnnnnnnnnnnnnnnnnnnnnnnnnnnnnnnnnnnnnnnnnnnnnnnnnnnnnnnnnnnnnnnnnnnnnnnnnnnnnnnnnnnnnnnnnnnnnnnnnnnnnnnnnnnnnnnnnnnnnnnnnnnnnnnnnnnnnnnnnnnnnnnnnnnnnnnnnnnnnnnnnnnnnnnnnnnnnnnnnnnnnnnnnnnnnnnnnnnnnnnnnnnnnnnnnnnnnnnnnnnnnnnnnnnnnnnnnnnnnnnnnnnnnnnnnnnnnnnnnnnnnnnnnnnnnnnnnnnnnnnnnnnnnnnnnnnnnnnnnnnnnnnnnnnnnnnnnnnnnnnnnnnnnnnnnnnnnnnnnnnnnnnnnnnnnnnnnnnnnnnnnnnnnnnnnnnnnnnnnnnnnnnnnnnnnnnnnnnnnnnnnnnnnnnnnnnnnnnnnnnnnnnnnnnnnnnnnnnnnnnnnnnnnnnnnnnnnnnnnnnnnnnnnnnnnnnnnnnnnnnnnnnnnnnnnnnnnnnnnnnnnnnnnnnnnnnnnnnnnnnnnnnnnnnnnnnnnnnnnnnnnnnnnnnnnnnnnnnnnnnnnnnnnnnnnnnnnnnnnnnnnnnnnnnnnnnnnnnnnnnnnnnnnnnnnnnnnnnnnnnnnnnnnnnnnnnnnnnnnnnnnnnnnnnnnnnnnnnnnnnnnnnnnnnnnnnnnnnnnnnnnnnnnnnnnnnnnnnnnnnnnnnnnnnnnnnnnnnnnnnnnnnnnnnnnnnnnnnnnnnnnnnnnnnnnnnnnnnnnnnnnnnnnnnnnnnnnnnnnnnnnnnnnnnnnnnnnnnnnnnnnnnnnnnnnnnnnnnnnnnnnnnnnnnnnnnnnnnnnnnnnnnnnnnnnnnnnnnnnnnnnnnnnnnnnnnnnnnnnnnnnnnnnnnnnnnnnnnnnnnnnnnnnnnnnnnnnnnnnnnnnnnnnnnnnnnnnnnnnnnnnnnnnnnnnnnnnnnnnnnnnnnnnnnnnnnnnnnnnnnnnnnnnnnnnnnnnnnnnnnnnnnnnnnnnnnnnnnnnnnnnnnnnnnnnnnnnnnnnnnnnnnnnnnnnnnnnnnnnnnnnnnnnnnnnnnnnnnnnnnnnnnnnnnnnnnnnnnnnnnnnnnnnnnnnnnnnnnnnnnnnnnnnnnnnnnnnnnnnnnnnnnnnnnnnnnnnnnnnnnnnnnnnnnnnnnnnnnnnnnnnnnnnnnnnnnnnnnnnnnnnnnnnnnnnnnnnnnnnnnnnnnnnnnnnnnnnnnnnnnnnnnnnnnnnnnnnnnnnnnnnnnnnnnnnnnnnnnnnnnnnnnnnnnnnnnnnnnnnnnnnnnnnnnnnnnnnnnnnnnnnnnnnnnnnnnnnnnnnnnnnnnnnnnnnnnnnnnnnnnnnnnnnnnnnnnnnnnnnnnnnnnnnnnnnnnnnnnnnnnnnnnnnnnnnnnnnnnnnnnnnnnnnnnnnnnnnnnnnnnnnnnnnnnnnnnnnnnnnnnnnnnnnnnnnnnnnnnnnnnnnnnnnnnnnnnnnnnnnnnnnnnnnnnnnnnnnnnnnnnnnnnnnnnnnnnnnnnnnnnnnnnnnnnnnnnnnnnnnnnnnnnnnnnnnnnnnnnnnnnnnnnnnnnnnnnnnnnnnnnnnnnnnnnnnnnnnnnnnnnnnnnnnnnnnnnnnnnnnnnnnnnnnnnnnnnnnnnnnnnnnnnnnnnnnnnnnnnnnnnnnnnnnnnnnnnnnnnnnnnnnnnnnnnnnnnnnnnnnnnnnnnnnnnnnnnnnnnnnnnnnnnnnnnnnnnnnnnnnnnnnnnnnnnnnnnnnnnnnnnnnnnnnnnnnnnnnnnnnnnnnnnnnnnnnnnnnnnnnnnnnnnnnnnnnnnnnnnnnnnnnnnnnnnnnnnnnnnnnnnnnnnnnnnnnnnnnnnnnnnnnnnnnnnnnnnnnnnnnnnnnnnnnnnnnnnnnnnnnnnnnnnnnnnnnnnnnnnnnnnnnnnnnnnnnnnnnnnnnnnnnnnnnnnnnnnnnnnnnnnnnnnnnnnnnnnnnnnnnnnnnnnnnnnnnnnnnnnnnnnnnnnnnnnnnnnnnnnnnnnnnnnnnnnnnnnnnnnnnnnnnnnnnnnnnnnnnnnnnnnnnnnnnnnnnnnnnnnnnnnnnnnnnnnnnnnnnnnnnnnnnnnnnnnnnnnnnnnnnnnnnnnnnnnnnnnnnnnnnnnnnnnnnnnnnnnnnnnnnnnnnnnnnnnnnnnnnnnnnnnnnnnnnnnnnnnnnnnnnnnnnnnnnnnnnnnnnnnnnnnnnnnnnnnnnnnnnnnnnnnnnnnnnnnnnnnnnnnnnnnnnnnnnnnnnnnnnnnnnnnnnnnnnnnnnnnnnnnnnnnnnnnnnnnnnnnnnnnnnnnnnnnnnnnnnnnnnnnnnnnnnnnnnnnnnnnnnnnnnnnnnnnnnnnnnnnnnnnnnnnnnnnnnnnnnnnnnnnnnnnnnnnnnnnnnnnnnnnnnnnnnnnnnnnnnnnnnnnnnnnnnnnnnnnnnnnnnnnnnnnnnnnnnnnnnnnnnnnnnnnnnnnnnnnnnnnnnnnnnnnnnnnnnnnnnnnnnnnnnnnnnnnnnnnnnnnnnnnnnnnnnnnnnnnnnnnnnnnnnnnnnnnnnnnnnnnnnnnnnnnnnnnnnnnnnnnnnnnnnnnnnnnnnnnnnnnnnnnnnnnnnnnnnnnnnnnnnnnnnnnnnnnnnnnnnnnnnnnnnnnnnnnnnnnnnnnnnnnnnnnnnnnnnnnnnnnnnnnnnnnnnnnnnnnnnnnnnnnnnnnnnnnnnnnnnnnnnnnnnnnnnnnnnnnnnnnnnnnnnnnnnnnnnnnnnnnnnnnnnnnnnnnnnnnnnnnnnnnnnnnnnnnnnnnnnnnnnnnnnnnnnnnnnnnnnnnnnnnnnnnnnnnnnnnnnnnnnnnnnnnnnnnnnnnnnnnnnnnnnnnnnnnnnnnnnnnnnnnnnnnnnnnnnnnnnnnnnnnnnnnnnnnnnnnnnnnnnnnnnnnnnnnnnnnnnnnnnnnnnnnnnnnnnnnnnnnnnnnnnnnnnnnnnnnnnnnnnnnnnnnnnnnnnnnnnnnnnnnnnnnnnnnnnnnnnnnnnnnnnnnnnnnnnnnnnnnnnnnnnnnnnnnnnnnnnnnnnnnnnnnnnnnnnnnnnnnnnnnnnnnnnnnnnnnnnnnnnnnnnnnnnnnnnnnnnnnnnnnnnnnnnnnnnnnnnnnnnnnnnnnnnnnnnnnnnnnnnnnnnnnnnnnnnnnnnnnnnnnnnnnnnnnnnnnnnnnnnnnnnnnnnnnnnnnnnnnnnnnnnnnnnnnnnnnnnnnnnnnnnnnnnnnnnnnnnnnnnnnnnnnnnnnnnnnnnnnnnnnnnnnnnnnnnnnnnnnnnnnnnnnnnnnnnnnnnnnnnnnnnnnnnnnnnnnnnnnnnnnnnnnnnnnnnnnnnnnnnnnnnnnnnnnnnnnnnnnnnnnnnnnnnnnnnnnnnnnnnnnnnnnnnnnnnnnnnnnnnnnnnnnnnnnnnnnnnnnnnnnnnnnnnnnnnnnnnnnnnnnnnnnnnnnnnnnnnnnnnnnnnnnnnnnnnnnnnnnnnnnnnnnnnnnnnnnnnnnnnnnnnnnnnnnnnnnnnnnnnnnnnnnnnnnnnnnnnnnnnnnnnnnnnnnnnnnnnnnnnnnnnnnnnnnnnnnnnnnnnnnnnnnnnnnnnnnnnnnnnnnnnnnnnnnnnnnnnnnnnnnnnnnnnnnnnnnnnnnnnnnnnnnnnnnnnnnnnnnnnnnnnnnnnnnnnnnnnnnnnnnnnnnnnnnnnnnnnnnnnnnnnnnnnnnnnnnnnnnnnnnnnnnnnnnnnnnnnnnnnnnnnnnnnnnnnnnnnnnnnnnnnnnnnnnnnnnnnnnnnnnnnnnnnnnnnnnnnnnnnnnnnnnnnnnnnnnnnnnnnnnnnnnnnnnnnnnnnnnnnnnnnnnnnnnnnnnnnnnnnnnnnnnnnnnnnnnnnnnnnnnnnnnnnnnnnnnnnnnnnnnnnnnnnnnnnnnnnnnnnnnnnnnnnnnnnnnnnnnnnnnnnnnnnnnnnnnnnnnnnnnnnnnnnnnnnnnnnnnnnnnnnnnnnnnnnnnnnnnnnnnnnnnnnnnnnnnnnnnnnnnnnnnnnnnnnnnnnnnnnnnnnnnnnnnnnnnnnnnnnnnnnnnnnnnnnnnnnnnnnnnnnnnnnnnnnnnnnnnnnnnnnnnnnnnnnnnnnnnnnnnnnnnnnnnnnnnnnnnnnnnnnnnnnnnnnnnnnnnnnnnnnnnnnnnnnnnnnnnnnnnnnnnnnnnnnnnnnnnnnnnnnnnnnnnnnnnnnnnnnnnnnnnnnnnnnnnnnnnnnnnnnnnnnnnnnnnnnnnnnnnnnnnnnnnnnnnnnnnnnnnnnnnnnnnnnnnnnnnnnnnnnnnnnnnnnnnnnnnnnnnnnnnnnnnnnnnnnnnnnnnnnnnnnnnnnnnnnnnnnnnnnnnnnnnnnnnnnnnnnnnnnnnnnnnnnnnnnnnnnnnnnnnnnnnnnnnnnnnnnnnnnnnnnnnnnnnnnnnnnnnnnnnnnnnnnnnnnnnnnnnnnnnnnnnnnnnnnnnnnnnnnnnnnnnnnnnnnnnnnnnnnnnnnnnnnnnnnnnnnnnnnnnnnnnnnnnnnnnnnnnnnnnnnnnnnnnnnnnnnnnnnnnnnnnnnnnnnnnnnnnnnnnnnnnnnnnnnnnnnnnnnnnnnnnnnnnnnnnnnnnnnnnnnnnnnnnnnnnnnnnnnnnnnnnnnnnnnnnnnnnnnnnnnnnnnnnnnnnnnnnnnnnnnnnnnnnnnnnnnnnnnnnnnnnnnnnnnnnnnnnnnnnnnnnnnnnnnnnnnnnnnnnnnnnnnnnnnnnnnnnnnnnnnnnnnnnnnnnnnnnnnnnnnnnnnnnnnnnnnnnnnnnnnnnnnnnnnnnnnnnnnnnnnnnnnnnnnnnnnnnnnnnnnnnnnnnnnnnnnnnnnnnnnnnnnnnnnnnnnnnnnnnnnnnnnnnnnnnnnnnnnnnnnnnnnnnnnnnnnnnnnnnnnnnnnnnnnnnnnnnnnnnnnnnnnnnnnnnnnnnnnnnnnnnnnnnnnnnnnnnnnnnnnnnnnnnnnnnnnnnnnnnnnnnnnnnnnnnnnnnnnnnnnnnnnnnnnnnnnnnnnnnnnnnnnnnnnnnnnnnnnnnnnnnnnnnnnnnnnnnnnnnnnnnnnnnnnnnnnnnnnnnnnnnnnnnnnnnnnnnnnnnnnnnnnnnnnnnnnnnnnnnnnnnnnnnnnnnnnnnnnnnnnnnnnnnnnnnnnnnnnnnnnnnnnnnnnnnnnnnnnnnnnnnnnnnnnnnnnnnnnnnnnnnnnnnnnnnnnnnnnnnnnnnnnnnnnnnnnnnnnnnnnnnnnnnnnnnnnnnnnnnnnnnnnnnnnnnnnnnnnnnnnnnnnnnnnnnnnnnnnnnnnnnnnnnnnnnnnnnnnnnnnnnnnnnnnnnnnnnnnnnnnnnnnnnnnnnnnnnnnnnnnnnnnnnnnnnnnnnnnnnnnnnnnnnnnnnnnnnnnnnnnnnnnnnnnnnnnnnnnnnnnnnnnnnnnnnnnnnnnnnnnnnnnnnnnnnnnnnnnnnnnnnnnnnnnnnnnnnnnnnnnnnnnnnnnnnnnnnnnnnnnnnnnnnnnnnnnnnnnnnnnnnnnnnnnnnnnnnnnnnnnnnnnnnnnnnnnnnnnnnnnnnnnnnnnnnnnnnnnnnnnnnnnnnnnnnnnnnnnnnnnnnnnnnnnnnnnnnnnnnnnnnnnnnnnnnnnnnnnnnnnnnnnnnnnnnnnnnnnnnnnnnnnnnnnnnnnnnnnnnnnnnnnnnnnnnnnnnnnnnnnnnnnnnnnnnnnnnnnnnnnnnnnnnnnnnnnnnnnnnnnnnnnnnnnnnnnnnnnnnnnnnnnnnnnnnnnnnnnnnnnnnnnnnnnnnnnnnnnnnnnnnnnnnnnnnnnnnnnnnnnnnnnnnnnnnnnnnnnnnnnnnnnnnnnnnnnnnnnnnnnnnnnnnnnnnnnnnnnnnnnnnnnnnnnnnnnnnnnnnnnnnnnnnnnnnnnnnnnnnnnnnnnnnnnnnnnnnnnnnnnnnnnnnnnnnnnnnnnnnnnnnnnnnnnnnnnnnnnnnnnnnnnnnnnnnnnnnnnnnnnnnnnnnnnnnnnnnnnnnnnnnnnnnnnnnnnnnnnnnnnnnnnnnnnnnnnnnnnnnnnnnnnnnnnnnnnnnnnnnnnnnnnnnnnnnnnnnnnnnnnnnnnnnnnnnnnnnnnnnnnnnnnnnnnnnnnnnnnnnnnnnnnnnnnnnnnnnnnnnnnnnnnnnnnnnnnnnnnnnnnnnnnnnnnnnnnnnnnnnnnnnnnnnnnnnnnnnnnnnnnnnnnnnnnnnnnnnnnnnnnnnnnnnnnnnnnnnnnnnnnnnnnnnnnnnnnnnnnnnnnnnnnnnnnnnnnnnnnnnnnnnnnnnnnnnnnnnnnnnnnnnnnnnnnnnnnnnnnnnnnnnnnnnnnnnnnnnnnnnnnnnnnnnnnnnnnnnnnnnnnnnnnnnnnnnnnnnnnnnnnnnnnnnnnnnnnnnnnnnnnnnnnnnnnnnnnnnnnnnnnnnnnnnnnnnnnnnnnnnnnnnnnnnnnnnnnnnnnnnnnnnnnnnnnnnnnnnnnnnnnnnnnnnnnnnnnnnnnnnnnnnnnnnnnnnnnnnnnnnnnnnnnnnnnnnnnnnnnnnnnnnnnnnnnnnnnnnnnnnnnnnnnnnnnnnnnnnnnnnnnnnnnnnnnnnnnnnnnnnnnnnnnnnnnnnnnnnnnnnnnnnnnnnnnnnnnnnnnnnnnnnnnnnnnnnnnnnnnnnnnnnnnnnnnnnnnnnnnnnnnnnnnnnnnnnnnnnnnnnnnnnnnnnnnnnnnnnnnnnnnnnnnnnnnnnnnnnnnnnnnnnnnnnnnnnnnnnnnnnnnnnnnnnnnnnnnnnnnnnnnnnnnnnnnnnnnnnnnnnnnnnnnnnnnnnnnnnnnnnnnnnnnnnnnnnnnnnnnnnnnnnnnnnnnnnnnnnnnnnnnnnnnnnnnnnnnnnnnnnnnnnnnnnnnnnnnnnnnnnnnnnnnnnnnnnnnnnnnnnnnnnnnnnnnnnnnnnnnnnnnnnnnnnnnnnnnnnnnnnnnnnnnnnnnnnnnnnnnnnnnnnnnnnnnnnnnnnnnnnnnnnnnnnnnnnnnnnnnnnnnnnnnnnnnnnnnnnnnnnnnnnnnnnnnnnnnnnnnnnnnnnnnnnnnnnnnnnnnnnnnnnnnnnnnnnnnnnnnnnnnnnnnnnnnnnnnnnnnnnnnnnnnnnnnnnnnnnnnnnnnnnnnnnnnnnnnnnnnnnnnnnnnnnnnnnnnnnnnnnnnnnnnnnnnnnnnnnnnnnnnnnnnnnnnnnnnnnnnnnnnnnnnnnnnnnnnnnnnnnnnnnnnnnnnnnnnnnnnnnnnnnnnnnnnnnnnnnnnnnnnnnnnnnnnnnnnnnnnnnnnnnnnnnnnnnnnnnnnnnnnnnnnnnnnnnnnnnnnnnnnnnnnnnnnnnnnnnnnnnnnnnnnnnnnnnnnnnnnnnnnnnnnnnnnnnnnnnnnnnnnnnnnnnnnnnnnnnnnnnnnnnnnnnnnnnnnnnnnnnnnnnnnnnnnnnnnnnnnnnnnnnnnnnnnnnnnnnnnnnnnnnnnnnnnnnnnnnnnnnnnnnnnnnnnnnnnnnnnnnnnnnnnnnnnnnnnnnnnnnnnnnnnnnnnnnnnnnnnnnnnnnnnnnnnnnnnnnnnnnnnnnnnnnnnnnnnnnnnnnnnnnnnnnnnnnnnnnnnnnnnnnnnnnnnnnnnnnnnnnnnnnnnnnnnnnnnnnnnnnnnnnnnnnnnnnnnnnnnnnnnnnnnnnnnnnnnnnnnnnnnnnnnnnnnnnnnnnnnnnnnnnnnnnnnnnnnnnnnnnnnnnnnnnnnnnnnnnnnnnnnnnnnnnnnnnnnnnnnnnnnnnnnnnnnnnnnnnnnnnnnnnnnnnnnnnnnnnnnnnnnnnnnnnggtcgcagctccactgaatttgtggagctactgaaacgtgtcgtcgcggtagccaagatcccacgccggtcgcagctccactgaatttgtggagctatttcttcagcgccactctccgtggcgcttttcttttttttcgctagaatcggggtgtgtttcgctccgttgaacaagccaactttcattctcgacttgctgctcacattcagcgagcggacgcgccgttgttgcttgagggagcgacagggcttggaaagactcgtgcttatctagccgcactcaagggcgcagtggaacaaggcaagtctgtcgcgattgtcgttcccacacacgacctgatctcgcagctgcttgcttcctcagatctgacagcggtgattcctgcgaccatcactcgcgcagcctttcgcccacggtcaatgtacgactccaagcgcgagtacgaagaagcgaaagcaagcgcgatagacgcgcaaatactgatctgtacaagttcatcgatgatcattgattcacgaacgaagggcaagtatcacggcgctacactgcgcgactacattctgtttgacgaagcggatcagcttcctcagtacgcagcactctcacgtgaccaagagatccgtggaggcgaactgaagcacctcggtatccgtggttctaatgcgaggacaattgcgcaagcggtgattgatcacaagagtgcggaatttgaaactcgcgcagcagcagaactgattcttgacgcactagaggaacccgcttggtatcacagcgcagggatgacagacgatggtggcattgcgctttatcacaaaatgccaggacgattgctcaagcgagtttccaattcacccaatgtcgcttttgtgagcgcgactctttcaattggtggaaagtttgatgactttcggcgagcgatgggaatcaccacacaaagcgcattgtccgcgatcattgagccaagcgatcacggaacactgaagtttttttacgccgctcatgaggtttcttctgaggaatggctacccgccacacaggaagcgattagtaaggcgcggaagccttgtttggtagtcactccaagcaacgagttgtctcagatgttgggtgggttgtttcctcaagccattgttcgaacggctaaggagaagaccactgatgcgattctgcggctgacagatgaaagcaatattctcatcgcctcagcagcttgggcgggattagacacacccattgagtggaagagcattgtgatcccgcgtatccctttttcgcgcccacaagtgatcgacggaaatgtggagagcagcttctttgattcacgcaacagtgccattcgccgaatgcgacaggtgatcggtcgtgggctacgcaagcctgatgcggagtgtgaggtctacattcttgacgagcgattggcgatgatcgagtcgttcatcccgtctaggtttcagcaggcgtgggtggcgcgtaaaatagtggaaggcgcaagagttgaaaatacgctatcaaaggctgaacgggatccgctgacacgcaagtcagcactgcgacactttggtcggaaatgcatgtcctgtgagttcgtcccgcgagtagacagtcagctggaggtccatcatctttatccactcgctgatggcggtgagcgagtcacacggatcgaaacggatgtggcggtgctttgcgccaattgtcaccgtttggctcattcggcgaaccctccactcaccgtggagattctcaggggacttcacctgcgcaagggctgagtcggcgtgtgcctaactccactcaccgtggagattctcaggggacttcaccaatcagtggggtcagagcagtaagacgaatccgtgtggaccaagggatcccctgtaaccaaccccccccctgccgattgaaggggggtggggggggtcacgcaatatctttgagtatcaagcgggatacttctcccgcacggacgatcctgctgaggtagagtgcgttctagatggagggaaactgtcttcgccgtccacgcttgtccttttcctgtcctgcagaggccatcagattaggacaagctcgaccggactgcttactctaagtccttgaaaattggtgccggcggagggagtcgaacccccgacctgaggtttacaaaaccactgctctaccaactgagctacgccggcaacggccgtcattctagccctgccgcgccggcgccggtcctccgttggcccacaggtgcgcgatgagtcccaggaccgccatggtccagacgatcaccgcgctcgacggcaggtcggtgacgaccgacagcgcaagcccgaccaggtagctcgcggcgccgaggccgtagccgatcgcgagttgccgccggcccgcgatccggtaggtcgcgacagccggcacgatcaggctggtgaacacgaggtagacgccgaccatctgcaccgaggccgtcacgaccagtgcgaacagcaggtagaagccgatgcggccgatgcgctcccgccacaggaaccagacgacggcgaagatgccggtcaggatcgcggtccgcacgagctgcgtgttcgaaacccagaggatctgccccgacagcaggtccttgaggttctcgccgccgtgcgggtcgttggcgagcaagaggatctgcgcggcggaggccagcacgaacaggatgccgatcagcgcctcctgcgcctcgggccgtttgcgctcggtccaggtgagcagcagcgcaccggcgaccgccgccgcgcccgcggccgcctgcgcggtccagccttcgaccgggaggtcaaagcggctcgccgcgatcacgccgagcgccgcgacctgcgcgatcgcgaggtcgatgaacacgatgccgcgcgcgaacacctgctggccgagcggcacgtgcgagatcacgaccaggatgccggcgatcagcgccggccacaggatgctgacttcggcggagaggagattcatggcgcggctccgagcaggcgctcgatcgtgtcgtcgaacagtgtgaagagatccttcgcgcccgcgctgccgccaacggagaacgggagaacgacgacgggcgcgtgcgcgcggctcgacagccagttcgcggccttcgggtcgttgtaggcgttcgcgaggatcatcctgggcggcgtcgcggcgagctgggtgacgagctggccgagatgaccggccgacggcggcacgccgggcttcggctcgatggcggcgagttccttcatgccgagccagcgcacgaggtagacctggtcgcgatgcatgatcacgaccggcacacccttgagcggcgcagcctgcgcttcccagcgcgtcatcgcctctccccagcgcttcgcgaaatcggcgccccgcgccgcgtagatgtccgcgccggccgggtcgatcgcggcaagtttcgcagcaagcgccttggcgacggccacgatgttgcggggatcgagctggatgtgcgggttgccgagcggatggatgtcgcccatcgaacgatcgagcttcgtgggcacctcgatcagccgtactgccgcggttgcctcgaaaaaacccggcgcgccgcgctggatgcgcggatttccggactcctgcatcagcaccggcagccagcctgcttcgagctcggcgccgttcgcgaccagcagctccgccgtgcgcgcccgcgcgacgaggctcggcttcgcctcgacgcggtgcacgtcctgcagcgccgtcgtcgctgtgtacacgtccacgcggtcgccgccgagttccttcgtgagtgcgccccagtcggcggtggtcgcgagcacacgcacggctgcggcggaaggcagcgcgagaaccaggaggcacagcgccaggccgccacggatgaagttcttcatggctgctcctagtacttgtgcgcgccgtgcgcgccgatgccgaacaggtattgcaggacgagctggcggtcggtgtcgccgtcgtcgcgtgcctcgtcccaggcgtactgcagtcgccagcgcgagaactcgctcgggttccagtcgagcatgatcgtcgtgcgggtcggatcgcccgcgagcagcgacgggaagtcgccggccgcgagcagccccgagtcaacgagtccgatcgccggatcgcccgagtcgagcgcgtcgtagcgcaggcccgcgcgccagcgcggcgtgaactgccagacgccctgcaggtaccagccggattgcgtgccgcggtacgagtcgacgagcgccgcgttctccaggtcgaaggcgagctctccggactcgcggcattccatgtactcgccctgcagcttcaagtggcggcgcgccgggttgccgcccggcgcccacttgaacaccgcgtcggcgacccaggtgcgcgaacttcccgtgaaggcgttcagcacggggtcgccgttggcgtccacgtcctcgtactcgcggccttcggcgtcgaggtcgatccaggagccgccgatgcgccagctggcattggtgccgaggtcgccgccgacgtgggcgaagagcgtggtgccgttgaggccgtttccgccctggcgggtgccgggaaacgcgtcgccgttgccggtctcggcgccgagctcgacgaacaggtccgtcggcgcgatccacttgagctgcacgccgtcctgcgcgcgctggttgccgaacatcgcctggtagacgagcggctggtccgcgaagtcccaggcgtgcgcgtgcacctcgttcaggtagccgaacccggaaaagaaccggccgcccttcgcgaccaggccggccggcagcgccagcgtgcggaagtaggcctcctccacctcgatctcgtcctcgcccgcgatcgccgcggtgagttgcgccgtgaagtacgggtccacgctcgccgcgagcgtgatctcggactcgccgaggctgaagctgcgctcgccgagacccacctcgccgccgttcggcatgaagccggccatccgccagtcctccgggtcgcgcgaggtgtcggcgtagctgccggcgagcaccagcgagatcgcgggattgaaggcggacgcgctgctcgccgacgccacgggcgcagccgcctcggctggcacctcggcgacggcagcggtcggcccggactcgagcgcggcgagccgcgcctcgagcgacgcgactcgcgcttcgtagtcggatttcagggattcgagctcggcgcgcagcgccgcggcatcgtcatcggcccgcgccgtcggcgcgagcgcggcgcaggcaactgccatgagcgccgcaatgggcttgatcgcagacatggtgaacctcgtctgaagagtcgaatgccggccggtattcgcggccggtacgggtcagcttcaggcgagtgcgggtggcgcgcgggaacggaacgcccggaagggcgcggtgtgggtggcgggtacggatgcttcgggaacgctcgcgacccaggcgaccgtgcggacaggcacggccggcgctggcgcggccactgcgtgctgcaactgcgaagatgccagacaggcgccgcagctacgcgcagcacccagccggtccgtcggctcggcgagcgggtgcgaataaaagtggatctcggcgccgaactgcgccacgagcaggaacagggccagccaccggccgacctggccgaggcgacggtgatcgagcgtcaggtccatgacgacatcagtctaccacagcgggctcaggcacccgcctcgctgcagggcttgacctccaggcgcaggatgcggccgccctcgccctgcaggcgcgcggcatccggaagctccctgggcggcacgacgtcgacgtcgatccagtacaccctgcccatccgctcgcggtcaacgatgcgcggatcgaggccgatggccttcgcatcgtccaggcgccggagcgcacgctggcgctcgctgaacaggccgagcgagatggtgacgtcgctgccgtcggccggcatcgcgtaggcgtcctggacgccggcgcggcgcaggcgcgcgatgacgtcgctcgccgccgcacgatcggggatgcctccgagcgtgacccagtatcctctccagacctcgccttcacccgcgcgctgccgcggctcgagctcgctctcgcgcaggagcgtcgaggcgcgcgccgcgtcggtgaggtcgatgaacgggccaaggctcaggcagttgtcgcgcggcaggtctgtggcgcctcccgccggcgtcggcgccgcttcgtgcgcgagcagcaggttcttgcccgtggccgcactcgtggtcgcggccggatcctgcgagggcgcgatccattgcgtccagccgtaccaggcgagattcgcgaacagcagcaggtagatcgcgagcttcacgcggtcaatgtatcactcaccaagcgaacgctcacttcgcccgacacgatccgccgcaatttcccgccgatttcgagcagcagggccccgtcggcgtccacgccgcgcgcgcgtccctcgaggatcccgcccccctgcagcacggcgaccgatcggcccgcgagcgcgtcggccgcctgccactcctctgcgatcgccgcgaacccccggacgccgtactcggcgagtgccgcgcaaagcgccgcgatcagcgccgcggcgagcgcactgcgcgtgggcggtgtaccgagcgatgcgaggtcgacggcgtccacgccttcggccgcaagctgctcgcgcgccgatgcgggcagccgcacattgataccgacgccgacgaccacgtacgcgggtcccgccgcctcgcttctcaggtcgatcaggattccgccgagcttaccgtcgccccggacgatgtcgttcggccacttgagggccagccccgtgaagccaagactcgcgagcgcgcgcagcaccgcgacgccggcggcgagcgagagtgcagatagcgcggccggcgcgtcgcgaaacttccagccgaccgacaggcacagccccgcggcgaagggcgcgacccagcgccgcccgcgccgtcctcggcccgtgctctggaactcggcgaggcaggcgtcgaaacgcccgggcggcaggtcctcgaccgtcagcagccggtcgctggtcgaatcgagcgactcgtgcacctcgaggctgcgcagccgcgcgcacacgtcttgcggcaggcccgcgcggatctggtccgcatcgagccggtccacgcgcccgctcatcgcgccgggccccgcggccgcaacagccagagtcgaatcgcgcgcggctcggcgccggcgcgcatacgcgcgaagttgtcgcggtgcgcgaaagcgacgagcgccgtcatcgccagcgtgaacgcgaacagggcacgggaagcgatcggcggccagcccgcggcgactgccgcagccgcggccgccatgaccgtcgcgaggccgatgaatccgctcaaaatgacgacggcaagccaggcgccgagcgcgacaacaagcagccccggcgcgagcgctagcaggctgccggcgagcgtcgcgccgcccttgccaccgcgaaagccgtgccagagcggccaaacgtgcccggtgaccgcagccgcggcgcagcacaccgcgagccagtcgcgcgcgacggccgggtcctgcgcgacgcccgggatcgcgaatcccggcaaccagcccgcggcgagccagcccttgccgaagtcgatgatcacggtggcggcggcgaaggcgagaccctgcgtgcgcaaggcgttcgtgccgccggcattgccgctgcccatcgtgcggatatcgacgccgcggaacgcgccgacgatcagcgcgcccaccacggaacccagcaggtaagcgatcagcgtcttgaggccgagctcgagcaacagcgggctcccggtcgtgcgggggccgatcttatcacccgcgtggcggcgccccgcgcggcaggaagatctccgcgagcatgcagcgcacgctgccgccgccgagccgttcgatggtcggtatcgccgcggtgacgacgctgccgtgggcttcgaggcgccggcgcttgtccggcgcgagcgcccgccacgcagcctccgagagcgcgatgcgcgcgccgccgtcgcgcgcgcgcagcatcagcaggttgcccgcgaagcagcccattcccgccgcgtcgatctcgatcacctcgtggccggactccgcgagcacggcgtgcaccgcagagcggcgggcggcgtcgggaatcgcctcggcgcagagcacggcgacgccctcgcccaccgccatcaacacgttggtgtggtacgcgggccggcggtccgggcccagggcgtcgaaggtgacgatgcggtaaccgagccgggccgcgaactcggcgagcgccgcgggtgtcgtgcgcggcgacccgcaggcataggcggtgcgcgacgggcgatcgagcacgagactgcccgtgccctcgaggaattcgccgcgccgctcgagcagcgagaggtcgacgatgcgcgatacgtggaatcccgcgcgcttgacctcgtcgatgacctcagggcgccgctccgcccggcgcgagggtgcgagcatcgggtacagcacgacgctgccgtcggcatggaagctgacccagttgttcgggaaacaggcgtcgggcttgacgggctccggagagtcctcggcgacgatgacctcgacgcctgcgccggcaagacacgcggcgagcgtgtcgaattcgcgggccgccgccgccgcctcgccggttcccgtgcccgcgcgctggaatcggttcgactccgcggtctccgggttccagccaaagcgcgcgggccgcaccatcagcaccgcatcggcgcactgggcttcgacaggcgttgcggcaatcatcacagctccatcttcaggcgcgatcgtgcgccgctttctccgcgatcatgatcgtcggcgcgttggtgttgccgccgatcggcgccggcatgaccgaggcatcgacgacggacagccgctcgattccgtgcacgcgcagcgcagcatccaccaccgccatcgggtccgtacccatgcggcaggttccgagtgggtggtagatcgtgtccgcgcggcggcggatctgcgcgatcagcgcttcgtccccctcgccttccgtgaacagctcctcgcaccggtgcggcgcgagcggcgcgccgtccatgatcccgcgcgcgcgcttcacgcccgcgaccagcgtcgcgagatcctcgggatcgacgaggaagttcgggtcgatgagcggcgcttcgcgcggattcgcggagcgaagacccacgcggccgcggctcttcggccgcagcaccgccacgtggcaggagacgccatagccgtagtgcaggcgccgggcgtggtcgtccaccaggccgaccaggaaatgcaactgcacgtccggccgcgcgagaccctcccgcgtgcgcaggaaggcgccggcctcggcaaaattggtggtcagcaggcccgtgccgcggtcgcgccattcggagtagccccacagagcgcgccacgcggtgcgcgcggtgatgcccatcaggctcgcgtcctccgagcgatacaccagcgcgaggtcgatgtgatcggcgaggttcgcgcccacgcccggcagctcgtggcgcagcgcgatgccatggcgcgcgagttcctcgcgcggaccgatgccggacaggagcaggagctgcggtgatccgaaagcgccggcggagaggatgacttcgcgcgccgcgccgatgcgcgccgtacctcctcgcccctcgacctcgacgccggctgcgcgcccgttcgcgaacacgatgcgcgtggcatggcggcaggtgagcacggtgagattggggcgcccgagcgcgggacgcaggaaagcgaccgcggcgctgcagcgccgaccgcggcgctgcgtgacctggtacagacccgccccgtcctgacccgcggcgttgaaatccgggttgcgcgagaggcccgcgcgcaccgcggattcgacgaaagcctgcgaggcggcgtgcgggctcgggagatcggagaccgagagctcgccacccgagccgtggaagacatccgccccgcgctgctggtcttcggagcgccggaacagcggcagcacgtcttcataggcccagcccggattgccgagcgccgcccagtcgtcgtagtccgagcgatgaccgcgcatgtagatcatggcgttgatcgagctcgagccgccgagcgcgcgcccgcgcggctggtagccgcgcctgccgccgaggccgggctgcggctcagtctcgaatgcccagttcaggccgcggcgcgggatcgtaccgagcatcccggcgggaatgtggataagcggcgaacgatcctcgggaccggcctcgatcaggcacacgcggtgcgcgggatccgcgctcaggcggttggcaagcgcgcagccggccgaaccggcccccacgatcacggtgtcgaactgcacggatgacactgtgccgccggcgcggacgaaagcaataccgccaccggaatttcgcgcgcacgggcacgtttaggttgaacagcctagagtggcgctccatgagcctcatccgggccgaactcacacctcatcccgactgttcctgtcccgccatccgccagttcgcaatcgagatcgaccccgcgcgcctgcccgcctcgctcgtcatcctgtaccgcatcgccggcgagatcggccgcctcagcctgccgccggccgggttcgcgcgccgcgccgacggtctctggcaacatagctgcttcgaggccttcctgagggcgggaccggttgccagctactacgagttcaacttcgcgccgtccggggactgggcggcctggcgtttcggaaaaccgcgcagcgaacgcagcacgcccgggattcccgcgccgcggatggagcggcggcatttcccggacggctacgagatgagcgcgacactcccgatcgccgccctgcccgagctcgcgcgcgctatcgagatcgaggccggcatcacggccgtgatcgaggccgacgacgggtcgctatcgcactgggcgctcgcgcacggcggcgcgtcacctgactttcacgatccggcgacgttcgtgctgaaggtcagccggccatgaagttcggcatcgaccgcctgctgctcgaccgcgccgtgaggaagccgctcgacgggcggcgcgtcgccctgctcgcgcatcccgcctccgtgaccgccgacctgacccacaccatcgacgcactcgcggcgcacgaagacttccggctgaccgcggctttcggcccgcagcacggcatgcgcggcgagaagcaggacaacatggtggagagcgacgactacaaagatcccgcctacggaatcccggtcttcagcctctacggcaaggtgcgccggccgacgccggcgatgctggagactttcgacgtgctgctggtcgacctgcaggacctcggcacgcgcgtgtacaccttcgtcacgacgctgcgctacgtgctcgaagccgcggcgcggctcggcaaggcggtttgggtgctcgaccggccgaacccgatcggccggccggtcgaggggctgctgctcaagagcggctgggagagcttcgtcggcgcgggcccgatgccgatgcggcacgggcgcacgctcggcgagctcggcgcctggctcgtgcagcacctgaagctcgacctcgagtacgtgcaggtcgccatggaaggctggcgcccggcgcaatcgcccggctacggctggccgcagggcaagcgcgcgtgggtgaacccgagccccaacgcgccctcagtctccatggcgcgctgctatccgggcaccgtgatggtcgagggtacgacgctgtcggaaggccgcggcacgacgcggccgctcgagctcttcggcgcgccggacctcgacgccgacaagctgctcgccaacatgcgcgtgctggcgcccgactggctcgcaggctgccgcctgcgcacttgctggttcgagccgaccttccacaagcacgcgggccagctctgcgccggcatccagatccacgtggacgatcccggctacaaccattcgaagttccgcccgtggcggctcgtcgccctcgccttcaaggcgctgcgcgcgatccggcccgactacccgctgtggcgcgagttcgcctacgaatacgagacggcgcggctcgcgatcgacctgatcaatggcgggccggtgctgcgcgagtgggtggacgatccggcggcgaccccgggcgacctcgacgagctcgcgcgcaaggacgagcaagaatggcagtcgaaggagtgaggggatgaggcaggcggtacttgcgggtgtgctggcactcgcaccctcttgcgcgggcgccgaggtgaagttcgcggcgccggacggcttcctgatcgagcatcgcttcactatcgcggcgccggcagcgcaggtctgggaaacgctgctgcacccggaacgctggtggccggccgatcacacctggtcgggcaagcgcgagaacctgtccctcgtcgccgacgccggcggctgcttctgcgaacgctgggacggcggaagcgtggagcacggccgcgtcgtcgccgtgttcccgggcaagatgctgcggctcgacgccgcgctcgggccgttgcaggagatggcctgggtttgccccggttttcctgacaccgagattaggtgggaagatgatctcggaggtgtcagatgggcagacggagattcacgcccgagttcaagctcgaggcggtcaagctggtgaaggaacgcgg

SEQ ID NO: 32 - DNA, 22418 bp, Artificial Sequence
  Synthetic Oligonucleotide
gtggtcggatcgcccgaccagccacctgctgcgcgcgactgaagcagcacttgggcccgcgtgcatgagcgcgccctctccctctcacatcacaacgccacttccgagcgcgcgtcctgctgagcgcccggacaggacttcgggcaagaggttgtgattgcagcctctcaattcggatagcacgcgtcgattccgatgcggcaatgaaaaaagcaccagctgctttcgcatctggtgcttgttccattcttaattttggtgggccctgagtgactcgaacactcgacctacggattaagagtcctcatgttttagtattcgcctctgttgatgcacgttgatgcatgttgataaaatcattatcaatcaacaacttacaagttataggcaagcaaaagctcagcaacttggttgatgttcatttgcaaaaatagcgctgttctggctacatggtggctacatggcatagaatttggctacatcacagcgcccaccccaggcaaataggtagcaaatggcaagacccaagaaggatgcaaccctggacctcacgcaggccattgaactgaccgcaggcgcaatcgagcgactttcatgcccaccggggaagagccaggcattcttgcgagacagcaaatctccgggcttgcgggtcagggtgaccagcaatggcgcgaagtcctttgtctttgaaggcaagttgaaccgcaaaacgatccgacgcacgattggagacattcgtgcgtggcccattgaagcggcccggaccgaggccaacaagctgcgcgtcaccctggatggaggccttgaccctcgggaaattgagcgtcaagctgaagttgaacgagtgcaagccgccatggcagcgaaagaatcagaccggctggcgaacctgacggtcgcacaagcttgggcaacttacctatccgagcgcaaacctcactggggggatcgccactacgcagaccacatcgcccttacacatgaaggtgggctgaaacgagcccggatgcccggatgcctgaccaaaccagggccattggcaccccttatgaatcttcggctgagtcagctgaacagcgccgtagtggaggcatgggcagcaaaagaagcagccgaccgacccactcggaccaggctgtcactccgtcttctcaaggcttttttgagctgggctgaatcagaaactgacttcaaagctgctgtggacggaaacgcggcagccgggaaaagaacccgtgaggccgtggggcgtgcgaagcccaaaaatgacgtactggaacgcggtcagttgtctgcgtggtttgagcatgtacggaacttgcccaacccggtgacctcagcctatctacaaacgctacttctcactggagcacgacccggtgaggttctgggtttgcgctgggatgaccttgacccgcaatggatgagcatgttcatcggggacaaggtcgaggacgggcgcacgcttcccctgacaccctacgtgtggcatttgctgagcaacctgccccgtcgcaatgaatgggttttccctggcggacgcgccctggtgatgagcccagaaggcatccaacgcagacagcgtcgccagcgcaaactctcagcagaaggattgcctcacgacaccccccctgccccaccaagcagcgcaagcgggcgactgatcgaaccacgcagcgcacacaaaaaggcttgcaaagcggccggcatacaggggctcacactgcacggcctacgccgatccttttccaccctaactgaatggctggaaattcctgctggggtggttgcacaacttcaaggccacaaaccgagcgcaacggcagagaaacactacaaacggcgccccctggacctgctgcgagtacatcatgagcgaattgaagcttggatactggatcaagcaggggtgaccttcatggcaaaggccctgccaaattgccagccccacgcgacctgagcaaaaggcacacaacccagagcgcccgacccttctggcgaacaaactctcgctagggcgcaaacacaaagagcgcacgatttttaaaagccgcccaaaccaaggattttgataaagacggaccaggttgccgagacttgcaaagcgcgccagacccatgcagcgagtttgcttcaggcaaggcaagccaagccaaacgcggagaccgccaatccaagcactgcgacgcaaggatgaggcgactgcgaacctgggccgacaagcgcatcgcaaatgcggcaccattccagacagcagacaccgccccgaggaagtctggcgttagacataaaagtagtcaaattttaggccatgcagagccatgtgccgccactgcatcgactgagtaagaagtgcacttcggcgacataacgtgagcctggccaacgcatgcaaagcacgggttccagtccgaaagctagccatccccgccgcccaagaattgatagcgggcacttcgaacctcccaaccaaaggagcacaggttgacgagatgccgcgcaaaacaacaggcgttgaattttggcgagtagacagcccttgttgaaagaacccaaaggcacaattggcacgtaaaccacgagctacgcaccattggacccgccagcccaagccgttagcccgggacctcttaaggaccaccttaaaggcacatagcgcttcaacttttcagtgccgacatacgaggtggccctgaatcaccggtttccgggaccgatgcgaacgcatccgggtggcacggaccatctgattcaggagccacatacagtgtaagttacatctggccgccgatccaacgaagctccgccagctgcgcattcatcgccccctcaccgagcagccccaaaaagccaacttagctgcatcgagcacacggcccgtgcagccatcgaacgatggcctgctcaagaatcagggtaaacctgacgctgaatcagagctgaccgacccatgaagatgtatctgatcacttacatttacgggcaccggtccaattgcgcgttagacgcagactagacggtgcacatagggaggaaaaatgttcggacttttcaagtcaagggttgtgaaaaaatccttcgaaagcacactgcgcgcggtgctgtcaaggccaaggtatttgcagatgccaattgcaatgcaagtaatcgatgaactcagagcttttcagaactgcacaacgcgcgagagcattcaagtcctttcgcttggggccaaggaccgccgccatgcggccgtgagaagcggcgcaactgatgaaggcgactcccggtacgcaccacatgccttgcttgagtcgctttacctcgcagcattggtcgaacaagaatccctgccgcacatccaggggaccctcattcggtgggccagtgacctcggatttacgctgaacccgtctcaaacaaaccaaagcactgcaagttcttctgaaactgcttatgcccaagcagtcgaagagtacgcggctatttttgatagcaccctatcactgctgcaaacccatggagagcttgcacaggtagaggctggcaagcatatcaacattgccaactcagcattgctggcgaagtttggcaatgcagcgcagttcaagtcttcttctgaagaagcacaactcaaatttctaaagagtcttgcatccgtgtcagaaaagctaggcgccaaatcacccggtggcttggcatacctattatttgccacgtggctgaccgttctctgcacaggcaatcagcaatacgggcgcatctacgaggacaagctcgccgtgctttccaagtcagcgctcagcgcctgagtcagtcgcctgcgggaaatttccttgccatccccaaccacttgtttggcgctctacgacaagctcgcgcaccgacaaagtacttacaaaacgacatgtctcaatcaaacgaccacattcaaatgaagtgcatcgctgtcggcgcggttctcgcgttaccagttgcagttattgcagccggtgaacacggcagcgtcaagcttgcctacttcgtgtggtgggcgatcatcagcggggccgcatacttcctgctgaaaaagccaaaggggtgacctgaagccatcagtcacgaaccaaggcaaacagcttttcgtggcttaggccgacctttagtagccatagttgcatctggcccgagcgagcggctcctgaaactacctgactctgcaaaaactgccttggtgagtgccaaaaccttgatttttggttagcaaccactcacaattcatcaggcaactcgggctgaaccgccaccgacagtggccccctctcgccttgccagcccgcagccaagaaacttggaactgcagtcggttcacaggccggctttacccttccaggccccacaaactgccctggtcaacagttcaacgttgacttgcgattggacggccccaacgtatcaggggcgggtgccacccaggcccctagcctctctctgctgagcccgatgagacccagccgcatggcccgttgagcctggatgacgccaacgtttagtccacctgaaaaacgcaatgcgctcaggctggaacaccacattactccccttggggcatctaacggggcggaggtgcccatagctggcctgcgctgaggcaatcaagcgccggcttcaggttcgatccgcgcaagaaacgaaattgcccgcctccgctggtgtcgggcgcgttgctgcctcccacgcttcccatgtggagtcagaaacctccaagccttggattccctccctaggccgctgaaacaaggcgccggttgcgctgatcagccgtttgagcgctacctgggcatatgaatttgctggaagctggtattcagtttgagggcgcatgctgaactcctttggtagacagagtttcggcgccaggccacctgattcccatcacacgaaggagggccctccttgtggggatacgcgccaggcagcctgtgtaattgcaacctcagtagagctcccaccggccggctccaacacctgtcgcccgccacaggtcttgttgcagcgaaagttccaagacatgcggtgaagatttggaaattcgggaatcgaaatcagagggggacggtttcgacaccccacacccctctcatgagcagcgccccggtagacctaaacctgcgtctattcacgcgcagtttctgagcaaatttggcgttcgggtagctctgggggcaactgactgggtgcccctacagccgcacgttttgcaaagaagcagtggccgctcgtccacgttggacctcgtcgcgacgatgtaaggcgtagctacttgctgagcttcctgcatggacaaggccacttcgccactcgcgacctgggtggactaccaaggctacccgtcttaacggcttgttactatggtccgcgttcaacgaccaattactgggaggtaggctttggacaagattagggtgactgctcaccttggtgcgcctgtcgtcacaggtggtggatacatgacgctcgatgcgttgttgggagccattctgtttgacgagctgcaggatgtagacgctgcacatgcagccattcccgtgaagtgcacagcggggcttttccacgccagcgcggccatcatcgaaccgattcaaaaagaccgggtggctttcatcgccgcacttcgccctcagcactccattgaccccgacttgatcctcaagaacaagaagggcgggcttcatcggaaatttgataacgccttcaccaatgtgctgaatgcgtatcccatgctgacagcgccggcactcacctggtacgtggaaggcgacgccgacaagattgaacggctgctgtcacctgtcgaattcgtcggcaaacgaagagccagcggatttggacaaatcaggtcctggggttttgacaccgatgaactgaacggcattgagggtgtgtttggggaacctctaagacctgtgcctgtcgcaatgttcagtggcgacaccagccaccccgtcgttgacgcggcatggcggccagcgtattggaaggctgaacaccgcgcagcttgctacgcaccgagcttcatttaggtgacaccgatgctcgattttttcaatcagaactttggccgctacttggtcgagcaaaccgggcgcccggcacgggatgcacaacgagccctttccagcggccacaagatgcgcaaaggcggcctgccgcaacgcattgcgagcggctgggccatcgtgcgccccgaacggtcaacgatgcaattcgaactggcggctgacgacttcgagtacagcaagctgacccgctacgaagcattccaggccgagctggatagctgggatggcacgccccggattttcattgagttcgacaagaagcctgtgcccgtgaataacctgttcgtcacttatgacctgcgagcagtacgaatctgttcacccaaaggctgtgaaaccttcgactacacaaagccgcccgagaaggacggcagcaaaactcacagggtaatttggaagcaaagggggctgctcaagtgatggattacgttgtacccaaacccgggtcagtgtgtggatatgccttgcatcgcctggcagaggggctcaccggaggcgggcgcccgcagttcacggactttggcacctatatgctggttcggacagagatggcgctggaggccgaatcaaggcctatccgccccgtccaaacagggcaaatcatcggattcgaactgcgagcgtgtgtaggcgtcaaagtcaaaggcaagcatcggtacttcccattgagtgactggcgcagccggcatcaatggctcgcccgacaagggacgatccatggcttcgaggtcgtgaccgttcactgctcagcggccatggcaaccatgcaaaagggtcaagagcgattcacggtcgatcaaacggacttcacaggcatcttgaaagtgcttgatgaaagcaagttcaagcaggccattcacacaggcatcggcagcaagggtcgcgcctttggctttggaatgatcaacatctgaggggagtttcatgaacgatatcgtcatcaatgccaccatcaccacggtcggcccgctgtccatccgtacacctgtagctgaaggacagcaagcgaaccgatttgagaacttcccagtcatgacgcgcggccttgattcagagggtcggccgcttcaaactggctacctgccagcgacgaccctaagaggattcttgcgccgcgccatcgtcacacaggcgatgaccacagcggccgcagagggcaagcactacacacttcaaaaggcttacgcggacttgatcgggcaagacgctgagagtgagaagtctgagggggtggacttgctcaagcttcggcaactgcgagatgacaaccctgtgcttgatctctttggtagcggccttggcatcaaatctcgcttgctggtgtcccatttcttacccagcgtgaacgtattgcctgaagtcttcaccggggtccgcaaggatctagaggacaccgaaggcgtcgtggacttgctgactccatcggaccgggaggtctactttggccgcaacgatgcaaatagccggcgagcggatgcgggcaaggtggtccggcaaattgaacagaaaattcgcaaagcaaaaaaagacaaggctgaaacgactgaactggaggccgcgctggccgaggccaaagccctgtccagcaagtacgaggcggaaatgggggacatgaccaacagcagccgcaccttgaccacctactgggcacttcccgctggcatggaactcaagggccgcctgattgtgcagaaggccagggcacgggatttggacatgatcgaacaggcgctgggcgctttatcgttgcgtccgatcttgggtgcgcaatctgctcggggctgtggggaagtgtccggcgtattcgatgtactccaaggcactcgtctcctgaagaaaatatcaattggtgcttggagcgctgcggtggtgagtgaattttctcgcgccgaagagcaacaaatctcagcctaaacaacaagttagagctgctcagttcaaaccaccctgtgttggggtggttgctagaaccactgccgcacgcgcgccagctccaggcccgttcaaaccaccctgtgttggggtggttgctagaacctggctggagttcggccgcactggccgcaggttcaagccaccctgtgttggggtggttgctagaacagcgtcacccgcagcgcttgggctttggcggttcaagccaccctgtgttggggtggttgctagaacacccggctggacctgacgcgcagccagaaggttcaagccaccctgtgttggggtggttgctagaacagctcttccgtccaggtgctgccagcctccgttcaagccaccctgtgttggggtggttgctagaacctgcagaccgccatcgtcaacagcatgatcgttcaagccaccctgtgttggggtggttgctagaacgaatagcgcctctaacacctctggcgtcgggttcaagccaccctgtgttggggcggttgctagaactattgcgacacggtgggtatctcgcgggaggttcaagccaccctgtgttggggtggttgctagaacgtaggtggccacggcctgctcggcggtcaggttcaagccacactgtgttggggtggttgctagaactacgccagcagcatggaccccgagcgcacggttcaagccaccctgcgttggggtggttgctagaaccatcggcggcgcacctcgcagcagtggcggcgttcaagccaccctgtgttggggtggttgctagaacgccgagcgggcacggatggcagcggcgcaagttcaagccaccctgtgttggggtggttgctagaacccggcgcagctgctaccaggcggtgtgcatgttcaagccaccctgtgttggggtggttgctagaaccagaacggcatcaccatcaccgatgatcgcgttcaagccaccctgagttggggtggttgctagaacgtgcaggcgttcatcttggccttgcaagccgttcaagccaccctgtgttagggtggttgctagaacgcgctcatgcatgacccagccaagcccgaggttcaagccaccctgtgttggggtggttgctagaaccgccaggttccctacgtgcaagacgccatcgttcaagccaccctgtgttggggtggttgctagaacgccggtgacgatgcgctcgcggtcagccaggttcaagccaccctgtgttggggtggttgctagaacagcgggatcaggatcggcatggccagcagcgttcaagccaccctgtgttggagtggttgctagaacgccagcagcatcaccacgcccgtcgtccaggttcaagccaccctgtgttggggtggttgctagaaccgggtgatgccgtactgaatcgttcgctccgctcaagccaccctgtgttggggtggttgctagaacgtgtagccgatggccatgcagatgggttcggttcaagccaccctgtgttggggtggttgctagaacggcactttcgtgttcgatgtgcgcgacctcgttcaagccaccccttattggggtggttgctagacctggcggcttttttaggtgctcatgtcctgggctcaagccacacagtattggggtggttgctagaaacacctgcagaagctgggcgacggcaccatcgttcaagccaccctgacttggggtggttgctaaaacccgtctgtatagtgactcggtgttactggggttcaagccaccctgtattgaggtggttgctggaacacctgcatggcgggcagccgcgcggtggcttttcaagccaccctgtgttgggggtggttactagcgtgcgcaaggtacgcccgggttcggccatagcgagctactagcgggcatcgcagcgctctgcaagcaaccggcacagactggcctcgccaaaaccagtctttccgaacgggagcaattcttgctccatgtccaacaaattgtcgccagcactttcatcgaatgaacgcctcgccaatcggctttttcaggacggccgaacaacacaatctctacagcctgattcaagcgcaccagcgcaagttggacggcccactgctgcttgaaggcgggacgggcctgggcaaaactcgggcgtatttggcagccatcttcggggcggccagggctggatttggcgtagcagtggtgctgcctacacatcaattgattgatcaactcctcgcgtcttcagacctggcagcaacccggggggaagtgaccactgccgcattcagacccgagcgattctttgagggcagccgcaaggactatgtgtctcaaaagcgagcggcaattaacgcacaggtcatggtttgcacttctgcaagcgtgatcatcgatcagaggttgggtggtgaatacaacggtgtcaccctgcgcgactacatcgtgtttgacgaggctgaccaactgccagacatggccgccttgcagtcggacttttcagttggtgccgaggaccttgcaaacctcggcatttctttgaccactgcccctgaagccttgaccgccatcctcgccaagccatcgagggccgtcgaacctgaagtgagggctgctgcacgcatcatcttggacgcgatcaatgagcccgcctggtttcagaaggctggcattgacgatgagcaaaacattgtcctgacccacaagctgcccggccgactgctcaagaacatcagcaacaaggcaaacgttgcgtttgtgtccgcaactctcaccgttgcgggcaagttcactgatttttgcagtgccatgggcattgagcaggtcagcagcttgtcatccatcattgagccacgagttcatggcaccttggactttcgagtccgcgcactggaggtggatacgccggaatgggtggagggcgttgtttcggcaatagccggcgccgaaaagccggtgcttgtggcgaccacatcgcatgagttgtctgagatgctgggtgaacgactcaaggcagcagtggttcgcagcgccgaagagacggcggcgcaagccagccaacggtgtgcgggcgggatcttgattgcggcgggggcgtgggcaggcctggatactcccttgcgctggcgatctattgttgtgcctcgggtgccttttggtcagcctacggtggtcgatggcgcaatagtcacgagctacatcgacgccagaaacacggccatccgacgactcaggcaggtgatcggccgagggctacgcagccccgacgcagtttgtacgatttaccttatggacggtcgtgcagagagcctggctgggtttgttcctgaacgcttcacccaggcctggacgcagcgggatttcctggagggctcacgacaaacagtctccttgtccaaggcggagcgcgacccatcagtgcgccgacacgccttgcagcactatggatgcatatgcatggcatgcggattcaaacccaaggtgttggaacaactgcaggtgcaccaccttgagcctatcagcgagggcctacgcaggacgcgactcgaagacgtagcggtcttgtgcgcgctctgccacatcttggcccatacgaagtcgccgcccattgagttagaacggcttcgcaaaatggcagatccagggctaacctgaacgacatttgagccgcatcgcgccagcacaaaggctcgggagccactgtgccggggtactggctcagccccaggcacagggaacagccgtgttcacgggcattgcaggtcgctgagccactgtgcctctactatttcttagaaagataactaagagaatagacgcatcaacacaagaaacagccagcaggaagaagtgcaatacctgctggctcagcggctcagcggctcagcagacggctaagcaaatggggccgagtcgatttgctgctgatagtgctccaggccagcctgggccagggactcgtgatcatgcttttgacgctcatagccgcgtttctggtgcccgccgacacgccttcgcgccgcaacccagcccaggcgttcgatgatttcagcgacccgacgactcacctgaggcgtgcggcgggacatatcaatgccattgacacgaccgaacggcccgtcatcgcggatgctcaaacatccaatcaactcgtccgtggtgacaaagtcgcgcttgtaagttgccggcttcggaccaccatactcattcgaagggccggcaggctcagcaaacagcagctcgtccacatacgcttgaatcggcgcggcccatgggtcgtcaatgctgtagtcctcatgatgctcgcgggccaaacgctctgcatcccgaaactccacgccatgcgccaaaaagtagaccctcgcctcggcccacaactgcgcacagtcccgtcgggttgccgctggatcgcattggccaactttcaccggcagccatcttcgattgccagtggagtcacgcaagaaatctgcttgattggttgatgcaatgaaaatgccccggcgcgggttggtcttgggtctctctttgtacttctccacccagcagtcggacgtggcgctgagaaatgccttcaaggactctgaatccctggcacccaaaccgcgaagctcgggcaactccagcacgagtttgccgcgcatcttgcgggctgtgtcgtcatcgcgagtgctcaggtcaatggtgccaaagaagcgagcttcaaaggcaattgcctcgatggttgaagtcttgccgcaaccttgtccaccggcaaacaccgcaagcatgtcggccttgcaaccaggcgacaggacacgccccgccagtgctgaccagaggtacttactcacggctcggtggtactcggtgtcggcggcaccgcaataggcagaaagaaagttctccatgcgaggcaccccatcccaactcaggccattcagccactgctgcgcactgtcaaaggagttctcttcagcgacgagttctacggtgtctcgcatcagctctttgggtgcaagcacacggttggagcgctcaatatgttcgcgaagctttgtgtagtgactgtcagtcaaggtttgccactgcggggggtcttcacctgcaggtgccaacttgatgtctgcctcgaactgatcaaagccaatttgccagttgcacttggttggatcgcgcaggatcgtggcgagcgttgcaaccgtcgcgccgactttcttagatggactgagattggcaacggcctgctcggcattgccgtcgtagttgcccagcatcccaaaatcatcctcgggtgtgatcatctgacgactcgcttcactgaagacgtcgggatgatgttccttgatccagtcacgcatttgcctgcaactcggcatgtctccagggcgagtcccttctggaacgccaaggtcagcaccggcgaacaggtgcagccgaacgaaatcgtaaatgttgcaaggactgccagtccccttcggcgcagtgttgtggacgttcactaggcctcggccgcattcggtgacaaacacaccttcagccccatgaccttgccaatcaaagtgcaatggacggcgcctggacggcttgaaagcctctggcagcaacacatgcaactgctcaggtccaaatgcccggcagaacgcgccaatcagaccaggcttggcgtgtgggtcagccaacggctgccttaccactgcgaggcgctgacgtgccctgagggtcaactctgcggggaggctcagctctacctcattcttccaatccgatgaaatgaacaggccgagccgaacaggcacggggtcgatcacaccttcctcgaacaatggtgcagccgtgtagtgcagctgcacggggttgaacagggattggtcaactacgcccgcttcaatagtctctgcccaggcacgaagctcggtcgaggtgcgaggctgctgcagccagaagtgcaaatgcattttcagcagcccttcatttttggcatgcccagcccctgcagacaatgaccagcaaaaactgacgtcgtgaaacgcctcgggtagtttggctttgatgaactcaagcgccgcctgctcaggctcacgcactggatcggcaccagacggccgatagttgtctacatcaatcatcagccagtgcagcgcctggtcggtgaagtaggtcccccgacgcaggatatagccttccggcagctcatccccttgctcgatggccgcactctgcgccgcttgatcgccaatataagcaccgcgaatcagtccgacgcagcgctggggttcaatgcgtttcagcagctcgtgaagatcgaataagccctgcacctcttcggctgagactttgaaaaacctggctttgtcgtagctttgcagggtgccatcagcaagccaagtcttggccaaaaccggccccttggactcaagcaaagtgatcgcatcggattttgcgtttgaccattggctggcagccccaacaggctgcccatgagagaagccacgccctcccggctcggtcatgacagttgcaaccgggttcattggctcacccccagtacgcggcgcagctcagacaccggccacgccagacgcccgttgacacgaatcggccgcagcgggccgccctcgcggcaggcccaaatcctgagtgtctgcgcggaccgattcaaatgccgggctgcctcggaagttggcaaagccactcggggctcaagcgccagagatgtgagttgaagattcaaatcaagcatgtaaaaccacatgggtttgttgaacatgctgtcattggaatttctgcggcagtaccgccgtcaacaccgccgaactaccgccgtttgtgaaccgccccccgctccttgtacccgtcaatagcgtagagccgctcacattcctcatcgaggtcaatctgaatggccttgcgatcagactggcgccgatgggcctcttgctcctcttcaagcaaacggtttaaagctccccgcactccagcctgatgccatgagccacctggctggcgaacaagtgcgccacccagctccagcaaacggccaagccgccgtttacgcctgtcttccaaggactcatgcgaggccgaatcaggctgagcgaccgaccatctcagactgccttgaactgattcgtcctgctcgccctccaggtcttctgcatgcagaccgcacagcccccaaatggagtccggcccgcctgaactaatagccagctcgaaggcgtagtcatcactgcgcggcccattggtgtgctcgacatgcgatgcaagcgccttcaatgcacgttgacgcagttcttctgttgcaggtccgaatcggtcataagcatcccaaccccaaaggtgccccgcttcaatgagtgctgccaggtggcctgaaccgactttgaagaccagatcacgaagcagaatgaacgtgccagacggttccataggcaaaagtcttagtgacaagtgagggtgcgacacgtacccatggctacatggtggctacatgggccagaaaacaaacgcacaaagaagaacagcctagcgaccttcgccgctaagctgttgatttcattcttaatttttggtgggccctgagtgactcgaacactcgacctacggattaagagtccgctgctctaccaactgagctaagagccctacgctttgtttttcttgcttggcgttaatttcttagcaaccttgcaagccttgcagtatagcatctatttttgcaatttccactgttttgatgaaaatcttaaaaatttctgcttttcagcttcttcgcacttttgaatcgatggtcagcgcctgagcgctttaaccgtcgcaaatcaaaagatggtgggtcgtgcgggactcgaacctgcgacctacggattaaaagtccgctgctctaccaactgagctaacgacccatcaagcgaagcccatcattatagccaggaatttttgaccttcgcaagacctttgaacgactttcttgaaggctccaaaaaatcttcgaaggcatgtctcaactgcatgctgaagcactgacacggcggaggcaatccgggagccccgccggacatgccaccaacgccgctcagcgaactttgtgtgccaaggtggcctgaatcaactcagctgccgccgccatgccgaaactggccgtgacggccacgctggagccgtagccgtggcagttcaacgtgccgtccacatcacagagttcggcgccctcgccttcggccgcggggcggtgtacggcctcgcgcgaaaacacgcagcgcacgcccagcttgccctgacgcggcgcgccatgctccttgcgcaagcgctggcgcagcgaggcgagcaaggggtcgtgcgtggtctcggacaaatcctcgatgctgagccggtgcggctcccgtttgccgccggccgcgcccacagtcacaaacggcaaatggcgcgcacgcgcccaggcggccatacaggctttggcgcgcacctgatcgcaggcgtcgatcaagccgtccagctgtgcttcctgctccgggccgcccagcagggccggccagttgccaggctccacaaagtcttcgatcacccgcacctggcactccgggtggatgtcctggatgcgctggcgcagcgcttcggccttggccatgcccacggtcgaacccagagcctggatctggcggttgatattggattccgagacctgatccaggtcgatcagcgtgaggccggccacgcccgagcgagccagcgcctccacggcccaggaccccaccccgcccagtccgaccacggccagatgcaggcctcgcaggcgctggtaatcggccgcaccgtagaggcggcgcaggccgccaaaacggcgttcgctgtcgggcgggaaatcggatgtgaagtttggcgcggtacccaggttcagcggcgtgtcatccatggggaaagttcagacgcgcgggcgcccctgtgaagagtggaaagcaagccgcggattttaggtcggcaaaaggaaaaaggccctgcaagcagggcctctgagaatcgtcaccgcggcacgcatccagccaaggctggataccgacggtccgggtgaagaatcaggacttgagcgcggccaggcgttccttgccagcctgcgccgcttcggtgccggggtaggccttgagcaggtcttccaggctgcggcgcgcagccttcacatccttgagctcgatctggcagttggccagggccagcagcgcctcaccggcgcgcggatgctccgggttgcccgatatgaaggccttgaagctggcgatggcgtccttgtagtcacgcttgccgtactgggcattgcccagccagaagcgcaccgaatcgctgtacccgctggccggataacggcgcgcgaaattgttcagcgcgctggtggcctcggcgaaatcaccgcgacgcaccaaacccatggctgcctcgtactgccggcgctcctcaggctcgacctgaaactcgcggccatcgagcgccactttctggggctccatgggcttcagacgcgaatcaaaggcctgcagctggtcgttgagcttgcgctgggtctccgacagatcacgtgccagttgctcgttctgaccgcgcagcttggcgatctcagagcgcaggccgtcgatctggctgttcagatcgagcatgctgcggcgcagcggccccaactgctcctgcaccagcgcggtcagctgctcggcgcgctgacgctgggcgtcctcgctttgctgcagcttggcgcgcaggtcgaggatggccttgcgggcatcctcgtcttcaaacaagccagcccgcgccggctggctcaaggccagacccagcagcaggcagaacggcagcagccgcggcagcttcatctcacttgtccttcagctcgacgcggcggttcttggaccaagcggcttcgtcgctgccttgagcggcgggacgctccttgccgaagctcacggcctcgacctggttggcggccacgcccagcaggctcagggacttggccacggcttcggcacgcttctggcccagggccaggttgtactcacggccgccgcgctcgtcggtgtggccttccaggctcagggcgatcttgcggtcgttgttcaggcgcttggcgtgggcatcgaccaggccgcggtactcgtccttgacgacatagctgtccaggtcgaaatacaccacgcgctggttggccacagcggccgtcagctgagcacccagatccacggtctggaccttggattcagacatgggttgggcattggccgaggaattggtcggagccgtctgggtcaccggacgggtttccaccggcgccggctcatccagcttcacggcggtgctgcaacccgccagagcggcagcggccaagagggacagagcaaaacgcgtcatcttcatgaaaagcactcctgtttcgatcgaaaggatcggtcttgaaaaagttccaccgctaaccggtccggtcggcgcattgacaactgcgaattgtcatacagcttgcgcaagtttcgcgcggcagaactgcaaagaaatcaacggccaaacggtccccaggtcggttctcgcacatcggcaagcgaagaaatcagtttcgccttgatgcggccgtccagcgtgctggtcatcagcacatcgcggccgcccgaacgggtggcgtagacgatcaggcggccattgggagagaagctcgggctttcgtcatcgctgccatcgctgatctgctgcaccacacccgaggccaggtccatcacgcagatgcggaactggctgccgttcaagcgggtgacgaaagccaggctgcggccatccgggctgaccgaggggctgatgttgtagttgccgctgaaggtgacccgctcgggcgagccgccgcccaccgccacgcggtaaatctgcgggctgccgccccggtcgctgacgaaatagatcgagcggccgtcgggcgcaaacaccggctcggtgtcgatggccgagctctgcgtcaggcggcgcacgccgctgccatcgcggttcatcacgaagagctgagagccgccttcgcgcgacaaggtcatcaccaccgactcgccatcgggcgagaaggccggcgcgctgttgctgccgcgaaaatcggccaacttgcggcggcgaccagtctgcaagtcctgcacccagaccacggccttgcgggtctcgaaggacacgtaggccagctcgcggccattgggcgaccaggccggcgagatgatgggctcggggctggccagggcgacctggccgccctcgccgtcagcatcggtgatgcgcaggctgtagcggcctccggcgcgggtgacataggccatgcgggtggcgaacacgccgcgctcgccggtgagcttttggtagatggtgtcggcgatgcggtgggcggccaaacggacatcttcagcggtgacggcatgggcttcgccgccgaggtcggcgcccttgaccacatcccagagcttgtagcgcagatcgaagcgaccatcggccaggcggctgaccgaaccggcggccagggcatcggcctgcttgccgcgccactcgctccagttcggcgcgctgccttcaaacaggcccggtgcggcatcgatgatcttgaactggccgctgcgctccaggtcggcgcggatgatggcggccacggcctggccactggccgactcatcacggaaatcaggcaaggcgatgggcagctgcgagccacccacgccggagatttccacccggaactgggccagtgcgggcccggccagcagcgcggacgcggcagcagccgcttgcaaaacgttgcgacgcgagaggaaatcggacatggaagaactcatggaaaagctagcgtttcgaaacatgacatcgtctcagggggacccagggccgcagacacggcctggattttgcctgagggcaagtggccggacggccggcaagggcgacgtagcacgcggcgcgcccacaggcagcgctcagagcagcacgatgtcgtaatgctcggtctgattggtcggctcggcggtcagcgagatcggcttgccgatgaaatccgacaggccggccagatgctggctttcttcatcgagcagcatctccaccacattggcagcggccacgacgcggaactccttgggcgagaactgccgcgcctcgcgcaggatctcgcgcatgatgtcgtagcacaccgtgcgcgcggtcttgacctggccgcggccttcgcaggtcgggcagggttcgcagagcatgcgcgagagcgactcgcgcgtgcgcttgcgcgtcatctcgaccaagcccagctgggtgaagccacccagggtgaccttggtgcggtcgcggctgagctgcttgcggaactcggtcagcacggccgacttgtgctcttcgcgcgtcatgtcgatgaagtcgacgatgatgatgccgccgagattgcgcaggcgcagctggcgcgcgatggcgccggccgcttcgaggttggtcttgaaaatggtgtcgtcgaaattgcgcgcgccaacaaaaccgccggtgttcacatcgaccgtggtcatggcctcggtctggtcgaagatcagatagccgcccgacttcagatcgacgcgacgggccagcgcgcggctcagctcggcatcgatgttgttgaggtcaaaaatggggcgttcaccgcggtaatgctcgagcttggccgtggccgccggcatgaaggtctcgccaaaggcatgcaacacgtcgtactgcagcttggagtcgatgcggatggagccggtgcgctcgctggtcaggtcgcgcagcacacgctcgaccaggctcaaatcctggtgcagcaaggtgcccggcggggaattgaaggcgcgctcgcggattgcggcccaggccttgcgcagataggcaatgtccgaggccagctcttcatcgctggcgtcttcggcattggtacgcaggatgaagccgccacccccgccctcctccggcttgccgaccagggcttgcatgcgcgcgcgcagctgttcgcgcgcctcgtgcgagccgatcttttgcgagatgccgatgtgatcatcctgcggcaggaacaccagcatgcgcccggcaatgctgatctggctggacaggcgggcgcccttggtgccgatcgggtccttgatgacctgcacggtcaaggtctgaccctcgaagaccaggcgctcgatcggcgtggccacgccggcctcgccgtgatggttgcgcccagcctgggtgccggtcagatgaagatcggcgacatgcaaaaaggccgcgcgctccagaccgatgtcgatgaaggccgattgcatgcccggcaagacccgggcgaccttgcccgagtagacattgcccaccaggccccgctccagcgtgcgctcgacatggagctcttgcaccgaaccgttttccaccacggccacgcgcgtctcttgcggcgaccagttgatcaggatgtcttccatggcgtctcgtctcaatcctcgaatgctgtcgcaaatgctcttgcaagtgctgttgcatgagggccgtgaaacgttcgggccttcatgcgacaagactcgtcttgtggtcgtcggcgccgcggctcgcggggagcgaacttcagaagcgccagccccaggcgctcagcaattgcgcggtctcaaacaggggcagacccatgatgcctgaatagctgccctcgatgcgcgaaatccaggccgccgcctggctttgtatcgcataggcgcccgctttgccgaagggctcaccgctgtccacatagcgacgcagcgcgtcctcggtcaccggggcaaactcgacttcggaaacactgagctccgcctcgcgccgcccggcctgccccacggccacggccgtgatcacccggtggcgacgcccggccagcagacgcaaggtgcgcagcgcgtcctcggcatcggctggcttgccgaggatttgcaggtccaccgccaccgtggtgtcggagcacagcaccggggcttcgggcaggtcgcgtgcagcgcggcgcgagagcgcagcatcgagcttggcctgggtcacccgcgccacataggattcgggcacctcacccggccagacagcctccagggcctcggcgtcttcctcgggaccgggcagcaagagctcatggcgaacgccgagttgctccagcagctgacggcggcgcgggctttgcgaggccagatagatgaaagggcttgggctgctcattcgcggtggtaggggtggccggtcatgacggtccaggcacggtacaggccctcggccagcaggacgcgggcaaaggcatggggcagggtcaggtcggacaggcgcagggtttcatcggccgtggccttgatatccggatgcaggccatcggggccgccgatgaagagggccgcatcgcggccctcgcccatccagagctgcatgcgctcggccagctgcttgctggtgcggcgctcgccacgctcgtcgaggat

SEQ ID NO: 33 - DNA, 21866 bp, Artificial Sequence
  Synthetic Oligonucleotide
  misc_feature (1)..(9009): n is a, c, g, or t
nnnnnnnnnnnnnnnnnnnnnnnnnnnnnnnnnnnnnnnnnnnnnnnnnnnnnnnnnnnnnnnnnnnnnnnnnnnnnnnnnnnnnnnnnnnnnnnnnnnnnnnnnnnnnnnnnnnnnnnnnnnnnnnnnnnnnnnnnnnnnnnnnnnnnnnnnnnnnnnnnnnnnnnnnnnnnnnnnnnnnnnnnnnnnnnnnnnnnnnnnnnnnnnnnnnnnnnnnnnnnnnnnnnnnnnnnnnnnnnnnnnnnnnnnnnnnnnnnnnnnnnnnnnnnnnnnnnnnnnnnnnnnnnnnnnnnnnnnnnnnnnnnnnnnnnnnnnnnnnnnnnnnnnnnnnnnnnnnnnnnnnnnnnnnnnnnnnnnnnnnnnnnnnnnnnnnnnnnnnnnnnnnnnnnnnnnnnnnnnnnnnnnnnnnnnnnnnnnnnnnnnnnnnnnnnnnnnnnnnnnnnnnnnnnnnnnnnnnnnnnnnnnnnnnnnnnnnnnnnnnnnnnnnnnnnnnnnnnnnnnnnnnnnnnnnnnnnnnnnnnnnnnnnnnnnnnnnnnnnnnnnnnnnnnnnnnnnnnnnnnnnnnnnnnnnnnnnnnnnnnnnnnnnnnnnnnnnnnnnnnnnnnnnnnnnnnnnnnnnnnnnnnnnnnnnnnnnnnnnnnnnnnnnnnnnnnnnnnnnnnnnnnnnnnnnnnnnnnnnnnnnnnnnnnnnnnnnnnnnnnnnnnnnnnnnnnnnnnnnnnnnnnnnnnnnnnnnnnnnnnnnnnnnnnnnnnnnnnnnnnnnnnnnnnnnnnnnnnnnnnnnnnnnnnnnnnnnnnnnnnnnnnnnnnnnnnnnnnnnnnnnnnnnnnnnnnnnnnnnnnnnnnnnnnnnnnnnnnnnnnnnnnnnnnnnnnnnnnnnnnnnnnnnnnnnnnnnnnnnnnnnnnnnnnnnnnnnnnnnnnnnnnnnnnnnnnnnnnnnnnnnnnnnnnnnnnnnnnnnnnnnnnnnnnnnnnnnnnnnnnnnnnnnnnnnnnnnnnnnnnnnnnnnnnnnnnnnnnnnnnnnnnnnnnnnnnnnnnnnnnnnnnnnnnnnnnnnnnnnnnnnnnnnnnnnnnnnnnnnnnnnnnnnnnnnnnnnnnnnnnnnnnnnnnnnnnnnnnnnnnnnnnnnnnnnnnnnnnnnnnnnnnnnnnnnnnnnnnnnnnnnnnnnnnnnnnnnnnnnnnnnnnnnnnnnnnnnnnnnnnnnnnnnnnnnnnnnnnnnnnnnnnnnnnnnnnnnnnnnnnnnnnnnnnnnnnnnnnnnnnnnnnnnnnnnnnnnnnnnnnnnnnnnnnnnnnnnnnnnnnnnnnnnnnnnnnnnnnnnnnnnnnnnnnnnnnnnnnnnnnnnnnnnnnnnnnnnnnnnnnnnnnnnnnnnnnnnnnnnnnnnnnnnnnnnnnnnnnnnnnnnnnnnnnnnnnnnnnnnnnnnnnnnnnnnnnnnnnnnnnnnnnnnnnnnnnnnnnnnnnnnnnnnnnnnnnnnnnnnnnnnnnnnnnnnnnnnnnnnnnnnnnnnnnnnnnnnnnnnnnnnnnnnnnnnnnnnnnnnnnnnnnnnnnnnnnnnnnnnnnnnnnnnnnnnnnnnnnnnnnnnnnnnnnnnnnnnnnnnnnnnnnnnnnnnnnnnnnnnnnnnnnnnnnnnnnnnnnnnnnnnnnnnnnnnnnnnnnnnnnnnnnnnnnnnnnnnnnnnnnnnnnnnnnnnnnnnnnnnnnnnnnnnnnnnnnnnnnnnnnnnnnnnnnnnnnnnnnnnnnnnnnnnnnnnnnnnnnnnnnnnnnnnnnnnnnnnnnnnnnnnnnnnnnnnnnnnnnnnnnnnnnnnnnnnnnnnnnnnnnnnnnnnnnnnnnnnnnnnnnnnnnnnnnnnnnnnnnnnnnnnnnnnnnnnnnnnnnnnnnnnnnnnnnnnnnnnnnnnnnnnnnnnnnnnnnnnnnnnnnnnnnnnnnnnnnnnnnnnnnnnnnnnnnnnnnnnnnnnnnnnnnnnnnnnnnnnnnnnnnnnnnnnnnnnnnnnnnnnnnnnnnnnnnnnnnnnnnnnnnnnnnnnnnnnnnnnnnnnnnnnnnnnnnnnnnnnnnnnnnnnnnnnnnnnnnnnnnnnnnnnnnnnnnnnnnnnnnnnnnnnnnnnnnnnnnnnnnnnnnnnnnnnnnnnnnnnnnnnnnnnnnnnnnnnnnnnnnnnnnnnnnnnnnnnnnnnnnnnnnnnnnnnnnnnnnnnnnnnnnnnnnnnnnnnnnnnnnnnnnnnnnnnnnnnnnnnnnnnnnnnnnnnnnnnnnnnnnnnnnnnnnnnnnnnnnnnnnnnnnnnnnnnnnnnnnnnnnnnnnnnnnnnnnnnnnnnnnnnnnnnnnnnnnnnnnnnnnnnnnnnnnnnnnnnnnnnnnnnnnnnnnnnnnnnnnnnnnnnnnnnnnnnnnnnnnnnnnnnnnnnnnnnnnnnnnnnnnnnnnnnnnnnnnnnnnnnnnnnnnnnnnnnnnnnnnnnnnnnnnnnnnnnnnnnnnnnnnnnnnnnnnnnnnnnnnnnnnnnnnnnnnnnnnnnnnnnnnnnnnnnnnnnnnnnnnnnnnnnnnnnnnnnnnnnnnnnnnnnnnnnnnnnnnnnnnnnnnnnnnnnnnnnnnnnnnnnnnnnnnnnnnnnnnnnnnnnnnnnnnnnnnnnnnnnnnnnnnnnnnnnnnnnnnnnnnnnnnnnnnnnnnnnnnnnnnnnnnnnnnnnnnnnnnnnnnnnnnnnnnnnnnnnnnnnnnnnnnnnnnnnnnnnnnnnnnnnnnnnnnnnnnnnnnnnnnnnnnnnnnnnnnnnnnnnnnnnnnnnnnnnnnnnnnnnnnnnnnnnnnnnnnnnnnnnnnnnnnnnnnnnnnnnnnnnnnnnnnnnnnnnnnnnnnnnnnnnnnnnnnnnnnnnnnnnnnnnnnnnnnnnnnnnnnnnnnnnnnnnnnnnnnnnnnnnnnnnnnnnnnnnnnnnnnnnnnnnnnnnnnnnnnnnnnnnnnnnnnnnnnnnnnnnnnnnnnnnnnnnnnnnnnnnnnnnnnnnnnnnnnnnnnnnnnnnnnnnnnnnnnnnnnnnnnnnnnnnnnnnnnnnnnnnnnnnnnnnnnnnnnnnnnnnnnnnnnnnnnnnnnnnnnnnnnnnnnnnnnnnnnnnnnnnnnnnnnnnnnnnnnnnnnnnnnnnnnnnnnnnnnnnnnnnnnnnnnnnnnnnnnnnnnnnnnnnnnnnnnnnnnnnnnnnnnnnnnnnnnnnnnnnnnnnnnnnnnnnnnnnnnnnnnnnnnnnnnnnnnnnnnnnnnnnnnnnnnnnnnnnnnnnnnnnnnnnnnnnnnnnnnnnnnnnnnnnnnnnnnnnnnnnnnnnnnnnnnnnnnnnnnnnnnnnnnnnnnnnnnnnnnnnnnnnnnnnnnnnnnnnnnnnnnnnnnnnnnnnnnnnnnnnnnnnnnnnnnnnnnnnnnnnnnnnnnnnnnnnnnnnnnnnnnnnnnnnnnnnnnnnnnnnnnnnnnnnnnnnnnnnnnnnnnnnnnnnnnnnnnnnnnnnnnnnnnnnnnnnnnnnnnnnnnnnnnnnnnnnnnnnnnnnnnnnnnnnnnnnnnnnnnnnnnnnnnnnnnnnnnnnnnnnnnnnnnnnnnnnnnnnnnnnnnnnnnnnnnnnnnnnnnnnnnnnnnnnnnnnnnnnnnnnnnnnnnnnnnnnnnnnnnnnnnnnnnnnnnnnnnnnnnnnnnnnnnnnnnnnnnnnnnnnnnnnnnnnnnnnnnnnnnnnnnnnnnnnnnnnnnnnnnnnnnnnnnnnnnnnnnnnnnnnnnnnnnnnnnnnnnnnnnnnnnnnnnnnnnnnnnnnnnnnnnnnnnnnnnnnnnnnnnnnnnnnnnnnnnnnnnnnnnnnnnnnnnnnnnnnnnnnnnnnnnnnnnnnnnnnnnnnnnnnnnnnnnnnnnnnnnnnnnnnnnnnnnnnnnnnnnnnnnnnnnnnnnnnnnnnnnnnnnnnnnnnnnnnnnnnnnnnnnnnnnnnnnnnnnnnnnnnnnnnnnnnnnnnnnnnnnnnnnnnnnnnnnnnnnnnnnnnnnnnnnnnnnnnnnnnnnnnnnnnnnnnnnnnnnnnnnnnnnnnnnnnnnnnnnnnnnnnnnnnnnnnnnnnnnnnnnnnnnnnnnnnnnnnnnnnnnnnnnnnnnnnnnnnnnnnnnnnnnnnnnnnnnnnnnnnnnnnnnnnnnnnnnnnnnnnnnnnnnnnnnnnnnnnnnnnnnnnnnnnnnnnnnnnnnnnnnnnnnnnnnnnnnnnnnnnnnnnnnnnnnnnnnnnnnnnnnnnnnnnnnnnnnnnnnnnnnnnnnnnnnnnnnnnnnnnnnnnnnnnnnnnnnnnnnnnnnnnnnnnnnnnnnnnnnnnnnnnnnnnnnnnnnnnnnnnnnnnnnnnnnnnnnnnnnnnnnnnnnnnnnnnnnnnnnnnnnnnnnnnnnnnnnnnnnnnnnnnnnnnnnnnnnnnnnnnnnnnnnnnnnnnnnnnnnnnnnnnnnnnnnnnnnnnnnnnnnnnnnnnnnnnnnnnnnnnnnnnnnnnnnnnnnnnnnnnnnnnnnnnnnnnnnnnnnnnnnnnnnnnnnnnnnnnnnnnnnnnnnnnnnnnnnnnnnnnnnnnnnnnnnnnnnnnnnnnnnnnnnnnnnnnnnnnnnnnnnnnnnnnnnnnnnnnnnnnnnnnnnnnnnnnnnnnnnnnnnnnnnnnnnnnnnnnnnnnnnnnnnnnnnnnnnnnnnnnnnnnnnnnnnnnnnnnnnnnnnnnnnnnnnnnnnnnnnnnnnnnnnnnnnnnnnnnnnnnnnnnnnnnnnnnnnnnnnnnnnnnnnnnnnnnnnnnnnnnnnnnnnnnnnnnnnnnnnnnnnnnnnnnnnnnnnnnnnnnnnnnnnnnnnnnnnnnnnnnnnnnnnnnnnnnnnnnnnnnnnnnnnnnnnnnnnnnnnnnnnnnnnnnnnnnnnnnnnnnnnnnnnnnnnnnnnnnnnnnnnnnnnnnnnnnnnnnnnnnnnnnnnnnnnnnnnnnnnnnnnnnnnnnnnnnnnnnnnnnnnnnnnnnnnnnnnnnnnnnnnnnnnnnnnnnnnnnnnnnnnnnnnnnnnnnnnnnnnnnnnnnnnnnnnnnnnnnnnnnnnnnnnnnnnnnnnnnnnnnnnnnnnnnnnnnnnnnnnnnnnnnnnnnnnnnnnnnnnnnnnnnnnnnnnnnnnnnnnnnnnnnnnnnnnnnnnnnnnnnnnnnnnnnnnnnnnnnnnnnnnnnnnnnnnnnnnnnnnnnnnnnnnnnnnnnnnnnnnnnnnnnnnnnnnnnnnnnnnnnnnnnnnnnnnnnnnnnnnnnnnnnnnnnnnnnnnnnnnnnnnnnnnnnnnnnnnnnnnnnnnnnnnnnnnnnnnnnnnnnnnnnnnnnnnnnnnnnnnnnnnnnnnnnnnnnnnnnnnnnnnnnnnnnnnnnnnnnnnnnnnnnnnnnnnnnnnnnnnnnnnnnnnnnnnnnnnnnnnnnnnnnnnnnnnnnnnnnnnnnnnnnnnnnnnnnnnnnnnnnnnnnnnnnnnnnnnnnnnnnnnnnnnnnnnnnnnnnnnnnnnnnnnnnnnnnnnnnnnnnnnnnnnnnnnnnnnnnnnnnnnnnnnnnnnnnnnnnnnnnnnnnnnnnnnnnnnnnnnnnnnnnnnnnnnnnnnnnnnnnnnnnnnnnnnnnnnnnnnnnnnnnnnnnnnnnnnnnnnnnnnnnnnnnnnnnnnnnnnnnnnnnnnnnnnnnnnnnnnnnnnnnnnnnnnnnnnnnnnnnnnnnnnnnnnnnnnnnnnnnnnnnnnnnnnnnnnnnnnnnnnnnnnnnnnnnnnnnnnnnnnnnnnnnnnnnnnnnnnnnnnnnnnnnnnnnnnnnnnnnnnnnnnnnnnnnnnnnnnnnnnnnnnnnnnnnnnnnnnnnnnnnnnnnnnnnnnnnnnnnnnnnnnnnnnnnnnnnnnnnnnnnnnnnnnnnnnnnnnnnnnnnnnnnnnnnnnnnnnnnnnnnnnnnnnnnnnnnnnnnnnnnnnnnnnnnnnnnnnnnnnnnnnnnnnnnnnnnnnnnnnnnnnnnnnnnnnnnnnnnnnnnnnnnnnnnnnnnnnnnnnnnnnnnnnnnnnnnnnnnnnnnnnnnnnnnnnnnnnnnnnnnnnnnnnnnnnnnnnnnnnnnnnnnnnnnnnnnnnnnnnnnnnnnnnnnnnnnnnnnnnnnnnnnnnnnnnnnnnnnnnnnnnnnnnnnnnnnnnnnnnnnnnnnnnnnnnnnnnnnnnnnnnnnnnnnnnnnnnnnnnnnnnnnnnnnnnnnnnnnnnnnnnnnnnnnnnnnnnnnnnnnnnnnnnnnnnnnnnnnnnnnnnnnnnnnnnnnnnnnnnnnnnnnnnnnnnnnnnnnnnnnnnnnnnnnnnnnnnnnnnnnnnnnnnnnnnnnnnnnnnnnnnnnnnnnnnnnnnnnnnnnnnnnnnnnnnnnnnnnnnnnnnnnnnnnnnnnnnnnnnnnnnnnnnnnnnnnnnnnnnnnnnnnnnnnnnnnnnnnnnnnnnnnnnnnnnnnnnnnnnnnnnnnnnnnnnnnnnnnnnnnnnnnnnnnnnnnnnnnnnnnnnnnnnnnnnnnnnnnnnnnnnnnnnnnnnnnnnnnnnnnnnnnnnnnnnnnnnnnnnnnnnnnnnnnnnnnnnnnnnnnnnnnnnnnnnnnnnnnnnnnnnnnnnnnnnnnnnnnnnnnnnnnnnnnnnnnnnnnnnnnnnnnnnnnnnnnnnnnnnnnnnnnnnnnnnnnnnnnnnnnnnnnnnnnnnnnnnnnnnnnnnnnnnnnnnnnnnnnnnnnnnnnnnnnnnnnnnnnnnnnnnnnnnnnnnnnnnnnnnnnnnnnnnnnnnnnnnnnnnnnnnnnnnnnnnnnnnnnnnnnnnnnnnnnnnnnnnnnnnnnnnnnnnnnnnnnnnnnnnnnnnnnnnnnnnnnnnnnnnnnnnnnnnnnnnnnnnnnnnnnnnnnnnnnnnnnnnnnnnnnnnnnnnnnnnnnnnnnnnnnnnnnnnnnnnnnnnnnnnnnnnnnnnnnnnnnnnnnnnnnnnnnnnnnnnnnnnnnnnnnnnnnnnnnnnnnnnnnnnnnnnnnnnnnnnnnnnnnnnnnnnnnnnnnnnnnnnnnnnnnnnnnnnnnnnnnnnnnnnnnnnnnnnnnnnnnnnnnnnnnnnnnnnnnnnnnnnnnnnnnnnnnnnnnnnnnnnnnnnnnnnnnnnnnnnnnnnnnnnnnnnnnnnnnnnnnnnnnnnnnnnnnnnnnnnnnnnnnnnnnnnnnnnnnnnnnnnnnnnnnnnnnnnnnnnnnnnnnnnnnnnnnnnnnnnnnnnnnnnnnnnnnnnnnnnnnnnnnnnnnnnnnnnnnnnnnnnnnnnnnnnnnnnnnnnnnnnnnnnnnnnnnnnnnnnnnnnnnnnnnnnnnnnnnnnnnnnnnnnnnnnnnnnnnnnnnnnnnnnnnnnnnnnnnnnnnnnnnnnnnnnnnnnnnnnnnnnnnnnnnnnnnnnnnnnnnnnnnnnnnnnnnnnnnnnnnnnnnnnnnnnnnnnnnnnnnnnnnnnnnnnnnnnnnnnnnnnnnnnnnnnnnnnnnnnnnnnnnnnnnnnnnnnnnnnnnnnnnnnnnnnnnnnnnnnnnnnnnnnnnnnnnnnnnnnnnnnnnnnnnnnnnnnnnnnnnnnnnnnnnnnnnnnnnnnnnnnnnnnnnnnnnnnnnnnnnnnnnnnnnnnnnnnnnnnnnnnnnnnnnnnnnnnnnnnnnnnnnnnnnnnnnnnnnnnnnnnnnnnnnnnnnnnnnnnnnnnnnnnnnnnnnnnnnnnnnnnnnnnnnnnnnnnnnnnnnnnnnnnnnnnnnnnnnnnnnnnnnnnnnnnnnnnnnnnnnnnnnnnnnnnnnnnnnnnnnnnnnnnnnnnnnnnnnnnnnnnnnnnnnnnnnnnnnnnnnnnnnnnnnnnnnnnnnnnnnnnnnnnnnnnnnnnnnnnnnnnnnnnnnnnnnnnnnnnnnnnnnnnnnnnnnnnnnnnnnnnnnnnnnnnnnnnnnnnnnnnnnnnnnnnnnnnnnnnnnnnnnnnnnnnnnnnnnnnnnnnnnnnnnnnnnnnnnnnnnnnnnnnnnnnnnnnnnnnnnnnnnnnnnnnnnnnnnnnnnnnnnnnnnnnnnnnnnnnnnnnnnnnnnnnnnnnnnnnnnnnnnnnnnnnnnnnnnnnnnnnnnnnnnnnnnnnnnnnnnnnnnnnnnnnnnnnnnnnnnnnnnnnnnnnnnnnnnnnnnnnnnnnnnnnnnnnnnnnnnnnnnnnnnnnnnnnnnnnnnnnnnnnnnnnnnnnnnnnnnnnnnnnnnnnnnnnnnnnnnnnnnnnnnnnnnnnnnnnnnnnnnnnnnnnnnnnnnnnnnnnnnnnnnnnnnnnnnnnnnnnnnnnnnnnnnnnnnnnnnnnnnnnnnnnnnnnnnnnnnnnnnnnnnnnnnnnnnnnnnnnnnnnnnnnnnnnnnnnnnnnnnnnnnnnnnnnnnnnnnnnnnnnnnnnnnnnnnnnnnnnnnnnnnnnnnnnnnnnnnnnnnnnnnnnnnnnnnnnnnnnnnnnnnnnnnnnnnnnnnnnnnnnnnnnnnnnnnnnnnnnnnnnnnnnnnnnnnnnnnnnnnnnnnnnnnnnnnnnnnnnnnnnnnnnnnnnnnnnnnnnnnnnnnnnnnnnnnnnnnnnnnnnnnnnnnnnnnnnnnnnnnnnnnnnnnnnnnnnnnnnnnnnnnnnnnnnnnnnnnnnnnnnnnnnnnnnnnnnnnnnnnnnnnnnnnnnnnnnnnnnnnnnnnnnnnnnnnnnnnnnnnnnnnnnnnnnnnnnnnnnnnnnnnnnnnnnnnnnnnnnnnnnnnnnnnnnnnnnnnnnnnnnnnnnnnnnnnnnnnnnnnnnnnnnnnnnnnnnnnnnnnnnnnnnnnnnnnnnnnnnnnnnnnnnnnnnnnnnnnnnnnnnnnnnnnnnnnnnnnnnnnnnnnnnnnnnnnnnnnnnnnnnnnnnnnnnnnnnnnnnnnnnnnnnnnnnnnnnnnnnnnnnnnnnnnnnnnnnnnnnnnnnnnnnnnnnnnnnnnnnnnnnnnnnnnnnnnnnnnnnnnnnnnnnnnnnnnnnnnnnnnnnnnnnnnnnnnnnagggtgaagccacccgtgaattgggtggctactacaactcaacccataacgacgcgcataggtatagggtgaagccacccgtgaattgggtggctactacaactttgagagccttcggacagtagacatgaccggtgaagccacccgtgaattgggtggctactacaactccgacgacatttggtatcataaggcgcgggtgaagccacccgtgaattgggtggctactacaactagatgatttttgcggcgggtttgttgtctgggtgaagccacccgtgaattgggtggctactacaaccatacaggatcagcctacagaaatggcggaggtgaagccacccgtgaattgggtggctactacaacttgcaagcataatcggccagaaatcggcaaggtgaagccacccgtgaattgggtggctactacaactcgagctgggcctgaaagaaaccctgacttggtgaagccacccgtgaattgggtggctactacaacgaggagcacaacgacgacaggctgccgccaggtgaagccacccgtgaattgggtggctactacaacttcagcggtttttttcatgccgctgcccgcggtgaagccacccgtgaattgggtggctactacaacttgcggcgcgacatggcgctcataacggcaggtgaagccacccgtgaattgggtggctactacaaccacacggggcaaacgtgaaagttggttttcggtgaagccacccgtgaattgggtggctactacaactccggggtccggggcagcaatttgagctttggtgaagccacccgtgaattgggtggctactacaacagaaaccagaagcggctctcgccctcctgaggtgaagccacccgtgaattgggtggctactacaacaggataagccgccccgtggccgtggtgaagggtgaagccacccgtgaattgggtggctattataagtaatagttttatgtcttctcaggcacatcatgttcagatcaaaagaacaggcaaacttcgccgccatagtcgcggcgcatataaaaaaagctgatggcccgttactgcttgaaggtggtacgggcattggcaagacacgcgcttacctgtctgcactgattgcttcaggcaagcgtgtggccatcgcgctgccaacccaccagcttatcgaccagctgctggcatccactgatatggccgaagccaacaaagccaatgtaacggtagccgcttttcgtcctgcacggaccttcgccacgcgtgctgaatacttagcgcagcgcgatgtagttaccagtgcacaggtaatgctctgcaccagcgccagcgtcattatagatcagcggcttaagggcgaatacaacggcgcaactgagcgggactacctgtttttcgatgaagcagatcagcttcccaatgcggcagcgctgcagtccgacatggagatcacaggtgcggaactcaaagaacttggcatcgaaggcgacaatccccgcgaactggcggaggaagttgttgcctgcaaggaggctgaaccggaacagcgtgctgccgccaagatgatccttgaagctctggatgaaccggcatggttccatgccgccggcgctgatgctggcggcatcaagcttttccaccgtctgccgggccgtctgctgcgcaagaccgccaacaagcccaacgtggcctttgtcagtgccaccatcaccatcggcggcaagtttgatgacttcaagcgggcgctggggatccagcaggagagtgagctatccgacatcattgagcctgagcgccatggcacggtgaacttccgcactgtcagtcaccttgctgtcgatggtgaaggctggctggaaatggtggcggcgaaagtgagagaggccgagccaccggcattggttgttaccccatccttcgaccttgccaccagaattggcgcactggtcgaaggcgcagtggttcgccagaagggtgaattgatcggcgccgccatggaacggctgggcgataccaaaatactgttggccgccgccgcttgggcaggactggatgcgcccattcagtggcgctcgatcattgtccccgtggtgccttacgataagcccactattatcgatgaccacgttgagagccgctatatcgatgcccgcaacacagcgctgcggcggctacgccaagtcattggacggggcctgcgttctccagatgccagctgcaccgtctacttccttgatccccgtgtgcagaggcttccggcgttctggccgatgcgctttgccaccgaatggcagagaaggctgaccgatcccggcgtcatggaaggctctaggggagaagtcgtgctttcaaaggctgagcgggacccgtcaaatcggaagaacgcactgaagcattatggcactcattgtcaggcgtgtggactagtgccgaaagttgcggcaattatcgaggttcatcacctacaccctgtctcagagggtgtgcgccgcacgcaaattgaagatctatgccccctgtgccggaactgtcacggacttgcccacacgacggtgccacccatgcccatcgagcagcttaggcagttcgtgacggcttaggacaggaccgagccctgacagttcctagctacccaccccatccccagcacaccggatcgcccgagcaaaaccgtaagtatggggagcgtaggtaccatcaacggaaaacgggggtatgccggggtagtggggtctgacctagggggattttggagggcctaggtgttgtcgtgagactaggtgctagccgggcggtggctagatggcgcttgccccccacacggtggatcggacgaacagattagtgagtaggggtgaccgtaggtaccattctcaggtttaggggggtgcccggtgggtgggtctggcttaggggggattttggatgcgcgtggctttgaggtgcgggggtgcccccgtggactaggtgctagctggacggtggctagaagacgctaaagtcggcgcacttcacatggcctgaggtgtttttccccgcgcgtccggtcaatgtccggttcattcgtagatagaaaacgtgaccataatattggcgggttcaactacctgacttcatgaggaaaattggtgggtgatgcagggatcgaacctgcgacaagctgattaagagtcagctgctctaccaactgagctaatcacccacgccgccctttgggggcgggaggcggcttatagccaacgggggtggggctgtccataagcctgtaaaacaagcctgtgactagataatcccaacggaatgcctggggatttccacttgccggtggacatgcacgctcatcagcagtccgaaaccgaacatcacggtcagcatggcggtgccgccataggacagcagcggcatgggaatgccgaccaccgggatcagccccatcaccatcaggccattgatcatgatgtagaagaagaaattgagggtaatgcccatcgccagcaaccggccaaactggctgcgggcgcccatggcgatctgcaggccatagccgatcaccaccgcaaacaggatcagcagcgccaccgagccgacaaagccgaattcctcgccgaaattggtgaagatgaaatcggtctgtttttccggcaggaagttgagccggctctgggtgccctgcaaaaagcccttgcccgaaatcccgcccgagccgatggcgatcttggcttgggtgatgttccagcccgcgcccagggcgtcggattccggattgaggaaggtcatcacccgcgccttctgataatcatgcagcacaaagcgccaggcggtgggcaccgccaccgcaatcgccgccagcgccggggcgatccagtaccagctcagcccggccaggaacaaaagcgagcagccgtccatgacaattatcaaggtggtgcccagattgggctccatcaccaccagcatggcgggaagcccgatcatggcaagcgcaatcgccaaattcagcggcttggaaacttcttccacgctcttgccgtgcaggaagcgcgcaagcgccagcaccagcgaaatcttcatcagctcggagggctgcaactccagcggccccagggtgatccagcgctgggcgcccaggccgacatggcccgccaccaccaccgcgatcaacaggatgaatgccacgccgtaagcgggataggccaggctcatccatacccgcacatcaatcatcgccaccgcgaccaggatgaaagcgcccacgatgaaacgaatgatctgcggcgtcgcccagggattgaaatacccgcccgccaccgaataaagcatggcgaacccggcacaggccagcatggtgatcatcagcaccatgccccaattcacatccagcaacttgtcggcgaacgacaaggtgcgcttggctgctgcgtaagcgcgaatagccatcagccacctgccttgggaacagtgggcgcgggaacaccggcctgggcgtccttcaccggataggcgttgggtttgcccaatatatcgcgcgtctgggcgagggtgaggatatcgcgcgcgaacttcacctgtggctcggtatgggcgttgccgccatgttcaagcaccaccgaaatggcgtagcgcggcttgtcgatcggcgcgaaaccgatgaacaacgcatgttcgcgataggcccagggctgctggctctgcggtgtcagaccattatggcgttctgcatcggtgatgcgccgcacctgggccgtgccggtcttgccgcccatctcaaagccggcttgcagaatccgcgagccataggccgtgccgcccggcgcgttgacggccatgcccatgccttcacgcaccatggcgaatgccgtgtccgagaagggtagcggcgcgggctgtgggtttcgctttagcgtggcgccgacctgatgggtcagtcgcggtgagaccgccctgccggatgcaatccgcgcggcttgcatgcagagctggagcggcgtggcgagcacatagccctggccgatgccgttgacgagcgtctcgccctgttgccacggaacgccgaaccgcttcatcttccaggcccgggttgggataagcccccccaactctccaggcagttcgatgccggttggcgaaccaagccccagggcatgggccgcctcggccatcttgtctatgcccagccgcttcgccacttcatagaaatagacatcgcacgagacctggatgccgcgctgcaggctgcaattgccgtggccgccgattttccacgcatcgcaatagaaaatatggtcgccaagccgcgtcgagccggtgcaattgacgacaagatcggacatcccattgtccacggccgccagcgccatcgcggtcttgaaggtggagccgggcggataggtgccgccgatggccttgttcagcagcggcttgtagtcatttgttgtcagttcgcgccattgcgggccggtgacgccggtgttgaaccagttggggtcgaaaccgggtgtggaggcaagcgtcagcacatcgccgctatccacatccatcaccacgcaggcggcgctttcgccctccagacacttggcggcatattgctggagctcggcatcaatggtcagccagacatcttttcccggaatgcccggctcatggcccagttcgcggatgacgcggccataggcgttgacctcgacctgcgaagcacccgcttcgccgcatacatccttgtcgaaggtcttttcgataccgcgcttgccgatgcgaaaccccggctggctgagcaagggatcattatcgcccttcatgtcttcgggcgagacggcggcgacatagcccaataagtgcgccatgctggggccatacggataatcgcgggtttcaccgacatcgggctgaacgcccggcaaataaggcagatgcatgttaatgcgggaaaattcctcccaggacagattctccgccaccggcaccggcatgaatttcttgttctcggcaatcgtctgggcgacgcgctttttctgcgcgtcgctgatctcgatcacttttgaaagcgtgtcgagcgcaccggcaacgccttcggtggcctgttccgacaccagcagcacgcgatagttgcgcttgttgttggccagttcggtgccgaaacggtcgaaaatgcggccgcgcggcggcgcgatcagccgttgggaaacgcggttgtcttcggcttcggccttgtactgatcgccgtcgcggatctgcaactgatacaggcgccccgccagcacggcgaacaccaacgtcatgccgccgccaacgcccacgctgcggcgcgtgaaagtggcgtaacggcttttgtcctttttatcgaacagcggcatcagaagtcactccgcagcggcccgaccagccggcgatgcagcgagcctatcacgaaggcgcccgggatatagaacagcacggtgatggccagctcggccacaatgggccccagcggcgccaagtgccagaaataggccgtggtggtgaaataggcggtggcgcagacaatcgctgtggcggtggcaaagcccagcaccgctgcgccgcccgcaagaccggcaaaggcatcgcgctggcgctggatcacggcataggccacgacaaagctgagggtccagatacccggcggcccgcccgacatcacgtcctgcagaatgccgatgccgaaggccgccgccggggtcatcagatcggggcgcaccaggcaccagaaatagaccgggatgaagcccagcagcggcggcggcaccaggccgccgaacagggtcacgggcaggttggacaggattacgccgagcagaccgcaggtcacgggcaagagggccgccagcagcttggcccccgtcatcagcttggcgcggtcctgggcggccatggcgttactgcgccccgccggcggcgggacgcgcggcctgggcggacaggttggcgccaagcgggggggcggcaggcttgggcgcggttggcaaaggtgtagcgggcgttgcggcgccgggtgcagcggtggcaggcgcgggaatcggaacggacgcgggcgccgcggcgggcggcaagccggcagccacggcgggaagctggctgggtgtggtggcgggcagaatctcggcaggcttgcggaagcccagcacttcaacatcctcgctggaggcgggatcggccagcagcgcgacgcgcgccgtgtcgccatcgcccaccacggtgccgatggccaggcccggcggcaacagcccgccatcgcccgaggaaacaacctggtcgccggcatgcaaggtcaccacctgctgcaaggtatcgagcaggggcatggcggtgttgtcgccggtcatgatcgcctgcaaggtcgcggtcttgccgtcagcgctggcgatggtgacgggaatgcggctgttgagatcggtcagcaggatcacccagctggtgtgatcgcccgagaggtaaatgcgcccgatcatgccgcgcgaatccaccaccgcctcgcccggtttgacggcgcggctttcgccggcgtccaggatcatggtctgcaaaaagggacggctggcgcggccaatgacgcgggccagcaccgaattgatatcgggatcgggcaccgcatgcagcatgtcctggtaatggcgcacccggtcctgcatcaccacggcgacattgcgccattgcttcagccgggcattctcatccttgagctgcagattttcctgatagaccacgaagagttcgtcggcggatgagatccagcggttgaaggcctgcaccggggcatgcacggactctagggtcggcgccatccagtcggtgatgcgcatgcgggcgcggtcgaacaggcccgattgcgccttgcccagcagcaccagcaccaccgccaacgccagcacgatcaccagcggaagctgcgcgttgctccggcgggcgattttccagctgttgttgggcatgacggtgggttccccgaccccgtgctagaatgccgttgaaagaacgtgacgcatgcccttggtgttctcgagcacccggccggtgcccagcgcgacgcaggacaaaggatcatcggcaatggagaccggcaagccggtttcttcccgcagaacctgatccagattggccagcagcgagccgccgcccgtcagcacaatacccttgtccacgatgtcggcggccagttccggcggcgttgcttccagcgccactttcaccgcttcgacaatcgcgcccacgggttcggccagggcctcggcgatatgacgctgggtgatggtgatttccttcgggaccccgttcagaagatctcggcccttgatttccatggtgatgccgttgccgtcggcgggcgcacaggccgaaccgatttcctttttgatgcgctcggagctggcttcaccgatcagcagattctggtgacggcggatataggcgatgatggcttcgtccatcttgtcgccgccgacgcgcacgctgcgcgaatagacaatgccgcccagcgacagcaccgcgacttccgtggtgccgccgccgatatccaccaccatcgagccggtgggctcagacacgggcagtccggcgccaatggcggccgccatgggctcttcgatcagatagacgcgccgggcgcccgccgacaaagcggattcctgaatggcgcggcgttccacggcggtcgaaccggacggcacgcagacgatgatcatgggattggcgaaggagcggcggttatgcaccttgcggatgaagtgcttgatcatctgctccgcgacttcgaaatcggcgatgacgccgtcgcgcatgggacggatggcttcgatattgccgggggtgcgccccagcatcatcttggcgtcgttgccgacggcgcgcacagattttttgccgccgcgcgtggtgatggtggccaccaccgacggctcgttcagcacaatgccgcggcctttgacatagaccagcgtgttggccgttccgaggtcgattgccatgtcgctcgaaaaggcacccaaaagactgccgaacatgcttaacccaattccctagactgaatattcctcaaaaccctgcaagcctcatacctgaaagggcggccccggcggcgatccgccggggccaattctgtttcatcttgcgacagtgagcgcttccggcgccgacttttcacgtttcaccagcaacttgttcagcgcattgacataggcgtaggccgccgccgccatcgtgtcggtgtccgacgccttgccggtgacggtacggccattctcctccagacgcacgctcacgctggcctgggcgtcggtgccttcggtcacggcgttgatctggaacagctgcaaggtcgcggtgtgcggatagagcgcctggatcgccttgaaaatggcgtccacaggcccgtcgccgacgctggtgacgcgccgctcctcgccatgaacgaccagagtgagcgccgccaccggctcgatgccggtgccgctttcgacccgcaattgcttgacgccaatggcgtcctggccgcggatgatctcgtcatccaccagggccataatgtcttcgtcgaagacatgctttttcttgtccgccaggtccttgaagcgcttgaaagcgtcttcaaaggccgtgtcttccaaccggtaacccatggcttccagcttgtcgcggaaggcatggcggcccgacagcttgcccagcatcaggctggtggcatgcacgccgacatcttccggacgcatgatttcataggtttcgacatttttgagcatgccgtcctggtgaatgccgctttcatggctgaacgcgttctttcccacgatggccttgttgtactgcaccggaaagccggtgacgttcgataccagcttggaggcgcgcgacagcattttggtgttgatgcccgtggtgaagggcatgatgtccttgcggaccttcagcgccatcacgatttcttccagtgcggcattgccggcgcgttcgccgatgccgttgatggtgcattccacctgccgcgcgcccgccagtacgccggccagcgaattggccaccgccaggcccagatcattatggacatgggtggagaagatcaccttgtgcgcattgggcacgcgttcgcgcagcatggtgatgatctggaaatattcctgcggcgtggaatagcccaccgtgtcaggcacattgatcaccgtggcgccggaatgaatggcgacttccacgcatttgcacagaaaatccggcacggtgcgggtggcatcttccgccgaccattccacgtcgctggtgaagttacgcgcccgcgtcaccgaggcgcctatcgcctccagcacggcgttttcgcccatattcagcttgtgtttcatgtgcactgggctggtggaaatgaaggtatggatgcgtggccggaacgcgcctttcagcgcctcgccggcccggtcgatgtccttgaagcctgcccgcgccaacccgcaaaccgatgcgcgcttgaccagcttggccacctcggtgacggccttgaaatcgcccggcgaggaaatgggaaagcccgcctcgatgatatccacgcccatttcgtccagcagttcggcgatctgcattttttcttcatgcgacatggaagcgccaggcgattgctcgccgtcacgcaaggtggtgtcgaatatcaggatcggctgagtgtctgtcgtcgtcatgacaaaagtccttctgttcgtcgcatagggcgacttcgatttctcctttggcgttgtcccctacacaccgcccgcgcgaaccattcgcgagggcaagcgcctaggggccgctaagaagaagaagcgcgtgcgaagaaccgagggaaggacggggctgcatgcggccgcgcgcacggctgcgaacggcaaagccgcttttcgcaatcgtgatgtgcacgccgttcgtcataaaacctgtcgccgttccgcccgccgagattatcggtgtgcccagagccgtaaccatgggaaagcggtccaatcaccgttttttcccatcgtttgcaaggttttacgccgaagccgcgcaatggcgcaagtgcgaaaagcccggcttttacggggcctttgcccaagcgccggtaataaatacattttttgtaatgtatattttcccggccccggatcgcgctcctgtcacaaaagtccggcacacaaacccacccacaaaccaccccgccgacgccccgccaacgaaagacatgatgccccccgccggcgacgctttccccgctgttttcctttggcctttcaaagtggttgccagcggccacgaacgcgcctatcggggcggcagaactgtcattccacccgccaacccgtgtttcgagggccggatatgaagatcctgccgcccgtctcgatcgaagcgcgccgcctgctgcccagccgctgggacctgctggcggcggtgctggtgcttggcttcatcatcctgttcgcggacgccagccgcagcctggtgctgccgctcagttcgatcaccggcaagggcctcagcctcaatatctgggatctgcccggttatgccgtacgcacggccctgcgcatgctgatcgcgctgggcgtttcgctggtctttaccttcacctatgccacctgggcggcgaaaagcgcccgcgccggcagccttttggtgccgctgctcgatatcctgcaatcggtgccgatccttggctttctgtcggtgacggtggtgtggttcctgtcgctgtcgccgggcaaggtgttcggcgccgagctggcctgcgtcttcgccatcttcaccggccaggcctggaacatggccttcagcttctaccagtcgctgcgcaccgtgcccgaagaactgaccgaagccggccgcatgttcggtctcaatgcctgggcgcgtttctggcgcatcgaggcgcctttcgccacgccgccgctgatctggaacatgatgatgtccatgtcgggcggctggttctttgtcaccgtcgccgaagccatcagcgtgggcaataccaatatcgccctgcccggcatcgggtcctggatcgcggtcgccatcgcgcaaaagaatctgcccgcgatcttcgaggcgatcttcgccatgctggtcgtgatcctgatctatgaccagttgatgttccgaccgctggtggcctgggctgaccgtttccgtatcgacaatgagcagtccgaagaccagcccgaaagctgggccctcagcgtctatcgccgctcccgcctgctggatctgctgacggtgccgttcgaccagatgatgcattggagctatcaatggcagccgccccatttcggcgtgcgcggcgcctttcgcgacaccgataacaggatcgccgacattgtctggtatgcggtcctgaccttgctgggcctgtatggcgcctatcgcatctatgatttcgcccatatcaacctggcctggagcgatcttggcatcgcggtgggctttggcatcctgaccatgctgcgggtgatgatcctgatcgccatcgcaagcctggtttggacgcccattggcgtctatgtcggcctcagcccgtccttgacgcgcgtcgtacagccggtggcgcagttcctggccgccttcccgaacaatcttctgttcccgctggtggtatcgctgatcgtgttctggaaactcaatcccgatatctggctgtcgccgctgatcatcctgggcacgcaatggtacatcctgttcaacgtgatcgccggcgccgccgccatgcccaaggaactgcgcgatgctgccgacagtttcggcgtgcgcggctggctgtggtggcgcaaggtcgcgctgccttgcgtctttccctactacgtcaccggcgccatcaccgcatcgggcggcgcctggaacgccagcgtactggcagaag

SEQ ID NO: 34 - DNA, 20478 bp, Artificial Sequence
  Synthetic Oligonucleotide
  misc_feature (1)..(9520): n is a, c, g, or t
nnnnnnnnnnnnnnnnnnnnnnnnnnnnnnnnnnnnnnnnnnnnnnnnnnnnnnnnnnnnnnnnnnnnnnnnnnnnnnnnnnnnnnnnnnnnnnnnnnnnnnnnnnnnnnnnnnnnnnnnnnnnnnnnnnnnnnnnnnnnnnnnnnnnnnnnnnnnnnnnnnnnnnnnnnnnnnnnnnnnnnnnnnnnnnnnnnnnnnnnnnnnnnnnnnnnnnnnnnnnnnnnnnnnnnnnnnnnnnnnnnnnnnnnnnnnnnnnnnnnnnnnnnnnnnnnnnnnnnnnnnnnnnnnnnnnnnnnnnnnnnnnnnnnnnnnnnnnnnnnnnnnnnnnnnnnnnnnnnnnnnnnnnnnnnnnnnnnnnnnnnnnnnnnnnnnnnnnnnnnnnnnnnnnnnnnnnnnnnnnnnnnnnnnnnnnnnnnnnnnnnnnnnnnnnnnnnnnnnnnnnnnnnnnnnnnnnnnnnnnnnnnnnnnnnnnnnnnnnnnnnnnnnnnnnnnnnnnnnnnnnnnnnnnnnnnnnnnnnnnnnnnnnnnnnnnnnnnnnnnnnnnnnnnnnnnnnnnnnnnnnnnnnnnnnnnnnnnnnnnnnnnnnnnnnnnnnnnnnnnnnnnnnnnnnnnnnnnnnnnnnnnnnnnnnnnnnnnnnnnnnnnnnnnnnnnnnnnnnnnnnnnnnnnnnnnnnnnnnnnnnnnnnnnnnnnnnnnnnnnnnnnnnnnnnnnnnnnnnnnnnnnnnnnnnnnnnnnnnnnnnnnnnnnnnnnnnnnnnnnnnnnnnnnnnnnnnnnnnnnnnnnnnnnnnnnnnnnnnnnnnnnnnnnnnnnnnnnnnnnnnnnnnnnnnnnnnnnnnnnnnnnnnnnnnnnnnnnnnnnnnnnnnnnnnnnnnnnnnnnnnnnnnnnnnnnnnnnnnnnnnnnnnnnnnnnnnnnnnnnnnnnnnnnnnnnnnnnnnnnnnnnnnnnnnnnnnnnnnnnnnnnnnnnnnnnnnnnnnnnnnnnnnnnnnnnnnnnnnnnnnnnnnnnnnnnnnnnnnnnnnnnnnnnnnnnnnnnnnnnnnnnnnnnnnnnnnnnnnnnnnnnnnnnnnnnnnnnnnnnnnnnnnnnnnnnnnnnnnnnnnnnnnnnnnnnnnnnnnnnnnnnnnnnnnnnnnnnnnnnnnnnnnnnnnnnnnnnnnnnnnnnnnnnnnnnnnnnnnnnnnnnnnnnnnnnnnnnnnnnnnnnnnnnnnnnnnnnnnnnnnnnnnnnnnnnnnnnnnnnnnnnnnnnnnnnnnnnnnnnnnnnnnnnnnnnnnnnnnnnnnnnnnnnnnnnnnnnnnnnnnnnnnnnnnnnnnnnnnnnnnnnnnnnnnnnnnnnnnnnnnnnnnnnnnnnnnnnnnnnnnnnnnnnnnnnnnnnnnnnnnnnnnnnnnnnnnnnnnnnnnnnnnnnnnnnnnnnnnnnnnnnnnnnnnnnnnnnnnnnnnnnnnnnnnnnnnnnnnnnnnnnnnnnnnnnnnnnnnnnnnnnnnnnnnnnnnnnnnnnnnnnnnnnnnnnnnnnnnnnnnnnnnnnnnnnnnnnnnnnnnnnnnnnnnnnnnnnnnnnnnnnnnnnnnnnnnnnnnnnnnnnnnnnnnnnnnnnnnnnnnnnnnnnnnnnnnnnnnnnnnnnnnnnnnnnnnnnnnnnnnnnnnnnnnnnnnnnnnnnnnnnnnnnnnnnnnnnnnnnnnnnnnnnnnnnnnnnnnnnnnnnnnnnnnnnnnnnnnnnnnnnnnnnnnnnnnnnnnnnnnnnnnnnnnnnnnnnnnnnnnnnnnnnnnnnnnnnnnnnnnnnnnnnnnnnnnnnnnnnnnnnnnnnnnnnnnnnnnnnnnnnnnnnnnnnnnnnnnnnnnnnnnnnnnnnnnnnnnnnnnnnnnnnnnnnnnnnnnnnnnnnnnnnnnnnnnnnnnnnnnnnnnnnnnnnnnnnnnnnnnnnnnnnnnnnnnnnnnnnnnnnnnnnnnnnnnnnnnnnnnnnnnnnnnnnnnnnnnnnnnnnnnnnnnnnnnnnnnnnnnnnnnnnnnnnnnnnnnnnnnnnnnnnnnnnnnnnnnnnnnnnnnnnnnnnnnnnnnnnnnnnnnnnnnnnnnnnnnnnnnnnnnnnnnnnnnnnnnnnnnnnnnnnnnnnnnnnnnnnnnnnnnnnnnnnnnnnnnnnnnnnnnnnnnnnnnnnnnnnnnnnnnnnnnnnnnnnnnnnnnnnnnnnnnnnnnnnnnnnnnnnnnnnnnnnnnnnnnnnnnnnnnnnnnnnnnnnnnnnnnnnnnnnnnnnnnnnnnnnnnnnnnnnnnnnnnnnnnnnnnnnnnnnnnnnnnnnnnnnnnnnnnnnnnnnnnnnnnnnnnnnnnnnnnnnnnnnnnnnnnnnnnnnnnnnnnnnnnnnnnnnnnnnnnnnnnnnnnnnnnnnnnnnnnnnnnnnnnnnnnnnnnnnnnnnnnnnnnnnnnnnnnnnnnnnnnnnnnnnnnnnnnnnnnnnnnnnnnnnnnnnnnnnnnnnnnnnnnnnnnnnnnnnnnnnnnnnnnnnnnnnnnnnnnnnnnnnnnnnnnnnnnnnnnnnnnnnnnnnnnnnnnnnnnnnnnnnnnnnnnnnnnnnnnnnnnnnnnnnnnnnnnnnnnnnnnnnnnnnnnnnnnnnnnnnnnnnnnnnnnnnnnnnnnnnnnnnnnnnnnnnnnnnnnnnnnnnnnnnnnnnnnnnnnnnnnnnnnnnnnnnnnnnnnnnnnnnnnnnnnnnnnnnnnnnnnnnnnnnnnnnnnnnnnnnnnnnnnnnnnnnnnnnnnnnnnnnnnnnnnnnnnnnnnnnnnnnnnnnnnnnnnnnnnnnnnnnnnnnnnnnnnnnnnnnnnnnnnnnnnnnnnnnnnnnnnnnnnnnnnnnnnnnnnnnnnnnnnnnnnnnnnnnnnnnnnnnnnnnnnnnnnnnnnnnnnnnnnnnnnnnnnnnnnnnnnnnnnnnnnnnnnnnnnnnnnnnnnnnnnnnnnnnnnnnnnnnnnnnnnnnnnnnnnnnnnnnnnnnnnnnnnnnnnnnnnnnnnnnnnnnnnnnnnnnnnnnnnnnnnnnnnnnnnnnnnnnnnnnnnnnnnnnnnnnnnnnnnnnnnnnnnnnnnnnnnnnnnnnnnnnnnnnnnnnnnnnnnnnnnnnnnnnnnnnnnnnnnnnnnnnnnnnnnnnnnnnnnnnnnnnnnnnnnnnnnnnnnnnnnnnnnnnnnnnnnnnnnnnnnnnnnnnnnnnnnnnnnnnnnnnnnnnnnnnnnnnnnnnnnnnnnnnnnnnnnnnnnnnnnnnnnnnnnnnnnnnnnnnnnnnnnnnnnnnnnnnnnnnnnnnnnnnnnnnnnnnnnnnnnnnnnnnnnnnnnnnnnnnnnnnnnnnnnnnnnnnnnnnnnnnnnnnnnnnnnnnnnnnnnnnnnnnnnnnnnnnnnnnnnnnnnnnnnnnnnnnnnnnnnnnnnnnnnnnnnnnnnnnnnnnnnnnnnnnnnnnnnnnnnnnnnnnnnnnnnnnnnnnnnnnnnnnnnnnnnnnnnnnnnnnnnnnnnnnnnnnnnnnnnnnnnnnnnnnnnnnnnnnnnnnnnnnnnnnnnnnnnnnnnnnnnnnnnnnnnnnnnnnnnnnnnnnnnnnnnnnnnnnnnnnnnnnnnnnnnnnnnnnnnnnnnnnnnnnnnnnnnnnnnnnnnnnnnnnnnnnnnnnnnnnnnnnnnnnnnnnnnnnnnnnnnnnnnnnnnnnnnnnnnnnnnnnnnnnnnnnnnnnnnnnnnnnnnnnnnnnnnnnnnnnnnnnnnnnnnnnnnnnnnnnnnnnnnnnnnnnnnnnnnnnnnnnnnnnnnnnnnnnnnnnnnnnnnnnnnnnnnnnnnnnnnnnnnnnnnnnnnnnnnnnnnnnnnnnnnnnnnnnnnnnnnnnnnnnnnnnnnnnnnnnnnnnnnnnnnnnnnnnnnnnnnnnnnnnnnnnnnnnnnnnnnnnnnnnnnnnnnnnnnnnnnnnnnnnnnnnnnnnnnnnnnnnnnnnnnnnnnnnnnnnnnnnnnnnnnnnnnnnnnnnnnnnnnnnnnnnnnnnnnnnnnnnnnnnnnnnnnnnnnnnnnnnnnnnnnnnnnnnnnnnnnnnnnnnnnnnnnnnnnnnnnnnnnnnnnnnnnnnnnnnnnnnnnnnnnnnnnnnnnnnnnnnnnnnnnnnnnnnnnnnnnnnnnnnnnnnnnnnnnnnnnnnnnnnnnnnnnnnnnnnnnnnnnnnnnnnnnnnnnnnnnnnnnnnnnnnnnnnnnnnnnnnnnnnnnnnnnnnnnnnnnnnnnnnnnnnnnnnnnnnnnnnnnnnnnnnnnnnnnnnnnnnnnnnnnnnnnnnnnnnnnnnnnnnnnnnnnnnnnnnnnnnnnnnnnnnnnnnnnnnnnnnnnnnnnnnnnnnnnnnnnnnnnnnnnnnnnnnnnnnnnnnnnnnnnnnnnnnnnnnnnnnnnnnnnnnnnnnnnnnnnnnnnnnnnnnnnnnnnnnnnnnnnnnnnnnnnnnnnnnnnnnnnnnnnnnnnnnnnnnnnnnnnnnnnnnnnnnnnnnnnnnnnnnnnnnnnnnnnnnnnnnnnnnnnnnnnnnnnnnnnnnnnnnnnnnnnnnnnnnnnnnnnnnnnnnnnnnnnnnnnnnnnnnnnnnnnnnnnnnnnnnnnnnnnnnnnnnnnnnnnnnnnnnnnnnnnnnnnnnnnnnnnnnnnnnnnnnnnnnnnnnnnnnnnnnnnnnnnnnnnnnnnnnnnnnnnnnnnnnnnnnnnnnnnnnnnnnnnnnnnnnnnnnnnnnnnnnnnnnnnnnnnnnnnnnnnnnnnnnnnnnnnnnnnnnnnnnnnnnnnnnnnnnnnnnnnnnnnnnnnnnnnnnnnnnnnnnnnnnnnnnnnnnnnnnnnnnnnnnnnnnnnnnnnnnnnnnnnnnnnnnnnnnnnnnnnnnnnnnnnnnnnnnnnnnnnnnnnnnnnnnnnnnnnnnnnnnnnnnnnnnnnnnnnnnnnnnnnnnnnnnnnnnnnnnnnnnnnnnnnnnnnnnnnnnnnnnnnnnnnnnnnnnnnnnnnnnnnnnnnnnnnnnnnnnnnnnnnnnnnnnnnnnnnnnnnnnnnnnnnnnnnnnnnnnnnnnnnnnnnnnnnnnnnnnnnnnnnnnnnnnnnnnnnnnnnnnnnnnnnnnnnnnnnnnnnnnnnnnnnnnnnnnnnnnnnnnnnnnnnnnnnnnnnnnnnnnnnnnnnnnnnnnnnnnnnnnnnnnnnnnnnnnnnnnnnnnnnnnnnnnnnnnnnnnnnnnnnnnnnnnnnnnnnnnnnnnnnnnnnnnnnnnnnnnnnnnnnnnnnnnnnnnnnnnnnnnnnnnnnnnnnnnnnnnnnnnnnnnnnnnnnnnnnnnnnnnnnnnnnnnnnnnnnnnnnnnnnnnnnnnnnnnnnnnnnnnnnnnnnnnnnnnnnnnnnnnnnnnnnnnnnnnnnnnnnnnnnnnnnnnnnnnnnnnnnnnnnnnnnnnnnnnnnnnnnnnnnnnnnnnnnnnnnnnnnnnnnnnnnnnnnnnnnnnnnnnnnnnnnnnnnnnnnnnnnnnnnnnnnnnnnnnnnnnnnnnnnnnnnnnnnnnnnnnnnnnnnnnnnnnnnnnnnnnnnnnnnnnnnnnnnnnnnnnnnnnnnnnnnnnnnnnnnnnnnnnnnnnnnnnnnnnnnnnnnnnnnnnnnnnnnnnnnnnnnnnnnnnnnnnnnnnnnnnnnnnnnnnnnnnnnnnnnnnnnnnnnnnnnnnnnnnnnnnnnnnnnnnnnnnnnnnnnnnnnnnnnnnnnnnnnnnnnnnnnnnnnnnnnnnnnnnnnnnnnnnnnnnnnnnnnnnnnnnnnnnnnnnnnnnnnnnnnnnnnnnnnnnnnnnnnnnnnnnnnnnnnnnnnnnnnnnnnnnnnnnnnnnnnnnnnnnnnnnnnnnnnnnnnnnnnnnnnnnnnnnnnnnnnnnnnnnnnnnnnnnnnnnnnnnnnnnnnnnnnnnnnnnnnnnnnnnnnnnnnnnnnnnnnnnnnnnnnnnnnnnnnnnnnnnnnnnnnnnnnnnnnnnnnnnnnnnnnnnnnnnnnnnnnnnnnnnnnnnnnnnnnnnnnnnnnnnnnnnnnnnnnnnnnnnnnnnnnnnnnnnnnnnnnnnnnnnnnnnnnnnnnnnnnnnnnnnnnnnnnnnnnnnnnnnnnnnnnnnnnnnnnnnnnnnnnnnnnnnnnnnnnnnnnnnnnnnnnnnnnnnnnnnnnnnnnnnnnnnnnnnnnnnnnnnnnnnnnnnnnnnnnnnnnnnnnnnnnnnnnnnnnnnnnnnnnnnnnnnnnnnnnnnnnnnnnnnnnnnnnnnnnnnnnnnnnnnnnnnnnnnnnnnnnnnnnnnnnnnnnnnnnnnnnnnnnnnnnnnnnnnnnnnnnnnnnnnnnnnnnnnnnnnnnnnnnnnnnnnnnnnnnnnnnnnnnnnnnnnnnnnnnnnnnnnnnnnnnnnnnnnnnnnnnnnnnnnnnnnnnnnnnnnnnnnnnnnnnnnnnnnnnnnnnnnnnnnnnnnnnnnnnnnnnnnnnnnnnnnnnnnnnnnnnnnnnnnnnnnnnnnnnnnnnnnnnnnnnnnnnnnnnnnnnnnnnnnnnnnnnnnnnnnnnnnnnnnnnnnnnnnnnnnnnnnnnnnnnnnnnnnnnnnnnnnnnnnnnnnnnnnnnnnnnnnnnnnnnnnnnnnnnnnnnnnnnnnnnnnnnnnnnnnnnnnnnnnnnnnnnnnnnnnnnnnnnnnnnnnnnnnnnnnnnnnnnnnnnnnnnnnnnnnnnnnnnnnnnnnnnnnnnnnnnnnnnnnnnnnnnnnnnnnnnnnnnnnnnnnnnnnnnnnnnnnnnnnnnnnnnnnnnnnnnnnnnnnnnnnnnnnnnnnnnnnnnnnnnnnnnnnnnnnnnnnnnnnnnnnnnnnnnnnnnnnnnnnnnnnnnnnnnnnnnnnnnnnnnnnnnnnnnnnnnnnnnnnnnnnnnnnnnnnnnnnnnnnnnnnnnnnnnnnnnnnnnnnnnnnnnnnnnnnnnnnnnnnnnnnnnnnnnnnnnnnnnnnnnnnnnnnnnnnnnnnnnnnnnnnnnnnnnnnnnnnnnnnnnnnnnnnnnnnnnnnnnnnnnnnnnnnnnnnnnnnnnnnnnnnnnnnnnnnnnnnnnnnnnnnnnnnnnnnnnnnnnnnnnnnnnnnnnnnnnnnnnnnnnnnnnnnnnnnnnnnnnnnnnnnnnnnnnnnnnnnnnnnnnnnnnnnnnnnnnnnnnnnnnnnnnnnnnnnnnnnnnnnnnnnnnnnnnnnnnnnnnnnnnnnnnnnnnnnnnnnnnnnnnnnnnnnnnnnnnnnnnnnnnnnnnnnnnnnnnnnnnnnnnnnnnnnnnnnnnnnnnnnnnnnnnnnnnnnnnnnnnnnnnnnnnnnnnnnnnnnnnnnnnnnnnnnnnnnnnnnnnnnnnnnnnnnnnnnnnnnnnnnnnnnnnnnnnnnnnnnnnnnnnnnnnnnnnnnnnnnnnnnnnnnnnnnnnnnnnnnnnnnnnnnnnnnnnnnnnnnnnnnnnnnnnnnnnnnnnnnnnnnnnnnnnnnnnnnnnnnnnnnnnnnnnnnnnnnnnnnnnnnnnnnnnnnnnnnnnnnnnnnnnnnnnnnnnnnnnnnnnnnnnnnnnnnnnnnnnnnnnnnnnnnnnnnnnnnnnnnnnnnnnnnnnnnnnnnnnnnnnnnnnnnnnnnnnnnnnnnnnnnnnnnnnnnnnnnnnnnnnnnnnnnnnnnnnnnnnnnnnnnnnnnnnnnnnnnnnnnnnnnnnnnnnnnnnnnnnnnnnnnnnnnnnnnnnnnnnnnnnnnnnnnnnnnnnnnnnnnnnnnnnnnnnnnnnnnnnnnnnnnnnnnnnnnnnnnnnnnnnnnnnnnnnnnnnnnnnnnnnnnnnnnnnnnnnnnnnnnnnnnnnnnnnnnnnnnnnnnnnnnnnnnnnnnnnnnnnnnnnnnnnnnnnnnnnnnnnnnnnnnnnnnnnnnnnnnnnnnnnnnnnnnnnnnnnnnnnnnnnnnnnnnnnnnnnnnnnnnnnnnnnnnnnnnnnnnnnnnnnnnnnnnnnnnnnnnnnnnnnnnnnnnnnnnnnnnnnnnnnnnnnnnnnnnnnnnnnnnnnnnnnnnnnnnnnnnnnnnnnnnnnnnnnnnnnnnnnnnnnnnnnnnnnnnnnnnnnnnnnnnnnnnnnnnnnnnnnnnnnnnnnnnnnnnnnnnnnnnnnnnnnnnnnnnnnnnnnnnnnnnnnnnnnnnnnnnnnnnnnnnnnnnnnnnnnnnnnnnnnnnnnnnnnnnnnnnnnnnnnnnnnnnnnnnnnnnnnnnnnnnnnnnnnnnnnnnnnnnnnnnnnnnnnnnnnnnnnnnnnnnnnnnnnnnnnnnnnnnnnnnnnnnnnnnnnnnnnnnnnnnnnnnnnnnnnnnnnnnnnnnnnnnnnnnnnnnnnnnnnnnnnnnnnnnnnnnnnnnnnnnnnnnnnnnnnnnnnnnnnnnnnnnnnnnnnnnnnnnnnnnnnnnnnnnnnnnnnnnnnnnnnnnnnnnnnnnnnnnnnnnnnnnnnnnnnnnnnnnnnnnnnnnnnnnnnnnnnnnnnnnnnnnnnnnnnnnnnnnnnnnnnnnnnnnnnnnnnnnnnnnnnnnnnnnnnnnnnnnnnnnnnnnnnnnnnnnnnnnnnnnnnnnnnnnnnnnnnnnnnnnnnnnnnnnnnnnnnnnnnnnnnnnnnnnnnnnnnnnnnnnnnnnnnnnnnnnnnnnnnnnnnnnnnnnnnnnnnnnnnnnnnnnnnnnnnnnnnnnnnnnnnnnnnnnnnnnnnnnnnnnnnnnnnnnnnnnnnnnnnnnnnnnnnnnnnnnnnnnnnnnnnnnnnnnnnnnnnnnnnnnnnnnnnnnnnnnnnnnnnnnnnnnnnnnnnnnnnnnnnnnnnnnnnnnnnnnnnnnnnnnnnnnnnnnnnnnnnnnnnnnnnnnnnnnnnnnnnnnnnnnnnnnnnnnnnnnnnnnnnnnnnnnnnnnnnnnnnnnnnnnnnnnnnnnnnnnnnnnnnnnnnnnnnnnnnnnnnnnnnnnnnnnnnnnnnnnnnnnnnnnnnnnnnnnnnnnnnnnnnnnnnnnnnnnnnnnnnnnnnnnnnnnnnnnnnnnnnnnnnnnnnnnnnnnnnnnnnnnnnnnnnnnnnnnnnnnnnnnnnnnnnnnnnnnnnnnnnnnnnnnnnnnnnnnnnnnnnnnnnnnnnnnnnnnnnnnnnnnnnnnnnnnnnnnnnnnnnnnnnnnnnnnnnnnnnnnnnnnnnnnnnnnnnnnnnnnnnnnnnnnnnnnnnnnnnnnnnnnnnnnnnnnnnnnnnnnnnnnnnnnnnnnnnnnnnnnnnnnnnnnnnnnnnnnnnnnnnnnnnnnnnnnnnnnnnnnnnnnnnnnnnnnnnnnnnnnnnnnnnnnnnnnnnnnnnnnnnnnnnnnnnnnnnnnnnnnnnnnnnnnnnnnnnnnnnnnnnnnnnnnnnnnnnnnnnnnnnnnnnnnnnnnnnnnnnnnnnnnnnnnnnnnnnnnnnnnnnnnnnnnnnnnnnnnnnnnnnnnnnnnnnnnnnnnnnnnnnnnnnnnnnnnnnnnnnnnnnnnnnnnnnnnnnnnnnnnnnnnnnnnnnnnnnnnnnnnnnnnnnnnnnnnnnnngtaactgatttttctgaggcgaaggcggtgaaatcagctgcgtagtcagtgcaatgcagaaggtcgaatcaagccaccttgtgttggggtggttactagaacgatggcaccgatgcaaagaatcaccgcgaaaatcaagccaccttgtgttggggtggttactagaacttgcgaaagccgggattgctgtcggccgctaatcaagccaccttgtgttggggtggttactagaacggagcaggtacagcctctgatgcactatccaatcaagccaccttgtgttggggtggttactagaacatgtgcaatgcgcgaagatgggcaagcgttaatcaagccaccttgtgttggggtggttactagaactaccagtacgcaagcaccatcattgcaacaaatcaagccaccttgtgttggggtggttactagaaccacagcagcctcatactctccgagcgttttaatcaagccaccttgtgttggggtggttactagaactgacacaagcgaataaagtcattattgttcaatcaagccaccctgtgttggggtggttacttaaaaaaggaaagtcgatgttccgctcaaccgaacaatcaaccttcgcagctatcgtcgccaagcacatagcaggcggcgatgcccctctgctgctggaggggggaactggtatcggtaaaacccgtgcctatctgtctgcactgattcagtcagggcaacgggtagccatcgccctgcccacccaccagttaatcgaccaaatgctggcatcaaacgatctggtggcaactcgcagcatggctacagtggccgcgttccggcctgcccggatgtttgagcaccgtgcggattacgaagccaacaaacgcgtagctatggatgcgcaggtgatgttctgcaccgccgccagcgtcatcatcgaccatcgtttgggcggtgagtacaacggctccaccactcgctcctacatcgtgtttgatgaggctgaccaactgccggatatggccgcattgcaaagcgacttcaccatcacacaggcagaactggcagagatggacatccgcctgacgactgttacacatgcgttgcaagcgatcctcgcgaagaaaccgcacacggtggagcctgaaatcaaggccgcagcccggatcattctcgatgccattgaggaaccggcgtggtatcagtccgcaggcatcagcgacgatggcgacatcatgctgacacacaagctgcccggtcgcctgctgaagaaggtcagcaaccggggtaatgtggcattcgtgtctgcgacgctgacggtcggtggccggttcaaggattttcagaactcgatgggcatcgagaacataagtcatctgtcttgtgcgattgaaccggagcggcatggcgcgctcgattttcacatgatcccgatggctgtcgatacgccggaatggatcaccgctgtcgtgcaaatggcaaacgatgcgcccaagccggtgctggtcgccaccgcgtcacatgatctgtccagcctgctcggcgaacatctgccgggggctgtcgtcaggtctgccgaggaaacggcagcacaagccgccgatagggtaagtgccgctggcaccctgatttctgccggagcgtgggcgggtctggatacgccgctacgctggcgttcgatcatcgtgccgcgagtcccgtttggtcagccggtagtgattgatggggaaaccacgaccagttatttcgatgcccgcaatactgcggttcgccgcttgcggcaggtcattgggcgtggtttgagaacaccggatgccgtctgtagcgtgtacatcctggatgcgagagcggaaaaactgggcgggtttgtgcctgagcgtttctcggctgcgtggtttggccgaacgtatatggaaggagcgaggaaggaagtgatcctatccaaagctgaacgcgaccccgcagtgcgccgtgcggcactgaaacactatggccggaagtgcatggcggacggctgtggcttcgagccggtggttgattcgcagcttgacgtgcatcacctcgacccgattgccgagggtcagaggcgcaccagaattgaggacgtaatggtcttgtgtgcgaactgccaccgcttggcgcatgcgccctacccgccggttcaacaaattaaatgacctccggcaaagccggaggcttattgctctttctcttggttgcggttggtggcaattataaaagcggcactggccgcgataccgcgcaaactccacaaatccttcttctatcccaccgatagctcgggtgatgcaggccgaatgcctgcgcgccaggacggtcgataaggccgctggcattgtccaacaggcacaaacgtgcaatgggtggtcactaaatcccccggctgaaaaaaatcaccgtccccttccgattgggcactccgtgcccaacaaaatgaaaactaaaccgtcgggcacactgtgcccgacatgccaagcgataatgttgtgatagtatgcgcatatcaggacaacataacaggaagaccgccatgtccaccagtgtcgcggcacccaaaaaggccaccaatattaccctctccgccgatgtgctgagcgaggcgaaggctttgggcatcaatatttctcaagcctgtgaccagtttttgcgggagttggtcacgcgggagcaggaacaacgttggcaggccgataacgccgaattcattgcggcctacaacgccggcgtggagcgcgacgggttgcctctggatgcgtggagggcattctgacatggcgcgcttcgaggtctttcgcaacagtggatcccatgccgatgacgttccttatttgctggatgtgcaaagcgatctactgcatggcctggatacgcgagtcgtcattcctctgcgccgctgtgaccgatttcccgccagccggattccgcagcgattgactcctgttttcgagattgagggtatcgcctgcctgctggaaacgcccaaactggccgccgtgccgttgcgcctgctcaagcaaccggtacactcgctggccgcagaacaggctgcgataacgggcgcgctggattttctgtttcaggggttctgaacgggatttggtaatgcagggaacgtaggttgggcacggtgtgcccaataaaatgaaaatccaaatcgtcatgcacacaatatgtctcgccgccctttggcgtacctccgtattacggtagaatgccacttttatttctgcggcagaaaataatgatcaagggcagtattgttgcaatcgttacgccgatgcatgaggacggtagcctcgacctggtggcgttccgtgcattaattgattttcacatcgagcagggaacggacggcatagtggtggtcggcaccactggcgaatcgcctaccgtggatgtggaagagcatgagctgttgattgccgaggcggtgaagcacgcggccaagcgcgttcccgtcatcgccggaaccggcgccaactcgaccagagaagccatcgaactggcggcgttctcgaaaaaggccggagcggacgcttcgttgtcagtggttccctattacaacaagccgacccaggaaggcttgtaccagcacttcaagtccatcgctgaagcggtggacatgccgcacatcttgtacaacgtgccggggcgtaccgttgccgacatgagcaacgatactgtgctgcgtcttgcgcagattcccaatattatcggcatcaaggatgcgaccggtaatatcgagcgcggtagcgatttgttgcagcgcgcggctttattgaagcgcgctcatggagatttcgcggtgtatagcggtgatgatgccagcacgctggcgctcatgctactcggcgcgcatggctcaatctcggtgacagcgaatgtggcacccaggttgatgcatgaaatgtgtgccgctgcgttgaatggtgaaattgccaaggcgcgcgagatcaatttccgtttgcttgggctgcatcgcaacctgtttgtcgaagccaatccgattccggtgaagtgggcggtggcgcgcatgggaaaaataagaaacatactgcgtttgccgcttacacccttgtcgcaatccgcacacggagtggtcgaggtggcgatgcgtcaggccggtgtgctcaattaattagctgtatagctggagagaagcaatgaaagttttacatattgggattttcggcattgcgctggtctcgttaatcggttgcagttcggttggtttgggcaataaacgtgttgactatcgctccggcgcagctcaagcgccatcgctggaagtgccgcctgacctgacaacccccggcagggatgaacgctataaagtgccgcagggtaatggcgaaagcgtggcaactttttccgactacaacaagggtggcacgggtgcggatcgaggtcgtggcgccagtgcgatattgccggaaataaagggggcgcgcctggagcgtaatggggcgcagcgttggctggtggtgagcgataagccggagaatgtctggcctgtggtcaaggcgttcttgcaggaaagcgggctaaccatcaagagcgaagatcaagcggctggcgtgatggaaaccgactgggcagagaaccgcgccaagattccgcaggggggcattcgcggggtgattggaaaagtgttcgacaatatttattcatcgggtgagcgcgaccagtatcgtgtgcgtctggagcgcggcgccgaaaaacttttggccgggcacccgaaggacggtgcgagcaccgagatttacatcacccatcgcggcatggaagaggtgttatcggccgacggaaatacctcgaagtggcaagcgcgcgccaatgatccagaaatggaatcaatcatgttgcaacgcttgatggtgcgtttcggcgctagcgagactcaagcggccagcggtgcggtgacagccagcgagtccggcccggttgggtcagctaccctgcaagagattttcgacggcaccaagattatcgtggtgaacgatgcattcgatcgatcttggcgcagggtggggctggctatcgagcgtgcggggctgacggtggaagacaaggatcgtgtcaagggtatctacttcctgcgtccggccaaagcagaaagcggctggatggacaagctgcagttctggaagggcagccaaaacgtcaacacgcgttaccgcgtgaatgtcaaggatgacggcaaggtatgtgaagtgtccgtcactgatcaggatggcggaagcgacaatgcaagcagacagatgattgaggctatctacaaaaatatcagtcagggcgaaaccggcgcggcgtcggtttcccaacccaccgttaatgcaacaaggccggccgttaattcaacagtgcttaccgtcaatgcaacagggccggcggggacagcaagcctgcaggacattttcgacggcagcaaagtcattgtgatgaacgatatgttcgacaagtcttggcacagggtcggcctcgccatcgagcgcgcgggtttggcagtggaagccaatgaccgcgccaagggtatttatttgctgcgtccggctaaagcagaaagcggctggatggataagctgcagttctggaaagatagtgaaaacaccaatacgcgttaccgcgtgaatgtcaaagacggcggcaaggcgtgtgaagtatccgttaccgaccaggacggcgtgagcgacgacacaaccaggcagatgattgaagcggtttacaaaaacattaatccgtaggcagttatgcggtttgcttcatgaagtttgcatctctgggtagcggcagcgaaggcaacgcgctgctggttgcagtcggtcagacgaaagtattgatggactgtggctttggattgcgggataccctctcgcggctggcgcgcttgggtgtttctgcagaacagttgagcggcattgttgtcacgcatgaacacggcgaccacctcggcggtgtggcacggctggcgcgaaaattcaatctgccagtctggttcactcacggcacgctgcgcaaccagccgaaacactttgctgacattacccacctccacgaaattgatcctcatcaggtattctcaatcggcgagattgaaatcgccccctaccccgttcctcacgatgccgccgaaccggtacagttcgtgttcagtgacggcacaaagcgcttgggtgtgttgaccgataccggatgtaccacagcgtatatcgagcagaccctgaacggctgccatgcgttggtattagagtgcaatcacgataatgacatgctgatgaatggcgattacccatataacgtcaagcgtcgtgtgggtggacgcttgggacacttgaataatcaggatgccgctggcattttgagccgtctggatgtgagccgtttgcagcatctgattgctgcgcatttgagccgcaagaacaatacagcggaactggcggtaaatgccttgagtggcgtgctgaattgcgaagccagttgggtgggggtggcgacgcaggatgaggggtttgcctggcgcgaaattgcctgacgttcgacgtgagggagcttctaaaaatccacatttcatccccatccggcggataacgcctttggctcatccgccctactttactgcgcaactttatcacgttgcgatagttgcagaaattgcaaaagccgcaggagctacctgcggctttttgtttatgcaaccggatcagtgatacttgcggctcagctcatgcaccgccgcaaccagtgctgccgcatgttccggattggtatgctgtgaaataccgtggccaagattaaacacatggccgctgccgaagccgtagctgctaagcacgcgttccacctcggtatggatagcttcaggtgaggcaaacaataccgccgggtcgaggttgccttgcagtgcaactttgtgaccgacgcgctgccgcgcgctgccgatgtctacggtccaatccaggccgactgcatcgcagccagtgttggcaatgctttcgagccacaagccgccacccttggtgaatacgatggacgggatgcgcacgccatctttttccttgatcaaaccatccacaatacgatgcgtgtatgccagcgaaaattcgtggaatgccgcatgcgacaacacgccgccccacgagtcgaagatcattaccgcctgcgcaccggcttcgatctgcgcattcaggtaggcgatcaccgcctgagtggtcacttcgaggatgtggtgcatcagcttcggttcgttgtacatcaaggttttcaccttggcataatcgtcgctgccaccgccttccaccatgtagcaggacagcgtgaacgggctgccggagaagccgatcagcggcacgcggccatccagcgtcttgcggatttgcgacacggcatcggtcacatatttcagatccttgccgatgtccggcacgcgcaatgccataattgccgcttcatcgcgcaacgggcgctcgaacttcgggccctcgccatcggagaaatacagacccagccccattgcatccggcacggtgaggatgtcagagaacaggatcgcggcatccagcggaaagcgatccagcggttgcagcgtcacttcggtggcgaaatccggactcttgcacaggccaaggaagctgccggcgcgcttgcgtgactcgcgatattccggcagatagcggccagcctggcgcatcatccacagcggcgtgtagtcggtcggttggcgtaacagggcacgcaggaaggtgtcgtttttcagtttgaagttcatgttttctctttttattaaaattctgaagctacccaaactttggctgggcgagccatgtacaaaaatgggaattcgtattttcgtaggttgggcaaagcgcagcgtgcccaacgaacgaagatgccattattaatgttgggcacgctgcgctttgcccaacctacgcactaaccttctcttgtcagggagtgccgtgatgggttgggtttaacgtggtaaagcggtgctacccatcaaatactcatccacagcccgcgcgcactggcggccttcgcggatcgcccataccaccagcgactggccgcggcgcatatcgccagcggcgaacactttgtccacgctggtcttataacaacctgcgccatcggtcgtggtcttggcgttgccgcgcgtgtctttttccacaccgaatgcatccagcattttttgcgccgggctgacgaagcccatcgccagaaacaccagatcggctttcatttcaaattcgctgcccggcacttcgctcatcttgccgtccttgaattcgacgcgcaccgccttgatgccggtaagtttgccgttgttgccgaagaattcttttgtggcaatcgcccagtcgcgggcacagccctcatcatgcgagctggaggtgcgcagcttgagcggccagttcggccaggtcagtggtttgttttcctgctccggtgcgcgcggcatcacttcgatctgagtgactgaggctgcaccgtgacggtttgaggtgccgacgcaatcggagccggtatcaccgccgccgatcaccaccacatgtttacccttggcattgaccggattcttgccatcgcctgccacttccttattctgcggaatgaggaactccagcgcatagtgcacacccttcaattcacgccccggtacggataaatcacgcggcacttccgcgccacccgccagaatcacggcatcgaatttattcagcaactcttttggcacgatggtttttttcgcatcgttggtcacactcttgtccagttttttgccgataaacaccgaggtttgaaaggtcacaccctcggctttcaattgcgccatgcgccaatcgatcaggcgtttgtcgagcttgaaatcgggaatgccatagcgcagcaagccgccgatgcggctgtttttctcgaacaccgttacactatgtccggcacgcgccagttgctgcgccgcagccagtccggaagggccggagccgactaccgcaacttttttgccggtcttgtggtgagccggttgcggcagcacccagccgttctcgccgcccttgtcgatgatggcatgttcgatggatttgatgcccaccgcagcttcattgatgttcagcgtgcaggctgcttcacatggcgcagggcagatgcggctggtgacttccgggaaattgttggtggaatgcaatacctccagcgcttgcttccagttgccccggtacaccaggtcattccaatccgggatgatgttgttgaccggacagccgctgctgcaaaaagggatgccgcaatccatgcagcgcgcgccttgcgtctgtgccttttcgtccgtcaggtgcagcacaaactcatgataatttttcaggcgatcagcaaccggcaagctctcttcgctcaggcggctgaattccataaacccggtaagcttgcccatttacacggcctcccttatttgtctggcttgcagctccgcaatttcctgcaaggcgcggcgatattcggtcggcattaccttgacaaatttcggcaggtagcgcgcccagttgtcgagaataagcttggcacgcacgctgctagtgtaatgcaaatgcttctcgattttgccgcgcaacgccgccgcatcggccttgcccagatggttgagatgcacccggccatgtgcttcgacctccccggtttcgctggctgccacctcttcggggatcgcctccagttgcaccatggacatgttgcagcgcttggcaaatgtgtcatcctcatccagcacgtaagctacgccaccggacatgcccgccgcaaaattgcgcccggtctgacccagcaccaccaccatgccgccggtcatgtattcgcagccgtgatcgcccaagccttccaccaccgcgacggcgccggaattacgcaccgcgaaacgctcgcccgccacaccgcagaagtagccttcgccgctggtcgcgccgtacagcgcggtgttgccgacgatgatgttgtctgccgcattgatcgggcattccttggggggcagcaccacaatgcggcccccgcacaaacccttgccgacatagtcgttgctctcgccggacagctccagcgtaatgccatgcgcgaggaaggcgccgaagctctgccccgccgtacctttcaacttcaccgtgatggtgttggccggcaggccggcctgaccataacgctttaccacttcatgcgacagcatggtgccgacggtgcggttgacatttctgatgacactctcgatgactaccggttttttatgctccagcgcggccttggcttgcgcgatcagctggttatccagcgctttttccagcccgtgatcctgctgctcggcatggcggcgcgccacgtcggcgggcatatcaggctgatggaaaattttggagaaattcaagccttgtgccttccagtgcgtaatgccgtgcttcacatcgagcaaatcactgcggcctaccaactcatcaaccttgcgaatacccatctgcgccatgtattcgcgcaactcttcggcgacgaagaaaaagtaattcaccacgtgctccggctggccggtaaatttcttgcgcagctcggggtcatattctttcaaaaagtcctcgtaaaaatgaatgacaggatcaggtccttcaatagttttgccccataagtcatccttgaaatactgcctcatcagcgcttggacatcagcgtgggaaaaaacctcgcatagttcatttacgatatattcaagccgtttatcaaaattaggtccgacaatgtgatcaaagaagtgccgcagcagagggtttgtcctgggcaccagatcgcgggcttcctgacgtgtaaaagtctcaggtgtctgatcgtgaaatcgggcaacaaaaagtccgtaaaccagcgtttgcgcgtacatgtcagcaaaagattctaatgtcaaatcatggaccaggagctttttaatg

SEQ ID NO: 35 - DNA, 20412 bp, Artificial Sequence
  Synthetic Oligonucleotide
  misc_feature (1)..(9454): n is a, c, g, or t
nnnnnnnnnnnnnnnnnnnnnnnnnnnnnnnnnnnnnnnnnnnnnnnnnnnnnnnnnnnnnnnnnnnnnnnnnnnnnnnnnnnnnnnnnnnnnnnnnnnnnnnnnnnnnnnnnnnnnnnnnnnnnnnnnnnnnnnnnnnnnnnnnnnnnnnnnnnnnnnnnnnnnnnnnnnnnnnnnnnnnnnnnnnnnnnnnnnnnnnnnnnnnnnnnnnnnnnnnnnnnnnnnnnnnnnnnnnnnnnnnnnnnnnnnnnnnnnnnnnnnnnnnnnnnnnnnnnnnnnnnnnnnnnnnnnnnnnnnnnnnnnnnnnnnnnnnnnnnnnnnnnnnnnnnnnnnnnnnnnnnnnnnnnnnnnnnnnnnnnnnnnnnnnnnnnnnnnnnnnnnnnnnnnnnnnnnnnnnnnnnnnnnnnnnnnnnnnnnnnnnnnnnnnnnnnnnnnnnnnnnnnnnnnnnnnnnnnnnnnnnnnnnnnnnnnnnnnnnnnnnnnnnnnnnnnnnnnnnnnnnnnnnnnnnnnnnnnnnnnnnnnnnnnnnnnnnnnnnnnnnnnnnnnnnnnnnnnnnnnnnnnnnnnnnnnnnnnnnnnnnnnnnnnnnnnnnnnnnnnnnnnnnnnnnnnnnnnnnnnnnnnnnnnnnnnnnnnnnnnnnnnnnnnnnnnnnnnnnnnnnnnnnnnnnnnnnnnnnnnnnnnnnnnnnnnnnnnnnnnnnnnnnnnnnnnnnnnnnnnnnnnnnnnnnnnnnnnnnnnnnnnnnnnnnnnnnnnnnnnnnnnnnnnnnnnnnnnnnnnnnnnnnnnnnnnnnnnnnnnnnnnnnnnnnnnnnnnnnnnnnnnnnnnnnnnnnnnnnnnnnnnnnnnnnnnnnnnnnnnnnnnnnnnnnnnnnnnnnnnnnnnnnnnnnnnnnnnnnnnnnnnnnnnnnnnnnnnnnnnnnnnnnnnnnnnnnnnnnnnnnnnnnnnnnnnnnnnnnnnnnnnnnnnnnnnnnnnnnnnnnnnnnnnnnnnnnnnnnnnnnnnnnnnnnnnnnnnnnnnnnnnnnnnnnnnnnnnnnnnnnnnnnnnnnnnnnnnnnnnnnnnnnnnnnnnnnnnnnnnnnnnnnnnnnnnnnnnnnnnnnnnnnnnnnnnnnnnnnnnnnnnnnnnnnnnnnnnnnnnnnnnnnnnnnnnnnnnnnnnnnnnnnnnnnnnnnnnnnnnnnnnnnnnnnnnnnnnnnnnnnnnnnnnnnnnnnnnnnnnnnnnnnnnnnnnnnnnnnnnnnnnnnnnnnnnnnnnnnnnnnnnnnnnnnnnnnnnnnnnnnnnnnnnnnnnnnnnnnnnnnnnnnnnnnnnnnnnnnnnnnnnnnnnnnnnnnnnnnnnnnnnnnnnnnnnnnnnnnnnnnnnnnnnnnnnnnnnnnnnnnnnnnnnnnnnnnnnnnnnnnnnnnnnnnnnnnnnnnnnnnnnnnnnnnnnnnnnnnnnnnnnnnnnnnnnnnnnnnnnnnnnnnnnnnnnnnnnnnnnnnnnnnnnnnnnnnnnnnnnnnnnnnnnnnnnnnnnnnnnnnnnnnnnnnnnnnnnnnnnnnnnnnnnnnnnnnnnnnnnnnnnnnnnnnnnnnnnnnnnnnnnnnnnnnnnnnnnnnnnnnnnnnnnnnnnnnnnnnnnnnnnnnnnnnnnnnnnnnnnnnnnnnnnnnnnnnnnnnnnnnnnnnnnnnnnnnnnnnnnnnnnnnnnnnnnnnnnnnnnnnnnnnnnnnnnnnnnnnnnnnnnnnnnnnnnnnnnnnnnnnnnnnnnnnnnnnnnnnnnnnnnnnnnnnnnnnnnnnnnnnnnnnnnnnnnnnnnnnnnnnnnnnnnnnnnnnnnnnnnnnnnnnnnnnnnnnnnnnnnnnnnnnnnnnnnnnnnnnnnnnnnnnnnnnnnnnnnnnnnnnnnnnnnnnnnnnnnnnnnnnnnnnnnnnnnnnnnnnnnnnnnnnnnnnnnnnnnnnnnnnnnnnnnnnnnnnnnnnnnnnnnnnnnnnnnnnnnnnnnnnnnnnnnnnnnnnnnnnnnnnnnnnnnnnnnnnnnnnnnnnnnnnnnnnnnnnnnnnnnnnnnnnnnnnnnnnnnnnnnnnnnnnnnnnnnnnnnnnnnnnnnnnnnnnnnnnnnnnnnnnnnnnnnnnnnnnnnnnnnnnnnnnnnnnnnnnnnnnnnnnnnnnnnnnnnnnnnnnnnnnnnnnnnnnnnnnnnnnnnnnnnnnnnnnnnnnnnnnnnnnnnnnnnnnnnnnnnnnnnnnnnnnnnnnnnnnnnnnnnnnnnnnnnnnnnnnnnnnnnnnnnnnnnnnnnnnnnnnnnnnnnnnnnnnnnnnnnnnnnnnnnnnnnnnnnnnnnnnnnnnnnnnnnnnnnnnnnnnnnnnnnnnnnnnnnnnnnnnnnnnnnnnnnnnnnnnnnnnnnnnnnnnnnnnnnnnnnnnnnnnnnnnnnnnnnnnnnnnnnnnnnnnnnnnnnnnnnnnnnnnnnnnnnnnnnnnnnnnnnnnnnnnnnnnnnnnnnnnnnnnnnnnnnnnnnnnnnnnnnnnnnnnnnnnnnnnnnnnnnnnnnnnnnnnnnnnnnnnnnnnnnnnnnnnnnnnnnnnnnnnnnnnnnnnnnnnnnnnnnnnnnnnnnnnnnnnnnnnnnnnnnnnnnnnnnnnnnnnnnnnnnnnnnnnnnnnnnnnnnnnnnnnnnnnnnnnnnnnnnnnnnnnnnnnnnnnnnnnnnnnnnnnnnnnnnnnnnnnnnnnnnnnnnnnnnnnnnnnnnnnnnnnnnnnnnnnnnnnnnnnnnnnnnnnnnnnnnnnnnnnnnnnnnnnnnnnnnnnnnnnnnnnnnnnnnnnnnnnnnnnnnnnnnnnnnnnnnnnnnnnnnnnnnnnnnnnnnnnnnnnnnnnnnnnnnnnnnnnnnnnnnnnnnnnnnnnnnnnnnnnnnnnnnnnnnnnnnnnnnnnnnnnnnnnnnnnnnnnnnnnnnnnnnnnnnnnnnnnnnnnnnnnnnnnnnnnnnnnnnnnnnnnnnnnnnnnnnnnnnnnnnnnnnnnnnnnnnnnnnnnnnnnnnnnnnnnnnnnnnnnnnnnnnnnnnnnnnnnnnnnnnnnnnnnnnnnnnnnnnnnnnnnnnnnnnnnnnnnnnnnnnnnnnnnnnnnnnnnnnnnnnnnnnnnnnnnnnnnnnnnnnnnnnnnnnnnnnnnnnnnnnnnnnnnnnnnnnnnnnnnnnnnnnnnnnnnnnnnnnnnnnnnnnnnnnnnnnnnnnnnnnnnnnnnnnnnnnnnnnnnnnnnnnnnnnnnnnnnnnnnnnnnnnnnnnnnnnnnnnnnnnnnnnnnnnnnnnnnnnnnnnnnnnnnnnnnnnnnnnnnnnnnnnnnnnnnnnnnnnnnnnnnnnnnnnnnnnnnnnnnnnnnnnnnnnnnnnnnnnnnnnnnnnnnnnnnnnnnnnnnnnnnnnnnnnnnnnnnnnnnnnnnnnnnnnnnnnnnnnnnnnnnnnnnnnnnnnnnnnnnnnnnnnnnnnnnnnnnnnnnnnnnnnnnnnnnnnnnnnnnnnnnnnnnnnnnnnnnnnnnnnnnnnnnnnnnnnnnnnnnnnnnnnnnnnnnnnnnnnnnnnnnnnnnnnnnnnnnnnnnnnnnnnnnnnnnnnnnnnnnnnnnnnnnnnnnnnnnnnnnnnnnnnnnnnnnnnnnnnnnnnnnnnnnnnnnnnnnnnnnnnnnnnnnnnnnnnnnnnnnnnnnnnnnnnnnnnnnnnnnnnnnnnnnnnnnnnnnnnnnnnnnnnnnnnnnnnnnnnnnnnnnnnnnnnnnnnnnnnnnnnnnnnnnnnnnnnnnnnnnnnnnnnnnnnnnnnnnnnnnnnnnnnnnnnnnnnnnnnnnnnnnnnnnnnnnnnnnnnnnnnnnnnnnnnnnnnnnnnnnnnnnnnnnnnnnnnnnnnnnnnnnnnnnnnnnnnnnnnnnnnnnnnnnnnnnnnnnnnnnnnnnnnnnnnnnnnnnnnnnnnnnnnnnnnnnnnnnnnnnnnnnnnnnnnnnnnnnnnnnnnnnnnnnnnnnnnnnnnnnnnnnnnnnnnnnnnnnnnnnnnnnnnnnnnnnnnnnnnnnnnnnnnnnnnnnnnnnnnnnnnnnnnnnnnnnnnnnnnnnnnnnnnnnnnnnnnnnnnnnnnnnnnnnnnnnnnnnnnnnnnnnnnnnnnnnnnnnnnnnnnnnnnnnnnnnnnnnnnnnnnnnnnnnnnnnnnnnnnnnnnnnnnnnnnnnnnnnnnnnnnnnnnnnnnnnnnnnnnnnnnnnnnnnnnnnnnnnnnnnnnnnnnnnnnnnnnnnnnnnnnnnnnnnnnnnnnnnnnnnnnnnnnnnnnnnnnnnnnnnnnnnnnnnnnnnnnnnnnnnnnnnnnnnnnnnnnnnnnnnnnnnnnnnnnnnnnnnnnnnnnnnnnnnnnnnnnnnnnnnnnnnnnnnnnnnnnnnnnnnnnnnnnnnnnnnnnnnnnnnnnnnnnnnnnnnnnnnnnnnnnnnnnnnnnnnnnnnnnnnnnnnnnnnnnnnnnnnnnnnnnnnnnnnnnnnnnnnnnnnnnnnnnnnnnnnnnnnnnnnnnnnnnnnnnnnnnnnnnnnnnnnnnnnnnnnnnnnnnnnnnnnnnnnnnnnnnnnnnnnnnnnnnnnnnnnnnnnnnnnnnnnnnnnnnnnnnnnnnnnnnnnnnnnnnnnnnnnnnnnnnnnnnnnnnnnnnnnnnnnnnnnnnnnnnnnnnnnnnnnnnnnnnnnnnnnnnnnnnnnnnnnnnnnnnnnnnnnnnnnnnnnnnnnnnnnnnnnnnnnnnnnnnnnnnnnnnnnnnnnnnnnnnnnnnnnnnnnnnnnnnnnnnnnnnnnnnnnnnnnnnnnnnnnnnnnnnnnnnnnnnnnnnnnnnnnnnnnnnnnnnnnnnnnnnnnnnnnnnnnnnnnnnnnnnnnnnnnnnnnnnnnnnnnnnnnnnnnnnnnnnnnnnnnnnnnnnnnnnnnnnnnnnnnnnnnnnnnnnnnnnnnnnnnnnnnnnnnnnnnnnnnnnnnnnnnnnnnnnnnnnnnnnnnnnnnnnnnnnnnnnnnnnnnnnnnnnnnnnnnnnnnnnnnnnnnnnnnnnnnnnnnnnnnnnnnnnnnnnnnnnnnnnnnnnnnnnnnnnnnnnnnnnnnnnnnnnnnnnnnnnnnnnnnnnnnnnnnnnnnnnnnnnnnnnnnnnnnnnnnnnnnnnnnnnnnnnnnnnnnnnnnnnnnnnnnnnnnnnnnnnnnnnnnnnnnnnnnnnnnnnnnnnnnnnnnnnnnnnnnnnnnnnnnnnnnnnnnnnnnnnnnnnnnnnnnnnnnnnnnnnnnnnnnnnnnnnnnnnnnnnnnnnnnnnnnnnnnnnnnnnnnnnnnnnnnnnnnnnnnnnnnnnnnnnnnnnnnnnnnnnnnnnnnnnnnnnnnnnnnnnnnnnnnnnnnnnnnnnnnnnnnnnnnnnnnnnnnnnnnnnnnnnnnnnnnnnnnnnnnnnnnnnnnnnnnnnnnnnnnnnnnnnnnnnnnnnnnnnnnnnnnnnnnnnnnnnnnnnnnnnnnnnnnnnnnnnnnnnnnnnnnnnnnnnnnnnnnnnnnnnnnnnnnnnnnnnnnnnnnnnnnnnnnnnnnnnnnnnnnnnnnnnnnnnnnnnnnnnnnnnnnnnnnnnnnnnnnnnnnnnnnnnnnnnnnnnnnnnnnnnnnnnnnnnnnnnnnnnnnnnnnnnnnnnnnnnnnnnnnnnnnnnnnnnnnnnnnnnnnnnnnnnnnnnnnnnnnnnnnnnnnnnnnnnnnnnnnnnnnnnnnnnnnnnnnnnnnnnnnnnnnnnnnnnnnnnnnnnnnnnnnnnnnnnnnnnnnnnnnnnnnnnnnnnnnnnnnnnnnnnnnnnnnnnnnnnnnnnnnnnnnnnnnnnnnnnnnnnnnnnnnnnnnnnnnnnnnnnnnnnnnnnnnnnnnnnnnnnnnnnnnnnnnnnnnnnnnnnnnnnnnnnnnnnnnnnnnnnnnnnnnnnnnnnnnnnnnnnnnnnnnnnnnnnnnnnnnnnnnnnnnnnnnnnnnnnnnnnnnnnnnnnnnnnnnnnnnnnnnnnnnnnnnnnnnnnnnnnnnnnnnnnnnnnnnnnnnnnnnnnnnnnnnnnnnnnnnnnnnnnnnnnnnnnnnnnnnnnnnnnnnnnnnnnnnnnnnnnnnnnnnnnnnnnnnnnnnnnnnnnnnnnnnnnnnnnnnnnnnnnnnnnnnnnnnnnnnnnnnnnnnnnnnnnnnnnnnnnnnnnnnnnnnnnnnnnnnnnnnnnnnnnnnnnnnnnnnnnnnnnnnnnnnnnnnnnnnnnnnnnnnnnnnnnnnnnnnnnnnnnnnnnnnnnnnnnnnnnnnnnnnnnnnnnnnnnnnnnnnnnnnnnnnnnnnnnnnnnnnnnnnnnnnnnnnnnnnnnnnnnnnnnnnnnnnnnnnnnnnnnnnnnnnnnnnnnnnnnnnnnnnnnnnnnnnnnnnnnnnnnnnnnnnnnnnnnnnnnnnnnnnnnnnnnnnnnnnnnnnnnnnnnnnnnnnnnnnnnnnnnnnnnnnnnnnnnnnnnnnnnnnnnnnnnnnnnnnnnnnnnnnnnnnnnnnnnnnnnnnnnnnnnnnnnnnnnnnnnnnnnnnnnnnnnnnnnnnnnnnnnnnnnnnnnnnnnnnnnnnnnnnnnnnnnnnnnnnnnnnnnnnnnnnnnnnnnnnnnnnnnnnnnnnnnnnnnnnnnnnnnnnnnnnnnnnnnnnnnnnnnnnnnnnnnnnnnnnnnnnnnnnnnnnnnnnnnnnnnnnnnnnnnnnnnnnnnnnnnnnnnnnnnnnnnnnnnnnnnnnnnnnnnnnnnnnnnnnnnnnnnnnnnnnnnnnnnnnnnnnnnnnnnnnnnnnnnnnnnnnnnnnnnnnnnnnnnnnnnnnnnnnnnnnnnnnnnnnnnnnnnnnnnnnnnnnnnnnnnnnnnnnnnnnnnnnnnnnnnnnnnnnnnnnnnnnnnnnnnnnnnnnnnnnnnnnnnnnnnnnnnnnnnnnnnnnnnnnnnnnnnnnnnnnnnnnnnnnnnnnnnnnnnnnnnnnnnnnnnnnnnnnnnnnnnnnnnnnnnnnnnnnnnnnnnnnnnnnnnnnnnnnnnnnnnnnnnnnnnnnnnnnnnnnnnnnnnnnnnnnnnnnnnnnnnnnnnnnnnnnnnnnnnnnnnnnnnnnnnnnnnnnnnnnnnnnnnnnnnnnnnnnnnnnnnnnnnnnnnnnnnnnnnnnnnnnnnnnnnnnnnnnnnnnnnnnnnnnnnnnnnnnnnnnnnnnnnnnnnnnnnnnnnnnnnnnnnnnnnnnnnnnnnnnnnnnnnnnnnnnnnnnnnnnnnnnnnnnnnnnnnnnnnnnnnnnnnnnnnnnnnnnnnnnnnnnnnnnnnnnnnnnnnnnnnnnnnnnnnnnnnnnnnnnnnnnnnnnnnnnnnnnnnnnnnnnnnnnnnnnnnnnnnnnnnnnnnnnnnnnnnnnnnnnnnnnnnnnnnnnnnnnnnnnnnnnnnnnnnnnnnnnnnnnnnnnnnnnnnnnnnnnnnnnnnnnnnnnnnnnnnnnnnnnnnnnnnnnnnnnnnnnnnnnnnnnnnnnnnnnnnnnnnnnnnnnnnnnnnnnnnnnnnnnnnnnnnnnnnnnnnnnnnnnnnnnnnnnnnnnnnnnnnnnnnnnnnnnnnnnnnnnnnnnnnnnnnnnnnnnnnnnnnnnnnnnnnnnnnnnnnnnnnnnnnnnnnnnnnnnnnnnnnnnnnnnnnnnnnnnnnnnnnnnnnnnnnnnnnnnnnnnnnnnnnnnnnnnnnnnnnnnnnnnnnnnnnnnnnnnnnnnnnnnnnnnnnnnnnnnnnnnnnnnnnnnnnnnnnnnnnnnnnnnnnnnnnnnnnnnnnnnnnnnnnnnnnnnnnnnnnnnnnnnnnnnnnnnnnnnnnnnnnnnnnnnnnnnnnnnnnnnnnnnnnnnnnnnnnnnnnnnnnnnnnnnnnnnnnnnnnnnnnnnnnnnnnnnnnnnnnnnnnnnnnnnnnnnnnnnnnnnnnnnnnnnnnnnnnnnnnnnnnnnnnnnnnnnnnnnnnnnnnnnnnnnnnnnnnnnnnnnnnnnnnnnnnnnnnnnnnnnnnnnnnnnnnnnnnnnnnnnnnnnnnnnnnnnnnnnnnnnnnnnnnnnnnnnnnnnnnnnnnnnnnnnnnnnnnnnnnnnnnnnnnnnnnnnnnnnnnnnnnnnnnnnnnnnnnnnnnnnnnnnnnnnnnnnnnnnnnnnnnnnnnnnnnnnnnnnnnnnnnnnnnnnnnnnnnnnnnnnnnnnnnnnnnnnnnnnnnnnnnnnnnnnnnnnnnnnnnnnnnnnnnnnnnnnnnnnnnnnnnnnnnnnnnnnnnnnnnnnnnnnnnnnnnnnnnnnnnnnnnnnnnnnnnnnnnnnnnnnnnnnnnnnnnnnnnnnnnnnnnnnnnnnnnnnnnnnnnnnnnnnnnnnnnnnnnnnnnnnnnnnnnnnnnnnnnnnnnnnnnnnnnnnnnnnnnnnnnnnnnnnnnnnnnnnnnnnnnnnnnnnnnnnnnnnnnnnnnnnnnnnnnnnnnnnnnnnnnnnnnnnnnnnnnnnnnnnnnnnnnnnnnnnnnnnnnnnnnnnnnnnnnnnnnnnnnnnnnnnnnnnnnnnnnnnnnnnnnnnnnnnnnnnnnnnnnnnnnnnnnnnnnnnnnnnnnnnnnnnnnnnnnnnnnnnnnnnnnnnnnnnnnnnnnnnnnnnnnnnnnnnnnnnnnnnnnnnnnnnnnnnnnnnnnnnnnnnnnnnnnnnnnnnnnnnnnnnnnnnnnnnnnnnnnnnnnnnnnnnnnnnnnnnnnnnnnnnnnnnnnnnnnnnnnnnnnnnnnnnnnnnnnnnnnnnnnnnnnnnnnnnnnnnnnnnnnnnnnnnnnnnnnnnnnnnnnnnnnnnnnnnnnnnnnnnnnnnnnnnnnnnnnnnnnnnnnnnnnnnnnnnnnnnnnnnnnnnnnnnnnnnnnnnnnnnnnnnnnnnnnnnnnnnnnnnnnnnnnnnnnnnnnnnnnnnnnnnnnnnnnnnnnnnnnnnnnnnnnnnnnnnnnnnnnnnnnnnnnnnnnnnnnnnnnnnnnnnnnnnnnnnnnnnnnnnnnnnnnnnnnnnnnnnnnnnnnnnnnnnnnnnnnnnnnnnnnnnnnnnnnnnnnnnnnnnnnnnnnnnnnnnnnnnnnnnnnnnnnnnnnnnnnnnnnnnnnnnnnnnnnnnnnnnnnnnnnnnnnnnnnnnnnnnnnnnnnnnnnnnnnnnnnnnnnnnnnnnnnnnnnnnnnnnnnnnnnnnnnnnnnnnnnnnnnnnnnnnnnnnnnnnnnnnnnnnnnnnnnnnnnnnnnnnnnnnnnnnnnnnnnnnnnnnnnnnnnnnnnnnnnnnnnnnnnnnnnnnnnnnnnnnnnnnnnnnnnnnnnnnnnnnnnnnnnnnnnnnnnnnnnnnnnnnnnnnnnnnnnnnnnnnnnnnnnnnnnnnnnnnnnnnnnnnnnnnnnnnnnnnnnnnnnnnnnnnnnnnnnnnnnnnnnnnnnnnnnnnnnnnnnnnnnnnnnnnnnnnnnnnnnnnnnnnnnnnnnnnnnnnnnnnnnnnngtaactgatttttctgaggcgaaggcggtgaaatcagctgcgtagtcagtgcaatgcagaaggtcgaatcaagccaccttgtgttggggtggttactagaacgatggcaccgatgcaaagaatcaccgcgaaaatcaagccaccttgtgttggggtggttactagaacttgcgaaagccgggattgctgtcggccgctaatcaagccaccttgtgttggggtggttactagaacggagcaggtacagcctctgatgcactatccaatcaagccaccttgtgttggggtggttactagaacatgtgcaatgcgcgaagatgggcaagcgttaatcaagccaccttgtgttggggtggttactagaactaccagtacgcaagcaccatcattgcaacaaatcaagccaccttgtgttggggtggttactagaaccacagcagcctcatactctccgagcgttttaatcaagccaccttgtgttggggtggttactagaactgacacaagcgaataaagtcattattgttcaatcaagccaccctgtgttggggtggttacttaaaaaaggaaagtcgatgttccgctcaaccgaacaatcaaccttcgcagctatcgtcgccaagcacatagcaggcggcgatgcccctctgctgctggaggggggaactggtatcggtaaaacccgtgcctatctgtctgcactgattcagtcagggcaacgggtagccatcgccctgcccacccaccagttaatcgaccaaatgctggcatcaaacgatctggtggcaactcgcagcatggctacagtggccgcgttccggcctgcccggatgtttgagcaccgtgcggattacgaagccaacaaacgcgtagctatggatgcgcaggtgatgttctgcaccgccgccagcgtcatcatcgaccatcgtttgggcggtgagtacaacggctccaccactcgctcctacatcgtgtttgatgaggctgaccaactgccggatatggccgcattgcaaagcgacttcaccatcacacaggcagaactggcagagatggacatccgcctgacgactgttacacatgcgttgcaagcgatcctcgcgaagaaaccgcacacggtggagcctgaaatcaaggccgcagcccggatcattctcgatgccattgaggaaccggcgtggtatcagtccgcaggcatcagcgacgatggcgacatcatgctgacacacaagctgcccggtcgcctgctgaagaaggtcagcaaccggggtaatgtggcattcgtgtctgcgacgctgacggtcggtggccggttcaaggattttcagaactcgatgggcatcgagaacataagtcatctgtcttgtgcgattgaaccggagcggcatggcgcgctcgattttcacatgatcccgatggctgtcgatacgccggaatggatcaccgctgtcgtgcaaatggcaaacgatgcgcccaagccggtgctggtcgccaccgcgtcacatgatctgtccagcctgctcggcgaacatctgccgggggctgtcgtcaggtctgccgaggaaacggcagcacaagccgccgatagggtaagtgccgctggcaccctgatttctgccggagcgtgggcgggtctggatacgccgctacgctggcgttcgatcatcgtgccgcgagtcccgtttggtcagccggtagtgattgatggggaaaccacgaccagttatttcgatgcccgcaatactgcggttcgccgcttgcggcaggtcattgggcgtggtttgagaacaccggatgccgtctgtagcgtgtacatcctggatgcgagagcggaaaaactgggcgggtttgtgcctgagcgtttctcggctgcgtggtttggccgaacgtatatggaaggagcgaggaaggaagtgatcctatccaaagctgaacgcgaccccgcagtgcgccgtgcggcactgaaacactatggccggaagtgcatggcggacggctgtggcttcgagccggtggttgattcgcagcttgacgtgcatcacctcgacccgattgccgagggtcagaggcgcaccagaattgaggacgtaatggtcttgtgtgcgaactgccaccgcttggcgcatgcgccctacccgccggttcaacaaattaaatgacctccggcaaagccggaggcttattgctctttctcttggttgcggttggtggcaattataaaagcggcactggccgcgataccgcgcaaactccacaaatccttcttctatcccaccgatagctcgggtgatgcaggccgaatgcctgcgcgccaggacggtcgataaggccgctggcattgtccaacaggcacaaacgtgcaatgggtggtcactaaatcccccggctgaaaaaaatcaccgtccccttccgattgggcactccgtgcccaacaaaatgaaaactaaaccgtcgggcacactgtgcccgacatgccaagcgataatgttgtgatagtatgcgcatatcaggacaacataacaggaagaccgccatgtccaccagtgtcgcggcacccaaaaaggccaccaatattaccctctccgccgatgtgctgagcgaggcgaaggctttgggcatcaatatttctcaagcctgtgaccagtttttgcgggagttggtcacgcgggagcaggaacaacgttggcaggccgataacgccgaattcattgcggcctacaacgccggcgtggagcgcgacgggttgcctctggatgcgtggagggcattctgacatggcgcgcttcgaggtctttcgcaacagtggatcccatgccgatgacgttccttatttgctggatgtgcaaagcgatctactgcatggcctggatacgcgagtcgtcattcctctgcgccgctgtgaccgatttcccgccagccggattccgcagcgattgactcctgttttcgagattgagggtatcgcctgcctgctggaaacgcccaaactggccgccgtgccgttgcgcctgctcaagcaaccggtacactcgctggccgcagaacaggctgcgataacgggcgcgctggattttctgtttcaggggttctgaacgggatttggtaatgcagggaacgtaggttgggcacggtgtgcccaataaaatgaaaatccaaatcgtcatgcacacaatatgtctcgccgccctttggcgtacctccgtattacggtagaatgccacttttatttctgcggcagaaaataatgatcaagggcagtattgttgcaatcgttacgccgatgcatgaggacggtagcctcgacctggtggcgttccgtgcattaattgattttcacatcgagcagggaacggacggcatagtggtggtcggcaccactggcgaatcgcctaccgtggatgtggaagagcatgagctgttgattgccgaggcggtgaagcacgcggccaagcgcgttcccgtcatcgccggaaccggcgccaactcgaccagagaagccatcgaactggcggcgttctcgaaaaaggccggagcggacgcttcgttgtcagtggttccctattacaacaagccgacccaggaaggcttgtaccagcacttcaagtccatcgctgaagcggtggacatgccgcacatcttgtacaacgtgccggggcgtaccgttgccgacatgagcaacgatactgtgctgcgtcttgcgcagattcccaatattatcggcatcaaggatgcgaccggtaatatcgagcgcggtagcgatttgttgcagcgcgcggctttattgaagcgcgctcatggagatttcgcggtgtatagcggtgatgatgccagcacgctggcgctcatgctactcggcgcgcatggctcaatctcggtgacagcgaatgtggcacccaggttgatgcatgaaatgtgtgccgctgcgttgaatggtgaaattgccaaggcgcgcgagatcaatttccgtttgcttgggctgcatcgcaacctgtttgtcgaagccaatccgattccggtgaagtgggcggtggcgcgcatgggaaaaataagaaacatactgcgtttgccgcttacacccttgtcgcaatccgcacacggagtggtcgaggtggcgatgcgtcaggccggtgtgctcaattaattagctgtatagctggagagaagcaatgaaagttttacatattgggattttcggcattgcgctggtctcgttaatcggttgcagttcggttggtttgggcaataaacgtgttgactatcgctccggcgcagctcaagcgccatcgctggaagtgccgcctgacctgacaacccccggcagggatgaacgctataaagtgccgcagggtaatggcgaaagcgtggcaactttttccgactacaacaagggtggcacgggtgcggatcgaggtcgtggcgccagtgcgatattgccggaaataaagggggcgcgcctggagcgtaatggggcgcagcgttggctggtggtgagcgataagccggagaatgtctggcctgtggtcaaggcgttcttgcaggaaagcgggctaaccatcaagagcgaagatcaagcggctggcgtgatggaaaccgactgggcagagaaccgcgccaagattccgcaggggggcattcgcggggtgattggaaaagtgttcgacaatatttattcatcgggtgagcgcgaccagtatcgtgtgcgtctggagcgcggcgccgaaaaacttttggccgggcacccgaaggacggtgcgagcaccgagatttacatcacccatcgcggcatggaagaggtgttatcggccgacggaaatacctcgaagtggcaagcgcgcgccaatgatccagaaatggaatcaatcatgttgcaacgcttgatggtgcgtttcggcgctagcgagactcaagcggccagcggtgcggtgacagccagcgagtccggcccggttgggtcagctaccctgcaagagattttcgacggcaccaagattatcgtggtgaacgatgcattcgatcgatcttggcgcagggtggggctggctatcgagcgtgcggggctgacggtggaagacaaggatcgtgtcaagggtatctacttcctgcgtccggccaaagcagaaagcggctggatggacaagctgcagttctggaagggcagccaaaacgtcaacacgcgttaccgcgtgaatgtcaaggatgacggcaaggtatgtgaagtgtccgtcactgatcaggatggcggaagcgacaatgcaagcagacagatgattgaggctatctacaaaaatatcagtcagggcgaaaccggcgcggcgtcggtttcccaacccaccgttaatgcaacaaggccggccgttaattcaacagtgcttaccgtcaatgcaacagggccggcggggacagcaagcctgcaggacattttcgacggcagcaaagtcattgtgatgaacgatatgttcgacaagtcttggcacagggtcggcctcgccatcgagcgcgcgggtttggcagtggaagccaatgaccgcgccaagggtatttatttgctgcgtccggctaaagcagaaagcggctggatggataagctgcagttctggaaagatagtgaaaacaccaatacgcgttaccgcgtgaatgtcaaagacggcggcaaggcgtgtgaagtatccgttaccgaccaggacggcgtgagcgacgacacaaccaggcagatgattgaagcggtttacaaaaacattaatccgtaggcagttatgcggtttgcttcatgaagtttgcatctctgggtagcggcagcgaaggcaacgcgctgctggttgcagtcggtcagacgaaagtattgatggactgtggctttggattgcgggataccctctcgcggctggcgcgcttgggtgtttctgcagaacagttgagcggcattgttgtcacgcatgaacacggcgaccacctcggcggtgtggcacggctggcgcgaaaattcaatctgccagtctggttcactcacggcacgctgcgcaaccagccgaaacactttgctgacattacccacctccacgaaattgatcctcatcaggtattctcaatcggcgagattgaaatcgccccctaccccgttcctcacgatgccgccgaaccggtacagttcgtgttcagtgacggcacaaagcgcttgggtgtgttgaccgataccggatgtaccacagcgtatatcgagcagaccctgaacggctgccatgcgttggtattagagtgcaatcacgataatgacatgctgatgaatggcgattacccatataacgtcaagcgtcgtgtgggtggacgcttgggacacttgaataatcaggatgccgctggcattttgagccgtctggatgtgagccgtttgcagcatctgattgctgcgcatttgagccgcaagaacaatacagcggaactggcggtaaatgccttgagtggcgtgctgaattgcgaagccagttgggtgggggtggcgacgcaggatgaggggtttgcctggcgcgaaattgcctgacgttcgacgtgagggagcttctaaaaatccacatttcatccccatccggcggataacgcctttggctcatccgccctactttactgcgcaactttatcacgttgcgatagttgcagaaattgcaaaagccgcaggagctacctgcggctttttgtttatgcaaccggatcagtgatacttgcggctcagctcatgcaccgccgcaaccagtgctgccgcatgttccggattggtatgctgtgaaataccgtggccaagattaaacacatggccgctgccgaagccgtagctgctaagcacgcgttccacctcggtatggatagcttcaggtgaggcaaacaataccgccgggtcgaggttgccttgcagtgcaactttgtgaccgacgcgctgccgcgcgctgccgatgtctacggtccaatccaggccgactgcatcgcagccagtgttggcaatgctttcgagccacaagccgccacccttggtgaatacgatggacgggatgcgcacgccatctttttccttgatcaaaccatccacaatacgatgcgtgtatgccagcgaaaattcgtggaatgccgcatgcgacaacacgccgccccacgagtcgaagatcattaccgcctgcgcaccggcttcgatctgcgcattcaggtaggcgatcaccgcctgagtggtcacttcgaggatgtggtgcatcagcttcggttcgttgtacatcaaggttttcaccttggcataatcgtcgctgccaccgccttccaccatgtagcaggacagcgtgaacgggctgccggagaagccgatcagcggcacgcggccatccagcgtcttgcggatttgcgacacggcatcggtcacatatttcagatccttgccgatgtccggcacgcgcaatgccataattgccgcttcatcgcgcaacgggcgctcgaacttcgggccctcgccatcggagaaatacagacccagccccattgcatccggcacggtgaggatgtcagagaacaggatcgcggcatccagcggaaagcgatccagcggttgcagcgtcacttcggtggcgaaatccggactcttgcacaggccaaggaagctgccggcgcgcttgcgtgactcgcgatattccggcagatagcggccagcctggcgcatcatccacagcggcgtgtagtcggtcggttggcgtaacagggcacgcaggaaggtgtcgtttttcagtttgaagttcatgttttctctttttattaaaattctgaagctacccaaactttggctgggcgagccatgtacaaaaatgggaattcgtattttcgtaggttgggcaaagcgcagcgtgcccaacgaacgaagatgccattattaatgttgggcacgctgcgctttgcccaacctacgcactaaccttctcttgtcagggagtgccgtgatgggttgggtttaacgtggtaaagcggtgctacccatcaaatactcatccacagcccgcgcgcactggcggccttcgcggatcgcccataccaccagcgactggccgcggcgcatatcgccagcggcgaacactttgtccacgctggtcttataacaacctgcgccatcggtcgtggtcttggcgttgccgcgcgtgtctttttccacaccgaatgcatccagcattttttgcgccgggctgacgaagcccatcgccagaaacaccagatcggctttcatttcaaattcgctgcccggcacttcgctcatcttgccgtccttgaattcgacgcgcaccgccttgatgccggtaagtttgccgttgttgccgaagaattcttttgtggcaatcgcccagtcgcgggcacagccctcatcatgcgagctggaggtgcgcagcttgagcggccagttcggccaggtcagtggtttgttttcctgctccggtgcgcgcggcatcacttcgatctgagtgactgaggctgcaccgtgacggtttgaggtgccgacgcaatcggagccggtatcaccgccgccgatcaccaccacatgtttacccttggcattgaccggattcttgccatcgcctgccacttccttattctgcggaatgaggaactccagcgcatagtgcacacccttcaattcacgccccggtacggataaatcacgcggcacttccgcgccacccgccagaatcacggcatcgaatttattcagcaactcttttggcacgatggtttttttcgcatcgttggtcacactcttgtccagttttttgccgataaacaccgaggtttgaaaggtcacaccctcggctttcaattgcgccatgcgccaatcgatcaggcgtttgtcgagcttgaaatcgggaatgccatagcgcagcaagccgccgatgcggctgtttttctcgaacaccgttacactatgtccggcacgcgccagttgctgcgccgcagccagtccggaagggccggagccgactaccgcaacttttttgccggtcttgtggtgagccggttgcggcagcacccagccgttctcgccgcccttgtcgatgatggcatgttcgatggatttgatgcccaccgcagcttcattgatgttcagcgtgcaggctgcttcacatggcgcagggcagatgcggctggtgacttccgggaaattgttggtggaatgcaatacctccagcgcttgcttccagttgccccggtacaccaggtcattccaatccgggatgatgttgttgaccggacagccgctgctgcaaaaagggatgccgcaatccatgcagcgcgcgccttgcgtctgtgccttttcgtccgtcaggtgcagcacaaactcatgataatttttcaggcgatcagcaaccggcaagctctcttcgctcaggcggctgaattccataaacccggtaagcttgcccatttacacggcctcccttatttgtctggcttgcagctccgcaatttcctgcaaggcgcggcgatattcggtcggcattaccttgacaaatttcggcaggtagcgcgcccagttgtcgagaataagcttggcacgcacgctgctagtgtaatgcaaatgcttctcgattttgccgcgcaacgccgccgcatcggccttgcccagatggttgagatgcacccggccatgtgcttcgacctccccggtttcgctggctgccacctcttcggggatcgcctccagttgcaccatggacatgttgcagcgcttggcaaatgtgtcatcctcatccagcacgtaagctacgccaccggacatgcccgccgcaaaattgcgcccggtctgacccagcaccaccaccatgccgccggtcatgtattcgcagccgtgatcgcccaagccttccaccaccgcgacggcgccggaattacgcaccgcgaaacgctcgcccgccacaccgcagaagtagccttcgccgctggtcgcgccgtacagcgcggtgttgccgacgatgatgttgtctgccgcattgatcgggcattccttggggggcagcaccacaatgcggcccccgcacaaacccttgccgacatagtcgttgctctcgccggacagctccagcgtaatgccatgcgcgaggaaggcgccgaagctctgccccgccgtacctttcaacttcaccgtgatggtgttggccggcaggccggcctgaccataacgctttaccacttcatgcgacagcatggtgccgacggtgcggttgacatttctgatgacactctcgatgactaccggttttttatgctccagcgcggccttggcttgcgcgatcagctggttatccagcgctttttccagcccgtgatcctgctgctcggcatggcggcgcgccacgtcggcgggcatatcaggctgatggaaaattttggagaaattcaagccttgtgccttccagtgcgtaatgccgtgcttcacatcgagcaaatcactgcggcctaccaactcatcaaccttgcgaatacccatctgcgccatgtattcgcgcaactcttcggcgacgaagaaaaagtaattcaccacgtgctccggctggccggtaaatttcttgcgcagctcggggtcatattctttcaaaaagtcctcgtaaaaatgaatgacaggatcaggtccttcaatagttttgccccataagtcatccttgaaatactgcctcatcagcgcttggacatcagcgtgggaaaaaacctcgcatagttcatttacgatatattcaagccgtttatcaaaattaggtccgacaatgtgatcaaagaagtgccgcagcagagggtttgtcctgggcaccagatcgcgggcttcctgacgtgtaaaagtctcaggtgtctgatcgtgaaatcgggcaacaaaaagtccgtaaaccagcgtttgcgcgtacatgtcagcaaaagattctaatgtcaaatcatggaccaggagctttttaatg

SEQ ID NO: 36 - DNA, 20235 bp, Artificial Sequence
  Synthetic Oligonucleotide
tactcgggcaatctcctgcccaaatacctcgcgggccttggggcagttgtccggctttccatgcaccgtggagatgccttgcttcgcgatttgaaggacggccgcagccagggtttcaatggagaactccctgtcggcgattcgaagctccagttcggctacctccgcctcgactttgttccgctcctgggccgctttgcaccactcgccgtaccagtagtgcgccgcgggatgattgattcgcacctgaaaggcaaggtcgtatgcctgctccttcgcccgcacagtctcccgctgctgcaatagaccggctaaggcgtcgacctcatgggtgatggcgccaaagagagacttggctgcgtactccgtatcttggagatagtgattcatcctgagtgccactctctcaacacgatcctcctttccgcaggggcgatgtcccagagctaacaagccttgccatcgttgccgcgaatggtagctacccgaaagtgcagtgatcttacggaaccgacccaaagccagcgcgcgtcagcggctgctcgggcgcgctcccctgtcagcttgcgccgacgcagcgctgcttccgctcctacaatcagcgatcggcgtccgcatgatgccagcgcagccgctggatcagcggtagcgactggagagatcacttcgagacacgatcgatgaacgctgcgtggattcttcaagaatctgaaatccggcgcttgttctcacgggcgacctgggtcccactccgggcgtcgctcaatgaagagaagggcaacgtgaaggaggttgggtatatcggcgatgtcttcgcttgcggctccgttgcctttccaaacaagcatcgcgaactggccgagcgattgagctggagcgacatcggcatcgggcacaccgtgagaccgtatgcatactcggatggacattactcgccgattgacgagttccaatacaacgacaaggatcctatcggggtcaaccttgttttcgagcacccacagcctgtggtgggcggtcagcaatggatcttgaatcctgacttggtagtcgcgcttcgcttgatcaaggaagggtcgaactgggtcaggccggaagaggactttgtcgtggtcgccaaggagacagttgaaagcgatggcagccattgtctgattgagatcaagcgtgaattcctgatggactatttggccgcgcgcggcctgtcccttcgcctgtcctattaccgccagcgcgtcgagaacgtggtcgacctcaaggagagcccctatgccggcctgaaggagatccaggagcagcgtgaaggtggaaggtacgagctgcgcatcaaggagctgaacgccgtattcggagggagctgggcgtcgtttcgtgtgtggcgcaccgacgtcgacaaggaggaagacgctccagtcatgggccctgagaccagcgacaacaccgcttcagagagcgccaggggccatcgaagcggctaccccggtgtgcgcgtcgagggcgagttctggcgagacgagtggatcgaacatcagggaaagagtacgcgtgtgcgcggggacgaggatcagaacctgccgcacttcattgtcgacacagacggttctcgcaggttctcggccgagctcaacaacgaagacgtcggacggtggctctggttccgaacgtccgtggtcaacgagctcttgagccatcgaggcttctcgctaaagtggtacacggctgaaaccggtgcaatcaagtccacttcggggtactcaacccatttcggtatcaacgcctcggaactcatcaccgtctacgcctacgacatcgccaagctgcccgcctgggagcagttcctctgggctgcgagcaatgtcgccccagagggcaaggtcagcgcggagctcctcgcctcgcaagtcaaggcgcagccagcggacaccaatgccgtggaggagatgctgtttgggcacatgcgtttgctggaggcccattttcgtaagacatttggtttgtcgctgttttcgcatgagattgatgatgcggcctcgatgcagcacgtctctcgcttttcgagcaaggaccaggcgtcactcttgcggctggccaaggagctcgttcgcgtcttctctgatcgactggacgtgcgctctcttcgaaagttgtccaaccaccccgagaaggacaggctgggcactaacaagttgctgcagaacatccttgcccagagggccggtgaggagcgcgcacgagaggtcttcgccgtcatcgccggcgcctacgacatgcgccttggcgacgcgcacccgactagctcgaagatcagcgaggccctcaagctcgccggcatcgacaccgcagcgtcgtatctgcgacagggagagcagctgattcgcaacttcggccacgccgtttggtgcatcgggagtctgcttttcggggaccaggggaagagcgaggaataagctgttcgccggcgggcgatccacttggcgacacagtctcaccggtgtcgcggatcgggctaactggcggtttcctggcgactcgcttcgggacgcgcatgtctgcaatgggtcgctccggtgacttcgacttcgagccggagagaaacagtcagcggagcagcactgagggcagcgacggtgacccgtggccgctgcaccatgcagggccgactctcgcgccgcctgaggccgccaagtgcagcgaccgctcggtgcccggtcagcgtgagttcggcctgcaggtacgactggcaccaaccgctgcacagccgtcatctgtcgcgacactcccgcgctcggcggcgtcgggtgaaggcgtcgcaatgcgtcgcccttgcatccccctagccaccactctccagctccgccatctccgcctccactcccgcccgcagcccctcgagccaggccgcaaaccgcgccaggtcgtagtcgccgagctcgacccgcgccgactcgcaaggccctcgcactgcttccacctcccgcgcactcgctctcaccgccgccagccacgcttcgaccagcggccccggagcggtgaacacctctggtgcgccccgtgactcgcgcgaccgtcccgcccctaaccggatcgcctctgcctgctccgccgcacgcgcgatcagctgccgcaggtaaggcgccgcactgtgggccgcgcagtagctgccgccatcgcccctttgcagccgcacgctcggcgcggcgcacacccggcaggtcagccaggcctggcggttggccttgcgcagcatgcccttgaccacctcatcgcgcgccaccagcggcgcgagcacgtcgaagggatcgaacagcgggttctcctgcacccgcagtcgactgcggcggtcgcaggccacggtggtcagcgtggcgcgcagccgcagcgcgatcggccgccaccccggcgggatgcggcccggctcggccaggcaacacagcagccaggcgcgcgcatcgacggccgcgtccggggggtgccgcttcgggctcgcgcccgggtgccgggcggaagcgtgagccgcgctggtctgggacagatctgactccgtggtgtgcatgttgtgctcccgtaaagcctgctactggccgaccaccgacgcgaccgccgatgcgacggtcgactttgctcccgaccgcgccagccgtgccgtgaatcccacgcgctgcagctggtagccctcgtcgtccgccgcgacctccgtcaccgaccccaggtcggccaccgccaggacccgccggcctgcgcgcgccgcgcgcccgaacgccgactccagccgcttgcgttgcgtccgcggcgcgtcttcgcacagggcctcggccaccgcgtctggcaggcgcggcgcgaagctcgccccccaggccgctgccgcacgcaggtccgcgtagacatgctgcgcaatgcgccgcgcctcgatggccgtcgggtagcgcaccgcaacctcgacgaagcgcgagcgcagcgctggctcgatgcgctcgacgtagttggcggtggcgagccacgcgatgtggctcgcatcgatcggcacctccacgaactcgtccgcaaagcgccgggcggtgcgcgactcgagcagggcatacagcggcccgatggggctccaccgcgggtcggtagaggccttgtcgatctcgtcgagcaccaccagcggattggcgtacgcctcgggctcgcaggtcaggtgcgcatggatgcgtccgggccgcgccgtcgaccagcccgtggacaggcccgacagatcgaagctcgatgaggccgacgccatcgggatgaagaggtggctggttcccaccgcgtgggccagatccaccgcgaaggtcgtcttgccggtgccgggcgggccgaccagcacgcagggcgggaaggcgaaggcgggctcggggctcagccgggcgaggtgggcctggtcgatcagcggctcgatcaccgcctcgaagtgtggatggcggtcgagcagggcacgtagcgccgcaggatcaggggcgggcgccagggggcggaagcggcccacggcctgcatcgcctcgagcgtggccaagagcgtgtcgcgcgtgtcgcgcggcaggctggacagcgcggcctggcgggcgtgccaggcggcggcggcgtagagctcggccgaggcttgggacgcaagcggcccaaccttgggcggcgcaccggccaggcgcgaggccagggcggcggcgtggcgcaccacttgagcgtgtgcgtacgaggggcgggcagggcgctgggacatggcggcctccccttacttcaagcgacgcagcttctgatagaacttctcgcgccgcgtccagacctcgggcgcgtggcctagcgggccggggtgcacgcgcacgtcgcactcctcgaggtagcgcaacagcatgcgggcctcgggcagcttcaaccgcaggtgcggcagcaccttgcgcagcgcggcgccggcgtgccggccgtcccacaccagggtgtagggctggcggttctggatctcggtgcggcgcaccttgaccagctgcgccggctcgcccagcacctcgcggatgtgctcgaggatctcgcggttgctctgcgccaccgtgagccgcgcgcggtacgagagggtggtgtagccccggcgccgctgccgggcgatgtggatgcagccttcgccgtcgatgaagccggcggcgtaggcgagggcgaggtccgtgtcgcaggaatcggcaggctcccgggcggcaccctggcctgatggggggctgccggcatatgatgctgcttcgtgcttgtagctcatttcggtctcctagctggtggaaatgatcagctagcggatagtctaaatgaccaaaatggttagctacaagatcattatgattatgatgttgcgcttgcgcgacgcttgcgcgacgcttgaagacagggtgaacccgtgatccgcatccatctctcgcgcctgatgggcgagcacaaggaaaagatcgccgacgtgcagcgcgagacgggtctcgcgcgcaacacgctgtcggggctttatcaggagaccaccacgcgcctcgacctggcgacgctcgacgcgctgtgcgctcactacgagtgccgcattgccgatctcttggagtacgtgccggacgtacccgagaagtagtcgcccgtcctcgagggctcatcccctgagccccgctgcacgcaccctgtgcgcgtggaactcaacttcttcaccccctggcccatccgcaccggcgcgcgtgcgaagggctgcttcacctgcgagcacttccacggcgacctgtcgggtgggcatgtggtgtgcaggcgtaacgaccgcacgaccctgatcggggtgccgcgcgagggctgcgcctactggtgccgggccattggctcggacgacgagtgagcccgcaagtgtcccgtcaaggggaatcttcacgctccgcgagtgggcgtagatcaagtcccgcctgcgtaatgcgcgccaagatcaatggtgaatccgagcggccagcgcctcggggctgacctcgcatccctcacgcctgacgacccccatgtcgacccaacgccttcaggtcacggcacatctcgcctcgcccctggtcacctcgggcgcgggtttcatgaccctcgacggcctgcttgccgctctgatcttcgacaccaccggcagcatcgaacgcgcccatgccgaggtgcccatcgtctgcactgacgggctctaccacgccagcggggccgtgctcgagcctaccgacaccgggcgcatctgcttcgttgcccaattgcggcccgcgcacggcatcgaccccgagctgatcctcaagaacaagcacggccagctgcaccgcaaattcgacaccagcctcaccaacgtgatgaacacctacccggtgatcaccgcgccggtcgtcacctggtactgcgagggcgacggcgagcaaattgaggctctgctgcgcccagttaccttcatcggaaagcgccgtgcctccgggttcgggtgcgtgtcgcgctgggaagtggagcccggcgaactcgacggcctgaccggctacgccgacgagccgctgcgccccgtgcccgtggaccgcttcacgggcgaccgctcggccgtgatcgaggatgccgcctggcgccctgcctactgggacgcgcgcaaccgcgctgcctgcttcgtgccgggccggggctgaccatgctgcgcttcttcaatcagaacttctcgcgccatctggtcgaactcaccggcgacgaggtggccgacgccaccgccgccctgagccgcgcgcacccgcttgccaagggcggcacctcgcgtttctcgtcgggctgggccgttgtcactgagcagggcgccaccgtgcaactcaagctcgccgcgcccggcctgcgctacgccgaccagacccgctacgaggccttcctcgccgcgctgcgcgccttcgacggccgcccgatcatgctgctcgagttcgacaagcgccccgtgccggtggccaacctgcaccgcaccttcgacctgcgcgccgtgcgcgtgtgctcgcccaagggcgtcgagaccttcgacttcacccggccgccgcagcccaagggcggcaccaagtcgcagcgcaacctctggaaggcgcaagggggccgctgatgcacgactacctcctgcccaagccccccggcaccactggctacgccctgcaccgcctggtggcgggcctgctcgacggggcgccctgcctgttcgccgacaagggcgaccacctcgtgctgcgcgcggaccgcccgtttgacggcctggccgcgcggcccgttcgcgaggtggccacgggcgacatcctcgccttcagcctgcgcgcctgcgtgggcgccaaggtacgcgggcgccaccgctacttccccacgcaggactggcgcgcccgccatgaatggctcgggcgccagggcgagctacacggcttcagcctgatcaccgtccactgctcggccagcatcgcccgcatcgacaaaggcgaaaagatgttcaccgtggacgacacccagttcgacggcgtgctcaaggtcaccgacgcggcgcggttcgaggccgcgctgcgcaccggcatcggcaacaagggcaaggccttcggcttcggcctgctgctcgtctgacaccgcatccctcacgaaagcgaccaccatgaacaagcacaccctgatcatcgaggccacgctgcgcaccgtcggcccgctgtcgatccgcctgccggtggccgagggcgccgccgagaaccgctgggcaaacttcccggtgctcacgcgcggcctggacgacgaggggaacccgctgcagaccggctacctgcccgccaccacggtgcgtggcttcctgcgccgcgccatcgtgaccgacgccatggagcgcgccgccgccgagggcaggccctacaccctgcagcgcgcctacgccgatctgatcggccaggacgccgcgagcgagaagtccgaggacgtggacctcgtgaagcttgccgcgcagcgcgacgccgagccggtggccgacctctttggcctgggcatgacgctcaagtcccggctcttcgtcagccacttcctgccgcgggtgaacgtactgcccgaggtcacctcgggcgtgcgcaaggacctcgaagacaccgagggcgtgctcgacgcactgagcgcggcggaccgcgacctgtatctcggccgctcggccgccaacagcgagcgcgccgccgccgctgcggtggtgaccgacctgcgccgcaagctcaagaaggccgagcgcgcgggcgaggacaccgccgacctggccgccgccctcaaggccgccgaggagcgcgtcgccggcttcgaggaccgcatgggcgagatgaagaactcctcgcgcacgctgaccagctacttcgccctgcccgcggggctcgatctgcttggccgcctggtgatcgagcgtgcacgcgagcgcgacttgccgatgattgaactcgcgctcgatgccctgagccgccgcccgctgctgggcgcgcaggtggcgcgcggctgcggcgaggtggcaggcagctttgacgtgctgcgcgacggcgtgctgatccggcgcatcagcgtgggcggctggaagccggcgcagatgaccgagttcgccgctgcggcgtgaggaaaattgcgacttcttgcgggcgcgaagagccgattgcgctaggcaatcagaggcttgcagcgcctcgggtcaagccacccctcgtttgggtggctactggaactccctgcaaaggactcccgcatcatggacaggtcaagccacccctcgtttgggtggctactggaacaacttctggaaacgaacggacacgttgcggggtcaagccacccctcgtttgggtggctactggaaccggatgccgaaggtccaagtgcccgccgccggtcaagccacctcgttcgggtggctactggaactcgccgcgtcttgctgcctgccgtctctggggtcaagccacccctcgtttgggtggctactggaacgacgccgaggtgcagtccctcatcctcaccggtcaagccacccctcgtttgggtggctactggaacaagctggctagcgaggaatggttgaagaacggtcaagccacccctcgtttgggtggctactggaaccgcgagcggatcgtccacggttcggcagcgggtcaagccacccctcgtttgggtggctactggaaccagttattgaagcgggtccgtggctcgcgcaatcaagccacctctcgtttaggtggctactggaactccatcaggccgacgtgcgtgaccgtgcccgatcaagccacccctcgtttgggtggctactggaactcgtcggcgagaatgacggtgatgctgttgagtcaagccacccctcgtttgggtggctactggaactacctgcaagaccgcaccgaggccccggccagtcaagccacccctcgtttgggtggctactggaactgggcgtactgaaacgcctcttgcgcctcgggtcaagccacccctcgtttgggtggctactggaacgacaagctcgccgccgccgctgaagcgcagggtcaagccacccctcgtttgggtggttactggaactgcacgatgcgttgccgctgctcttgctcgggtcaagccacccctcgtttgggtggctacttgaagttcgcttcggcgtcttcgtcggaggcatccgctcaagccacccctcgtttgggtggctactggaacgaggccaacgaactcatgcgtcacgtcgagggtcaagccacccctcgtttgggtggctactggaagaagggcgtcaactggttgcgccgcgcgaccgcctaagccaccgcattggtgcgtggctactgtgcacgtccggcttgctaacaggtgttagcaagtccgaaggcatcgctaggacgacgcccccgtgggcgcaccgcgcggtgatcactggccagccctacaacggccggcatgatcgggtagcgcaggacgctgcgcgatcaagggcaaggagactgggcatccgtgtttcgcaccactgagcaggccaacttcgcaaacgtgatggcggcgcatctgcccgcgcccgatgcacccctgctgctcgaagggggcgtgggcatcggcaagacgcgcgcctacctgcacgctgccgtgcagtcgggccagcggattgcggtcgtcgtgcccacgcaccagctcatcgaccagttgctcgcctcggccgacctgacagccgtgcgcggcgaggccacagtggcggccttccggccggcgcggatgttcgagcggcggcgcgagtacgaagagcagcgcgaggccgccgcccacgcgcagatcatggtgtgcacggcggcctcggtggtgatcgatcagcgcctcgccggcgaatacaacggctcgaccaccgcgcgcgactacctgatcttcgacgaggccgaccagttgcccgacatggcggcgctgcagtcggatctggcaatcagtcgcgccgacctcgacgccgccggcatccgctttaccacggtggaagacacactgcgccgcctggccgacaaggcgccgcgcaccgtcgagcccgaggtgcgcgccgcggcgcgcgtgatgatcgaggttctggccgagcctcgctggttccagaaggtggggctggacgaggacggcgccatcgtgctcacgcacaagctgccgggtcgcctgctcaagaaggtggccaaccggccgggcgtggcctttgtgtcggccacgctcacggtggcgggtcgcttcgacgacttccgcaacaccatgggcatcgggccgatctcgcggctctcgacggtgatcgagccgcagcagcacgggcgcctgagctttcgcatcgatccgcagaccgtggacacgcccgagtggatcgaggccacggtggcggccatcaaggcggcaccgcggccctgcctggtggcgaccaccagccacgacctgtcggcacggctaggggagagggtgcccggcgccatcgtgcgcgacgccgatgttcccgcccgcaccgccgccgagcaggccgagggcggggtgctgatcagcgccggcgcctgggcggggctggatacgccaacccgctggcgggccatcgtcgtgccgcgcgtgccctacggccagccggtggtcatcgatgggcagatcgagtcaagctacctcgacgcccgcaacaccgccgtgcgccggctaaggcaggtgatcggccgcggactgcgcacccccgatgcggtgtgcgaggtcaccctgctcgacgcgcgcgccgagcgcctgcccgagttcgtgccggtgcggttccgggcggcgtggagcactagagtgttcattgagggcgctcgcactgaggtcatgctcagcaaggccgagcgtgacccggcactgcgtcgggccgcgctgagtcggtacggccaccgttgtcaggcctgcagtttcgttcccaccgttctgggacagcttgacgtgcaccacaagagtcccatcaaggagggggaacgcaagacgcgccttgaggatgtggctgtgctgtgcgccaactgccaccggctggcgcatgctgaggatccccctgttccggtcgagaggcttgccgagttgacgcgagacacgcgctagcggtgtgtgctcgttaggcttggctggcaagagccgtgccttagagaaagctcgcttgaccaagtggagtcatggttgggcgccttggtctcggccagcctcggctagatcccatcgaacactcacctgaagtgctctcagagatgaatgaacttgacctgcaaggcgctgattcgaaggttggtgacaccgaagaagcgcgaggaatcgaactgcgctttgaggccgacccgacagtcaattacgcatcagtgcagaacagtgtcccgatcggcaggcgcctggatatccagaacaagaccgaccacgccgcggtgaacgtcttggtgaccgtgaagccggccacaccattcgcgcaatcaaaaaagttcctgttcgagcaccttgcccctggggagacgcggcgcgtagatgtcgtcaaccttccgccggagccggcttatctcgctgcgctcgtggacgcagagcgctcccacatcgattgcgtggcaaccgaaggggagggcggacggacgctcgcgaccgcgcgagtcgatgtggacgtgctcgctgccaatcagtgggcaggcctgcgcgccttgccgtctctgctggcggccttcagccagccgaacattcctctcatcgagggcatcctgcgggatgcgtccgagcggctaaggaaagtgagcagcggcgcgtccctgaacgcctaccagtcgagtaaccgggaggccgtctggctgcagttgtcggccatctactccgctgtcgccgcgctcgacgtccagtacagccaggcgccggccagcttcgaggccgaagggcagaaaatccgcggcagcgagcagatcctgcaaagccgactagccaactgcctggacctgagcatgctgctcgcagcatgcctggagcaagccgggctgcacccggtggtgctgctgagcaagggccacgcgtggctggggtgctggctgaccgatacctacttcgccacgaccgttgtcgatgacgctcaggcggtccgcaagcggatagacactggggagttcattaccttcgagtgcaccggcgtcacgactcagcccaagctccggctcaagacggcggtgaacaagggcgccgagaacctcgccagcgaggagtttggctacgccatcgacgttcgacgctgcagggaggagcaggttcgtcccctgccttcccgctcggaattcttgcagtccgtgactgccaatgtcgacaccgaggaactggaggtcgagcctgctcccgcgctgccgccactagaggtcggtgaaccgattgtcattggagacgacacgccgcaggggcgcctggcgcgttggaaggcgaagctcctggacatgacgctgcgcaatcgcctgctgaacttcaagaaatcaaagagcaatctggaacttgtcgttcacgacgttgcggcgctcgaggatcgcctagctagcgggaaagagttgagcttcaagccctacccgaaggtgatggagggcgccgacccgcgcgatgcgaccgtctatgccagtcgacacggcgcggaggcaatcgccaatttcgtgcgtgacgctcttgacaagggcgagttggtcacgcgagcttccgaggagaagttcgagaaccaactgctggatctgtttcgggcggccagaaccgggatcgaggagagcggcgcgaacgcgcttcacctggcgatcggcatgctgcagtggacggagaccgacacggcggagcgaaagctcatggcaccgatactgatgttgcctgtgagcttgactcggtcctcggtgcgttctggcttcaagctcggcagcactgacgacgagccgttcatcaatccgaccttgctgcagttactggccgagcagttcgacattcggatcgatgtggcgaggttgctgcctcaagacgccgcaggaatcgacgtggagcgcgtcctgcaggcgtttcgcctggccatcagggagtacaagggctgggaggtcaaggccgaggttcaccttggcatgttctcgttcgctaagttcgtgatgtggcgggacttggagtcgcgcttggatgacctgaccaggaatcgggtggtcaagcacctgctgcacactcccggccaagaattcgcgggagagcgcgcagacatcacagagaccgatctggacgacaggttttcacctagccagatccttgcacccttgctcgcggactcgtcccagctggcggccctcgccaaggcaggggcagggatggatctcgtcatcatcggccctcccggctgcggcaagacccaggttctggccaacgcagtggcacatctcatcgcggagggtaagaaggttctggtgtgctccgagaaggcggctgcactcgaagttcttcagaggcgcctggtacagatcggcctggggccctttgtgctcgaactccactcgtcgaaggccaacaaggttggcgtgctgaagcagcttgaggaggcgctccatcaagccgggcagcttccgacggaccgctggcaggccgaggctgaacacttggcgggactgcgcgacactctcaacggcgttgtcagggcactgcacaagcgccgtcgctcgggactgacagtgttcgaggcgaccgggactgtggttgctgccggtcagcgcaagccctcgcagttcgactggcctgatgccgagatgcatgacgcggtggggttcgcgcaccttcgcgagtgcgccaagcgcgcccaggcggtggcctgtgcattaccgacaatcaaggatcacgcgctcagccaggtctacgcggcggagtggtcgttcgcgtggcaagacgacctactgcaatcagcacagcgtctgatgcgcctcgctgccgacctcgaagtcgctgcgggacccgtgttcaggacggtcggcctgccagagaagggcggttctttggccaactacctggcgctggatcgtctggctgacgtcttgctcgacgcgaccggcgtccccggcccagtcgcccgggcaggacacaaccctgacatcacgcgaaggctcgagagtctccaaaggcacggtgcgcttcggcaggaggccgccgggaaattggcgaccggctacaagccttcgattgaagggctgagtgctgaggacatcgcgcaacggtggcgcacggctagcgcgaagtggatcgtcccgcggaggcttgctcagcgcgccgttctccgggagctgcagccgcatcgccaggatggcgaggttccaacggctggcgaagtgcccggactgatcgatgccctcggaatcctcaacaccgaagacgccgagatccgcaccctttccgccgggcaggagagtgtgctcggggccgcgtggcctagcgtaaatgagcggctcgataccctgggacggtgcgcggcgtggagccaacgctatcgggaggcgctcgcacagctcgtggatgcgagccgatcggttgacgacatggccgcccgcctccagatcctggtgggcgaacagcagcacctattgaaggtggacgcggttgtcggtcagcagctggtccgcgtgcgcgaactgatggtcgccttgagcgcggaacttgagcgcgcccggaaactttctcaaaacacggacttcgcaggcgggccacacagcgcgggatttctggttcgcctggcagcgaccgcacaacactggcttggatcggcgcgcgacctgaaggattggtgcagttggcgacgggctcgtgccgacgcgatctcggcaggattggcgcccctggtggcggacatcgaggaggggaacattgcggttggatcgatagtcgagcacttcgacttcagctatcagctttggtggctcaagcgaacggtcgacagcgatccagttctgcgcaccttctccagcgctgaccatgccaggaagattgaggagttccgatcggtggacagggcctttcaggacctgacgcgggactacatcaaagccaaggtcgcagcgaacatcccggagcaacgcagcctacagcccgccagcgagtctgagatgggtaggctgcgccgggagctacagaagcagcggggtcatcaatcgatccgtcgcttgatcgagggaatgccgacccttctgactcggctgaagccgtgcgtgctgatgtcgcccctctcggtggccacctttctcgatacggcgaacacgatgttcgacgtggtgctgttcgatgaggcgagccagatcccggcttgggacgcggtcggagccattgctcgcgcgcgtcaggccgtcgttgtcggcgatcccaagcagttgcctcccacgaacttcttccagaaggtcgacgagcttgacgacgctgccgaggaagctggggtggtggcggatctggagagcatcctcgacgagtgtctaggcgcgggcctgccatcggtggatctgcggtggcactaccggagccgccacgaggccctgatggccttctcgaatgcccgctactacgacaatggcctgatcacttttccttccaatacgactgaggaccgatcggtcgaactcaggcgggtggcgggcgtctacgaccgcgggggcagcaggacaaaccgcatcgaggccgacgccgtcgtcagcgagatcgaggcccactatctcaaccccgcgcagcgcgaactatccgtgggcgtggtgaccttcaatcagccgcagcaacggctgattgagcagttgctggacgcgcgtcgtcgagcgaagccggaactcgatgtggccatcgcggagtgcgctttcgagcccttgttcatcaagaatctcgagaacgtgcagggggacgagcgggatcggatgctcttctcgatctgctacggaagggaccagaccggccggatgacgatgaacttcggcccgctcaacctggagggcgggcatcggcgtctgaacgttgccatcacgcgggcgcgagagcaggtcatggtgttttcttcggtgacttccgaggacatcgatccgggccgggtgagcgcgcgtggggtcctggacctgaagacttatctcgactttgccgcgaagggccaccgcgccctggcgacggagtctctcccgaccggtcgcgagcccgacagccccttcgaggtcgccgttatccaacgacttcgagatcgcggctggacggtgcattcgcaagtaggggcttccggctaccggatcgacatcggcgtggtgcatcccggtgcgcctggccgatacctgctcggtgtggagtgcgatggcgcgatgtatcactcagcggctacggcccgggaccgcgaccgcttgcggcagatggtgctggaggggctgggctggaagctgcaccgtatctggagctcggactggtggcacgacgctgaagctcagacggccaagctcatcgatcggcttaatgcgttgctgcgagatgaagaggcaggtgggggggctgagggcgtgcccgccggaggtggcgaggaggatggacggagccactctcgcgagaggttcgagcgtcaggcgactattgagaccacggtcgagccgaccggcaaggccggcaagccgcggtacggcgggacgagtgtgcggcctccggtctacttccgtatcgacatcaagggtgggaagcccgaggccttctacgagtacggcgacgacgatcggattcgccgcgcaatcgagcaaattgtcgagtccgaggcgccggtgcagacaacggcggtttttcgccgtgtcgcccgggcttggggactggagcggacaggggccaggattgtcgaaaatctggagcgcctgtcccggggaatgaaggccacgggaaagggcgagcgccgattcctttggcgtcaggacgatgatccgagtgcttggagcgactttagagttgccggagacgatgaggactctaagcgtcgacccgaggaggtctgcgacgaagagatccagaacatcgccgcgtacttgttgcatcactccggctctatgcccttcgacgatcttgctcgggaagttgcccggcaggtcggcatcgggcgagcctccaaagactgggtgcagatggtccgagtcgcttgtggagccaagcgaacggcgcatgtgatcgaggtgcgcaacgaaggcgcctatctggtgtcctgatttgtcattgagagggaacttagctatgcacgagatcatctgcccgcactgcaggaaggccttcaagattgacgaggcagggtatgccgacatcctcaaacaggttcgcgacggcgagttcgaacagcagttgcacgaccgcctcgagctcgccgagagggacaagcagagtgccgtcgagctagcaaagatcaaggtggccagtgagttgcagagatctgcagctgctaaggacgccgagattcaggaactaaaggccaggctcgatgccggcgcggtcgcgcggaagctggccgtggccgaggcccttagcgtcgtggaaagagagcgtgacgagctcgccaatgaactcaagcaggccaggcacgacaagcaagccgctgcccagctggcggacgcgaaacttgtcaacgagctgcagcgagccgcttcagcgaaggacgcggagattcaggacctgaaggcgagactcgacgcgggcgatgttgcacgcaagctggcggtctcagaggcggtcagcgcagtggagaaggagcgtgacgagctgaagaatggcttggagcgagtgagtcttgagaagcagctcgccgagaaatcgctgaaggacaagtatgagacgcagatcagggatcgcgacgaagcgatcgaacggcttcgagacatgaaggcgcgtctgtcgaccaagatggtcggagagaccctcgagcagcactgcgagaccgagttcaaccgcattcgggcgactgcatttccgagggcgtacttcgagaaggacaacgacgcccgtagcggcagcaagggcgacttcatattccgagactcggatgaagcaggcaccgaggtggtctcgatcatgttcgagatgaagaacgagagcgacgagacggcgaccaagaagaggaacgaggactttcttaaggaactcgacaaagaccgggttgagaagggctgcgaatacgccgtgctcgtttcactccttgagccagacagcgatctctacaacactgggatcgtcgatgtctcacatcgccatccaaagatgtacgtcgttcgaccgcaattcttcattcagatcatcacgctgctgcgcaacgccgcgcagaacgcgctgaagtacaagagagagctcgcgctggtcaaggcgcagaacgtcgacatcacgaacttcgagagcgagctcgagacgtttaagtctgctttcgcgaaaaacttcgacctcgcctcaagaaaattcgcaacggcgatcgaggagatcgacaaatcgatcgatcacctgcagaagactaaggacgccctgctcggaacggaccgaaaccttcggctcgcgaatgacaaggcgcaggacgtgacgatcaagaagttgacgcgcggcaatgcgacgatggcaaccaagttcgccgatctgaaaaagcatgggtccagcgacgcagggtgaggcaaccgagcgcggccgcttcgggggcgatgcagatctacaccaactcatgtcgctcgggagctcacttcgaggctccaacgtcgtccaatgcctagggaagtgtcagtgcacgagagaagtggtgctggcgcgacccccaaactgggaccggatcgcagaagaatccggcggggatcgcggcgccgaacgactccttgacaccgctcaacgtgaactagccgggccgcggtcgccgacggcaaccgctgcgggcggtgtcactccttaagcgcgcgtgacgagcacggtgtgcgatgggagtgtcacgacgcgagcgccccgaggcgttctacgcggatccacggctgcactaggcaacgaagggtcgtgcccacagagacctcgagtgtgggtgccagccgcctctctgcgaatgggacgcgtgtcggtccggggtccgccggttagcggcgattcagtggagcgactccacaaatagacgctgggagctgctacggccctcaggtgcgcggttgcccggcgagggcgagagtcgccatctcgtcgccaagtgcagcctaaaagcgacaagggtcagcggttgctagctcgctgacccttggaatcttggctccccgacctggactcgaaccagggacctgcggattaacagtccgtcgctctaccgactgagctatcggggaaagaggcgggagtatatcggcgcaggcagggcctcgcaaattgggcgcgactcgcgtcgcctcacagcaccttggcgatcgaggcggcgacgtggtccaggttgcgcgcgttgatcgcggccacgcaaatgcggccgctcgacacggcgtagacgccgaactcctcgcgcagccggtcgacctgcggtgcggtaagacccgagtagctgaacatgccgcgctggcgctcgatgaacgagaagtcgcgcgtcacgccgtgggccttgaggcattcgatcaggccgtggcgcatcagcttgatgcggccgcgcatctcgccgagttcggcctcccaggtggcgcgggctgccgcgtcggtgagcacggcggcgacgaccttgccgccatgggtgggcgggttggagta

SEQ ID NO: 37 - DNA, 20235 bp, Artificial Sequence; identical to SEQ ID NO: 36
  Synthetic Oligonucleotide

SEQ ID NO: 38 - DNA, 20038 bp, Artificial Sequence
  Synthetic Oligonucleotide
gtggtcggatcgcccgaccagccacctgctgcgcgcgactgaagcagcacttgggcccgcgtgcatgagcgcgccctctccctctcacatcacaacgccacttccgagcgcgcgtcctgctgagcgcccggacaggacttcgggcaagaggttgtgattgcagcctctcaattcggatagcacgcgtcgattccgatgcggcaatgaaaaaagcaccagctgctttcgcatctggtgcttgttccattcttaattttggtgggccctgagtgactcgaacactcgacctacggattaagagtcctcatgttttagtattcgcctctgttgatgcacgttgatgcatgttgataaaatcattatcaatcaacaacttacaagttataggcaagcaaaagctcagcaacttggttgatgttcatttgcaaaaatagcgctgttctggctacatggtggctacatggcatagaatttggctacatcacagcgcccaccccaggcaaataggtagcaaatggcaagacccaagaaggatgcaaccctggacctcacgcaggccattgaactgaccgcaggcgcaatcgagcgactttcatgcccaccggggaagagccaggcattcttgcgagacagcaaatctccgggcttgcgggtcagggtgaccagcaatggcgcgaagtcctttgtctttgaaggcaagttgaaccgcaaaacgatccgacgcacgattggagacattcgtgcgtggcccattgaagcggcccggaccgaggccaacaagctgcgcgtcaccctggatggaggccttgaccctcgggaaattgagcgtcaagctgaagttgaacgagtgcaagccgccatggcagcgaaagaatcagaccggctggcgaacctgacggtcgcacaagcttgggcaacttacctatccgagcgcaaacctcactggggggatcgccactacgcagaccacatcgcccttacacatgaaggtgggctgaaacgagcccggatgcccggatgcctgaccaaaccagggccattggcaccccttatgaatcttcggctgagtcagctgaacagcgccgtagtggaggcatgggcagcaaaagaagcagccgaccgacccactcggaccaggctgtcactccgtcttctcaaggcttttttgagctgggctgaatcagaaactgacttcaaagctgctgtggacggaaacgcggcagccgggaaaagaacccgtgaggccgtggggcgtgcgaagcccaaaaatgacgtactggaacgcggtcagttgtctgcgtggtttgagcatgtacggaacttgcccaacccggtgacctcagcctatctacaaacgctacttctcactggagcacgacccggtgaggttctgggtttgcgctgggatgaccttgacccgcaatggatgagcatgttcatcggggacaaggtcgaggacgggcgcacgcttcccctgacaccctacgtgtggcatttgctgagcaacctgccccgtcgcaatgaatgggttttccctggcggacgcgccctggtgatgagcccagaaggcatccaacgcagacagcgtcgccagcgcaaactctcagcagaaggattgcctcacgacaccccccctgccccaccaagcagcgcaagcgggcgactgatcgaaccacgcagcgcacacaaaaaggcttgcaaagcggccggcatacaggggctcacactgcacggcctacgccgatccttttccaccctaactgaatggctggaaattcctgctggggtggttgcacaacttcaaggccacaaaccgagcgcaacggcagagaaacactacaaacggcgccccctggacctgctgcgagtacatcatgagcgaattgaagcttggatactggatcaagcaggggtgaccttcatggcaaaggccctgccaaattgccagccccacgcgacctgagcaaaaggcacacaacccagagcgcccgacccttctggcgaacaaactctcgctagggcgcaaacacaaagagcgcacgatttttaaaagccgcccaaaccaaggattttgataaagacggaccaggttgccgagacttgcaaagcgcgccagacccatgcagcgagtttgcttcaggcaaggcaagccaagccaaacgcggagaccgccaatccaagcactgcgacgcaaggatgaggcgactgcgaacctgggccgacaagcgcatcgcaaatgcggcaccattccagacagcagacaccgccccgaggaagtctggcgttagacataaaagtagtcaaattttaggccatgcagagccatgtgccgccactgcatcgactgagtaagaagtgcacttcggcgacataacgtgagcctggccaacgcatgcaaagcacgggttccagtccgaaagctagccatccccgccgcccaagaattgatagcgggcacttcgaacctcccaaccaaaggagcacaggttgacgagatgccgcgcaaaacaacaggcgttgaattttggcgagtagacagcccttgttgaaagaacccaaaggcacaattggcacgtaaaccacgagctacgcaccattggacccgccagcccaagccgttagcccgggacctcttaaggaccaccttaaaggcacatagcgcttcaacttttcagtgccgacatacgaggtggccctgaatcaccggtttccgggaccgatgcgaacgcatccgggtggcacggaccatctgattcaggagccacatacagtgtaagttacatctggccgccgatccaacgaagctccgccagctgcgcattcatcgccccctcaccgagcagccccaaaaagccaacttagctgcatcgagcacacggcccgtgcagccatcgaacgatggcctgctcaagaatcagggtaaacctgacgctgaatcagagctgaccgacccatgaagatgtatctgatcacttacatttacgggcaccggtccaattgcgcgttagacgcagactagacggtgcacatagggaggaaaaatgttcggacttttcaagtcaagggttgtgaaaaaatccttcgaaagcacactgcgcgcggtgctgtcaaggccaaggtatttgcagatgccaattgcaatgcaagtaatcgatgaactcagagcttttcagaactgcacaacgcgcgagagcattcaagtcctttcgcttggggccaaggaccgccgccatgcggccgtgagaagcggcgcaactgatgaaggcgactcccggtacgcaccacatgccttgcttgagtcgctttacctcgcagcattggtcgaacaagaatccctgccgcacatccaggggaccctcattcggtgggccagtgacctcggatttacgctgaacccgtctcaaacaaaccaaagcactgcaagttcttctgaaactgcttatgcccaagcagtcgaagagtacgcggctatttttgatagcaccctatcactgctgcaaacccatggagagcttgcacaggtagaggctggcaagcatatcaacattgccaactcagcattgctggcgaagtttggcaatgcagcgcagttcaagtcttcttctgaagaagcacaactcaaatttctaaagagtcttgcatccgtgtcagaaaagctaggcgccaaatcacccggtggcttggcatacctattatttgccacgtggctgaccgttctctgcacaggcaatcagcaatacgggcgcatctacgaggacaagctcgccgtgctttccaagtcagcgctcagcgcctgagtcagtcgcctgcgggaaatttccttgccatccccaaccacttgtttggcgctctacgacaagctcgcgcaccgacaaagtacttacaaaacgacatgtctcaatcaaacgaccacattcaaatgaagtgcatcgctgtcggcgcggttctcgcgttaccagttgcagttattgcagccggtgaacacggcagcgtcaagcttgcctacttcgtgtggtgggcgatcatcagcggggccgcatacttcctgctgaaaaagccaaaggggtgacctgaagccatcagtcacgaaccaaggcaaacagcttttcgtggcttaggccgacctttagtagccatagttgcatctggcccgagcgagcggctcctgaaactacctgactctgcaaaaactgccttggtgagtgccaaaaccttgatttttggttagcaaccactcacaattcatcaggcaactcgggctgaaccgccaccgacagtggccccctctcgccttgccagcccgcagccaagaaacttggaactgcagtcggttcacaggccggctttacccttccaggccccacaaactgccctggtcaacagttcaacgttgacttgcgattggacggccccaacgtatcaggggcgggtgccacccaggcccctagcctctctctgctgagcccgatgagacccagccgcatggcccgttgagcctggatgacgccaacgtttagtccacctgaaaaacgcaatgcgctcaggctggaacaccacattactccccttggggcatctaacggggcggaggtgcccatagctggcctgcgctgaggcaatcaagcgccggcttcaggttcgatccgcgcaagaaacgaaattgcccgcctccgctggtgtcgggcgcgttgctgcctcccacgcttcccatgtggagtcagaaacctccaagccttggattccctccctaggccgctgaaacaaggcgccggttgcgctgatcagccgtttgagcgctacctgggcatatgaatttgctggaagctggtattcagtttgagggcgcatgctgaactcctttggtagacagagtttcggcgccaggccacctgattcccatcacacgaaggagggccctccttgtggggatacgcgccaggcagcctgtgtaattgcaacctcagtagagctcccaccggccggctccaacacctgtcgcccgccacaggtcttgttgcagcgaaagttccaagacatgcggtgaagatttggaaattcgggaatcgaaatcagagggggacggtttcgacaccccacacccctctcatgagcagcgccccggtagacctaaacctgcgtctattcacgcgcagtttctgagcaaatttggcgttcgggtagctctgggggcaactgactgggtgcccctacagccgcacgttttgcaaagaagcagtggccgctcgtccacgttggacctcgtcgcgacgatgtaaggcgtagctacttgctgagcttcctgcatggacaaggccacttcgccactcgcgacctgggtggactaccaaggctacccgtcttaacggcttgttactatggtccgcgttcaacgaccaattactgggaggtaggctttggacaagattagggtgactgctcaccttggtgcgcctgtcgtcacaggtggtggatacatgacgctcgatgcgttgttgggagccattctgtttgacgagctgcaggatgtagacgctgcacatgcagccattcccgtgaagtgcacagcggggcttttccacgccagcgcggccatcatcgaaccgattcaaaaagaccgggtggctttcatcgccgcacttcgccctcagcactccattgaccccgacttgatcctcaagaacaagaagggcgggcttcatcggaaatttgataacgccttcaccaatgtgctgaatgcgtatcccatgctgacagcgccggcactcacctggtacgtggaaggcgacgccgacaagattgaacggctgctgtcacctgtcgaattcgtcggcaaacgaagagccagcggatttggacaaatcaggtcctggggttttgacaccgatgaactgaacggcattgagggtgtgtttggggaacctctaagacctgtgcctgtcgcaatgttcagtggcgacaccagccaccccgtcgttgacgcggcatggcggccagcgtattggaaggctgaacaccgcgcagcttgctacgcaccgagcttcatttaggtgacaccgatgctcgattttttcaatcagaactttggccgctacttggtcgagcaaaccgggcgcccggcacgggatgcacaacgagccctttccagcggccacaagatgcgcaaaggcggcctgccgcaacgcattgcgagcggctgggccatcgtgcgccccgaacggtcaacgatgcaattcgaactggcggctgacgacttcgagtacagcaagctgacccgctacgaagcattccaggccgagctggatagctgggatggcacgccccggattttcattgagttcgacaagaagcctgtgcccgtgaataacctgttcgtcacttatgacctgcgagcagtacgaatctgttcacccaaaggctgtgaaaccttcgactacacaaagccgcccgagaaggacggcagcaaaactcacagggtaatttggaagcaaagggggctgctcaagtgatggattacgttgtacccaaacccgggtcagtgtgtggatatgccttgcatcgcctggcagaggggctcaccggaggcgggcgcccgcagttcacggactttggcacctatatgctggttcggacagagatggcgctggaggccgaatcaaggcctatccgccccgtccaaacagggcaaatcatcggattcgaactgcgagcgtgtgtaggcgtcaaagtcaaaggcaagcatcggtacttcccattgagtgactggcgcagccggcatcaatggctcgcccgacaagggacgatccatggcttcgaggtcgtgaccgttcactgctcagcggccatggcaaccatgcaaaagggtcaagagcgattcacggtcgatcaaacggacttcacaggcatcttgaaagtgcttgatgaaagcaagttcaagcaggccattcacacaggcatcggcagcaagggtcgcgcctttggctttggaatgatcaacatctgaggggagtttcatgaacgatatcgtcatcaatgccaccatcaccacggtcggcccgctgtccatccgtacacctgtagctgaaggacagcaagcgaaccgatttgagaacttcccagtcatgacgcgcggccttgattcagagggtcggccgcttcaaactggctacctgccagcgacgaccctaagaggattcttgcgccgcgccatcgtcacacaggcgatgaccacagcggccgcagagggcaagcactacacacttcaaaaggcttacgcggacttgatcgggcaagacgctgagagtgagaagtctgagggggtggacttgctcaagcttcggcaactgcgagatgacaaccctgtgcttgatctctttggtagcggccttggcatcaaatctcgcttgctggtgtcccatttcttacccagcgtgaacgtattgcctgaagtcttcaccggggtccgcaaggatctagaggacaccgaaggcgtcgtggacttgctgactccatcggaccgggaggtctactttggccgcaacgatgcaaatagccggcgagcggatgcgggcaaggtggtccggcaaattgaacagaaaattcgcaaagcaaaaaaagacaaggctgaaacgactgaactggaggccgcgctggccgaggccaaagccctgtccagcaagtacgaggcggaaatgggggacatgaccaacagcagccgcaccttgaccacctactgggcacttcccgctggcatggaactcaagggccgcctgattgtgcagaaggccagggcacgggatttggacatgatcgaacaggcgctgggcgctttatcgttgcgtccgatcttgggtgcgcaatctgctcggggctgtggggaagtgtccggcgtattcgatgtactccaaggcactcgtctcctgaagaaaatatcaattggtgcttggagcgctgcggtggtgagtgaattttctcgcgccgaagagcaacaaatctcagcctaaacaacaagttagagctgctcagttcaaaccaccctgtgttggggtggttgctagaaccactgccgcacgcgcgccagctccaggcccgttcaaaccaccctgtgttggggtggttgctagaacctggctggagttcggccgcactggccgcaggttcaagccaccctgtgttggggtggttgctagaacagcgtcacccgcagcgcttgggctttggcggttcaagccaccctgtgttggggtggttgctagaacacccggctggacctgacgcgcagccagaaggttcaagccaccctgtgttggggtggttgctagaacagctcttccgtccaggtgctgccagcctccgttcaagccaccctgtgttggggtggttgctagaacctgcagaccgccatcgtcaacagcatgatcgttcaagccaccctgtgttggggtggttgctagaacgaatagcgcctctaacacctctggcgtcgggttcaagccaccctgtgttggggcggttgctagaactattgcgacacggtgggtatctcgcgggaggttcaagccaccctgtgttggggtggttgctagaacgtaggtggccacggcctgctcggcggtcaggttcaagccacactgtgttggggtggttgctagaactacgccagcagcatggaccccgagcgcacggttcaagccaccctgcgttggggtggttgctagaaccatcggcggcgcacctcgcagcagtggcggcgttcaagccaccctgtgttggggtggttgctagaacgccgagcgggcacggatggcagcggcgcaagttcaagccaccctgtgttggggtggttgctagaacccggcgcagctgctaccaggcggtgtgcatgttcaagccaccctgtgttggggtggttgctagaaccagaacggcatcaccatcaccgatgatcgcgttcaagccaccctgagttggggtggttgctagaacgtgcaggcgttcatcttggccttgcaagccgttcaagccaccctgtgttagggtggttgctagaacgcgctcatgcatgacccagccaagcccgaggttcaagccaccctgtgttggggtggttgctagaaccgccaggttccctacgtgcaagacgccatcgttcaagccaccctgtgttggggtggttgctagaacgccggtgacgatgcgctcgcggtcagccaggttcaagccaccctgtgttggggtggttgctagaacagcgggatcaggatcggcatggccagcagcgttcaagccaccctgtgttggagtggttgctagaacgccagcagcatcaccacgcccgtcgtccaggttcaagccaccctgtgttggggtggttgctagaaccgggtgatgccgtactgaatcgttcgctccgctcaagccaccctgtgttggggtggttgctagaacgtgtagccgatggccatgcagatgggttcggttcaagccaccctgtgttggggtggttgctagaacggcactttcgtgttcgatgtgcgcgacctcgttcaagccaccccttattggggtggttgctagacctggcggcttttttaggtgctcatgtcctgggctcaagccacacagtattggggtggttgctagaaacacctgcagaagctgggcgacggcaccatcgttcaagccaccctgacttggggtggttgctaaaacccgtctgtatagtgactcggtgttactgaggttcaagccaccctgtattgaggtggttgctggaacacctgcatggcgggcagccgcgcggtggcttttcaagccaccctgtgttgggggtggttactagcgtgcgcaaggtacgcccgggttcggccatagcgagctactagcgggcatcgcagcgctctgcaagcaaccggcacagactggcctcgccaaaaccagtctttccgaacgggagcaattcttgctccatgtccaacaaattgtcgccagcactttcatcgaatgaacgcctcgccaatcggctttttcaggacggccgaacaacacaatctctacagcctgattcaagcgcaccagcgcaagttggacggcccactgctgcttgaaggcgggacgggcctgggcaaaactcgggcgtatttggcagccatcttcggggcggccagggctggatttggcgtagcagtggtgctgcctacacatcaattgattgatcaactcctcgcgtcttcagacctggcagcaacccggggggaagtgaccactgccgcattcagacccgagcgattctttgagggcagccgcaaggactatgtgtctcaaaagcgagcggcaattaacgcacaggtcatggtttgcacttctgcaagcgtgatcatcgatcagaggttgggtggtgaatacaacggtgtcaccctgcgcgactacatcgtgtttgacgaggctgaccaactgccagacatggccgccttgcagtcggacttttcagttggtgccgaggaccttgcaaacctcggcatttctttgaccactgcccctgaagccttgaccgccatcctcgccaagccatcgagggccgtcgaacctgaagtgagggctgctgcacgcatcatcttggacgcgatcaatgagcccgcctggtttcagaaggctggcattgacgatgagcaaaacattgtcctgacccacaagctgcccggccgactgctcaagaacatcagcaacaaggcaaacgttgcgtttgtgtccgcaactctcaccgttgcgggcaagttcactgatttttgcagtgccatgggcattgagcaggtcagcagcttgtcatccatcattgagccacgagttcatggcaccttggactttcgagtccgcgcactggaggtggatacgccggaatgggtggagggcgttgtttcggcaatagccggcgccgaaaagccggtgcttgtggcgaccacatcgcatgagttgtctgagatgctgggtgaacgactcaaggcagcagtggttcgcagcgccgaagagacggcggcgcaagccagccaacggtgtgcgggcgggatcttgattgcggcgggggcgtgggcaggcctggatactcccttgcgctggcgatctattgttgtgcctcgggtgccttttggtcagcctacggtggtcgatggcgcaatagtcacgagctacatcgacgccagaaacacggccatccgacgactcaggcaggtgatcggccgagggctacgcagccccgacgcagtttgtacgatttaccttatggacggtcgtgcagagagcctggctgggtttgttcctgaacgcttcacccaggcctggacgcagcgggatttcctggagggctcacgacaaacagtctccttgtccaaggcggagcgcgacccatcagtgcgccgacacgccttgcagcactatggatgcatatgcatggcatgcggattcaaacccaaggtgttggaacaactgcaggtgcaccaccttgagcctatcagcgagggcctacgcaggacgcgactcgaagacgtagcggtcttgtgcgcgctctgccacatcttggcccatacgaagtcgccgcccattgagttagaacggcttcgcaaaatggcagatccagggctaacctgaacgacatttgagccgcatcgcgccagcacaaaggctcgggagccactgtgccggggtactggctcagccccaggcacagggaacagccgtgttcacgggcattgcaggtcgctgagccactgtgcctctactatttcttagaaagataactaagagaatagacgcatcaacacaagaaacagccagcaggaagaagtgcaatacctgctggctcagcggctcagcggctcagcagacggctaagcaaatggggccgagtcgatttgctgctgatagtgctccaggccagcctgggccagggactcgtgatcatgcttttgacgctcatagccgcgtttctggtgcccgccgacacgccttcgcgccgcaacccagcccaggcgttcgatgatttcagcgacccgacgactcacctgaggcgtgcggcgggacatatcaatgccattgacacgaccgaacggcccgtcatcgcggatgctcaaacatccaatcaactcgtccgtggtgacaaagtcgcgcttgtaagttgccggcttcggaccaccatactcattcgaagggccggcaggctcagcaaacagcagctcgtccacatacgcttgaatcggcgcggcccatgggtcgtcaatgctgtagtcctcatgatgctcgcgggccaaacgctctgcatcccgaaactccacgccatgcgccaaaaagtagaccctcgcctcggcccacaactgcgcacagtcccgtcgggttgccgctggatcgcattggccaactttcaccggcagccatcttcgattgccagtggagtcacgcaagaaatctgcttgattggttgatgcaatgaaaatgccccggcgcgggttggtcttgggtctctctttgtacttctccacccagcagtcggacgtggcgctgagaaatgccttcaaggactctgaatccctggcacccaaaccgcgaagctcgggcaactccagcacgagtttgccgcgcatcttgcgggctgtgtcgtcatcgcgagtgctcaggtcaatggtgccaaagaagcgagcttcaaaggcaattgcctcgatggttgaagtcttgccgcaaccttgtccaccggcaaacaccgcaagcatgtcggccttgcaaccaggcgacaggacacgccccgccagtgctgaccagaggtacttactcacggctcggtggtactcggtgtcggcggcaccgcaataggcagaaagaaagttctccatgcgaggcaccccatcccaactcaggccattcagccactgctgcgcactgtcaaaggagttctcttcagcgacgagttctacggtgtctcgcatcagctctttgggtgcaagcacacggttggagcgctcaatatgttcgcgaagctttgtgtagtgactgtcagtcaaggtttgccactgcggggggtcttcacctgcaggtgccaacttgatgtctgcctcgaactgatcaaagccaatttgccagttgcacttggttggatcgcgcaggatcgtggcgagcgttgcaaccgtcgcgccgactttcttagatggactgagattggcaacggcctgctcggcattgccgtcgtagttgcccagcatcccaaaatcatcctcgggtgtgatcatctgacgactcgcttcactgaagacgtcgggatgatgttccttgatccagtcacgcatttgcctgcaactcggcatgtctccagggcgagtcccttctggaacgccaaggtcagcaccggcgaacaggtgcagccgaacgaaatcgtaaatgttgcaaggactgccagtccccttcggcgcagtgttgtggacgttcactaggcctcggccgcattcggtgacaaacacaccttcagccccatgaccttgccaatcaaagtgcaatggacggcgcctggacggcttgaaagcctctggcagcaacacatgcaactgctcaggtccaaatgcccggcagaacgcgccaatcagaccaggcttggcgtgtgggtcagccaacggctgccttaccactgcgaggcgctgacgtgccctgagggtcaactctgcggggaggctcagctctacctcattcttccaatccgatgaaatgaacaggccgagccgaacaggcacggggtcgatcacaccttcctcgaacaatggtgcagccgtgtagtgcagctgcacggggttgaacagggattggtcaactacgcccgcttcaatagtctctgcccaggcacgaagctcggtcgaggtgcgaggctgctgcagccagaagtgcaaatgcattttcagcagcccttcatttttggcatgcccagcccctgcagacaatgaccagcaaaaactgacgtcgtgaaacgcctcgggtagtttggctttgatgaactcaagcgccgcctgctcaggctcacgcactggatcggcaccagacggccgatagttgtctacatcaatcatcagccagtgcagcgcctggtcggtgaagtaggtcccccgacgcaggatatagccttccggcagctcatccccttgctcgatggccgcactctgcgccgcttgatcgccaatataagcaccgcgaatcagtccgacgcagcgctggggttcaatgcgtttcagcagctcgtgaagatcgaataagccctgcacctcttcggctgagactttgaaaaacctggctttgtcgtagctttgcagggtgccatcagcaagccaagtcttggccaaaaccggccccttggactcaagcaaagtgatcgcatcggattttgcgtttgaccattggctggcagccccaacaggctgcccatgagagaagccacgccctcccggctcggtcatgacagttgcaaccgggttcattggctcacccccagtacgcggcgcagctcagacaccggccacgccagacgcccgttgacacgaatcggccgcagcgggccgccctcgcggcaggcccaaatcctgagtgtctgcgcggaccgattcaaatgccgggctgcctcggaagttggcaaagccactcggggctcaagcgccagagatgtgagttgaagattcaaatcaagcatgtaaaaccacatgggtttgttgaacatgctgtcattggaatttctgcggcagtaccgccgtcaacaccgccgaactaccgccgtttgtgaaccgccccccgctccttgtacccgtcaatagcgtagagccgctcacattcctcatcgaggtcaatctgaatggccttgcgatcagactggcgccgatgggcctcttgctcctcttcaagcaaacggtttaaagctccccgcactccagcctgatgccatgagccacctggctggcgaacaagtgcgccacccagctccagcaaacggccaagccgccgtttacgcctgtcttccaaggactcatgcgaggccgaatcaggctgagcgaccgaccatctcagactgccttgaactgattcgtcctgctcgccctccaggtcttctgcatgcagaccgcacagcccccaaatggagtccggcccgcctgaactaatagccagctcgaaggcgtagtcatcactgcgcggcccattggtgtgctcgacatgcgatgcaagcgccttcaatgcacgttgacgcagttcttctgttgcaggtccgaatcggtcataagcatcccaaccccaaaggtgccccgcttcaatgagtgctgccaggtggcctgaaccgactttgaagaccagatcacgaagcagaatgaacgtgccagacggttccataggcaaaagtcttagtgacaagtgagggtgcgacacgtacccatggctacatggtggctacatgggccagaaaacaaacgcacaaagaagaacagcctagcgaccttcgccgctaagctgttgatttcattcttaatttttggtgggccctgagtgactcgaacactcgacctacggattaagagtccgctgctctaccaactgagctaagagccctacgctttgtttttcttgcttggcgttaatttcttagcaaccttgcaagccttgcagtatagcatctatttttgcaatttccactgttttgatgaaaatcttaaaaatttctgcttttcagcttcttcgcacttttgaatcgatggtcagcgcctgagcgctttaaccgtcgcaaatcaaaagatggtgggtcgtgcgggactcgaacctgcgacctacggattaaaagtccgctgctctaccaactgagctaacgacccatcaagcgaagcccatcattatagccaggaatttttgaccttcgcaagacctttgaacgactttcttgaaggctccaaaaaatcttcgaaggcatgtctcaactgcatgctgaagcactgacacggcggaggcaatccgggagccccgccggacatgccaccaacgccgctcagcgaactttgtgtgccaaggtggcctgaatcaactcagctgccgccgccatgccgaaactggccgtgacggccacgctggagccgtagccgtggcagttcaacgtgccgtccacatcacagagttcggcgccctcgccttcggccgcggggcggtgtacggcctcgcgcgaaaacacgcagcgcacgcccagcttgccctgacgcggcgcgccatgctccttgcgcaagcgctggcgcagcgaggcgagcaaggggtcgtgcgtggtctcggacaaatcctcgatgctgagccggtgcggctcccgtttgccgccggccgcgcccacagtcacaaacggcaaatggcgcgcacgcgcccaggcggccatacaggctttggcgcgcacctgatcgcaggcgtcgatcaagccgtccagctgtgcttcctgctccgggccgcccagcagggccggccagttgccaggctccacaaagtcttcgatcacccgcacctggcactccgggtggatgtcctggatgcgctggcgcagcgcttcggccttggccatgcccacggtcgaacccagagcctggatctggcggttgatattggattccgagacctgatccaggtcgatcagcgtgaggccggccacgcccgagcgagccagcgcctccacggcccaggaccccaccccgcccagtccgaccacggccagatgcaggcctcgcaggcgctggtaatcggccgcaccgtagaggcggcgcaggccgccaaaacggcgttcgctgtcgggcgggaaatcggatgtgaagtttggcgcggtacccaggttcagcggcgtgtcatccatggggaaagttcagacgcgcgggcgcccctgtgaagagtggaaagcaagccgcggattttaggtcggcaaaaggaaaaaggccctgcaagcagggcctctgagaatcgtcaccgcggcacgcatccagccaaggctggataccgacggtccgggtgaagaatcaggacttgagcgcggccaggcgttccttgccagcctgcgccgcttcggtgccggggtaggccttgagcaggtcttccaggctgcggcgcgcagccttcacatccttgagctcgatctggcagttggccagggccagcagcgcctcaccggcgcgcggatgctccgggtttcccgatatgaaggccttgaagctggcgatggcgtccttgtagtcacgcttgccgtactgggcattgcccagccagaagcgcaccgaatcgctgtacccgctggccggataacggcgcgcgaaattgttcagcgcgctggtggcctcggcgaaatcaccgcgacgcaccaaacccatggctgcctcgtactgccggcgctcctcaggctcgacctgaaactcgcggccatcgagcgccactttctggggctccatgggcttcagacgcgaatcaaaggcctgcagctggtcgttgagcttgcgctgggtctccgacagatcacgtgccagttgctcgttctgaccgcgcagcttggcgatctcagagcgcaggccgtcgatctggctgttcagatcgagcatgctgcggcgcagcggccccaactgctcctgcaccagcgcggtcagctgctcggcgcgctgacgctgggcgtcctcgctttgctgcagcttggcgcgcaggtcgaggatggccttgcgggcatcctcgtcttcaaacaagccagcccgcgccggctggctcaaggccagacccagcagcaggcagaacggcagcagccgcggcagcttcatctcacttgtccttcagctcgacgcggcggttcttggaccaagcggcttcgtcgctgccttgagcggcgggacgctccttgccgaagctcacggcctcgacctggttggcggccacgcccagcaggctcagggacttggccacggcttcggcacgcttctggcccagggccaggttgtactcacggccgccgcgctcgtcggtgtggccttccaggctcagggcgatcttgcggtcgttgttcaggcgcttggcgtgggcatcgaccaggccgcggtactcgtccttgacgacatagctgtccaggtcgaaatacaccacgcgctggttggccacagcggccgtcagctgagcacccagatccacggtctggaccttggattcagacatgggttgggcattggccgaggaattggtcggagccgtctgggtcaccggacgggtttccaccggcgccggctcatccagcttcacggcggtgctgcaacccgccagagcggcagcggccaagagggacagagcaaaacgcgtcatcttcatgaaaagcactcctgtttcgatcgaaaggatcggtcttgaaaaagttccaccgctaaccggtccggtcggcgcattgacaactgcgaattgtcatacagcttgcgcaagtttcgcgcggcagaactgcaaagaaatcaacggccaaacggtccccaggtcggttctcgcacatcggcaagcgaagaaatcagtttcgccttgatgcggccgtccagcgtgctggtcatcagcacatcgcggccgcccgaacgggtggcgtagacgatcaggcggccattgggagagaagctcgggctttcgtcatcgctgccatcgctgatctgctgcaccacacccgaggccaggtccatcacgcagatgcggaactggctgccgttcaagcgggtgacgaaagccaggctgcggccatccgggctgaccgaggggctgatgttgtagttgccgctgaaggtgacccgctcgggcgagccgccgcccaccgccacgcggtaaatctgcgggctgccgccccggtcgctgacgaaatagatcgagcggccgtcgggcgcaaacaccggctcggtgtcgatggccgagctctgcgtcaggcggcgcacgccgctgccatcgcggttcatcacgaagagctgagagccgccttcgcgcgacaaggtcatcaccaccgactcgccatcgggcgagaaggccggcgcgctgttgctgccgcgaaaatcggccaacttgcggcggcgaccagtctgcaagtcctgcacccagaccacggccttgcgggtctcgaaggacacgtaggccagctcgcggccattgggcgaccaggccggcgagatgatgggctcggggctggccagggcgacctggccgccctcgccgtcagcatcggtgatgcgcaggctgtagcggcctccggcgcgggtgacataggccatgcgggtggcgaacacgccgcgctcgccggtgagcttttggtagatggtgtcggcgatgcggtgggcggccaaacggacatcttcagcggtgacggcatgggcttcgccgccgaggtcggcgcccttgaccacatcccagagcttgtagcgcagatcgaagcgaccatcggccaggcggctgaccgaaccggcggccagggcatcggcctgcttgccgcgccactcgctccagttcggcgcgctgccttcaaacaggcccggtgcggcatcgatgatcttgaactggccgctgcgctccaggtcggcgcggatgatggcggccacggcctggccactggccgactcatcacggaaatcaggcaaggcgatgggcagctgcgagccacccacgccggagatttccacccggaactgggccagtgcgggcccggccagcagcgcggacgcggcagcagccgcttgcaaaacgttgcgacgcgagaggaaatcggacatggaagaactcatggaaaagctagcgtttcgaaacatgacatcgtctcagggggacccagggccgcagacacggcctggattttgcctgagggcaagtggccggacggccggcaagggcgacgtagcacgcggcgcgcccacaggcagcgctcagagcagcacgatgtcgtaatgctcggtctgattggtcggctcggcggtcagcgagatcggcttgccgatgaaatccgacaggccggccagatgctggctttcttcat

SEQ ID NO: 39 - DNA, 19924 bp, Artificial Sequence
  Synthetic Oligonucleotide
  misc_feature (1)..(7340): n is a, c, g, or t
nnnnnnnnnnnnnnnnnnnnnnnnnnnnnnnnnnnnnnnnnnnnnnnnnnnnnnnnnnnnnnnnnnnnnnnnnnnnnnnnnnnnnnnnnnnnnnnnnnnnnnnnnnnnnnnnnnnnnnnnnnnnnnnnnnnnnnnnnnnnnnnnnnnnnnnnnnnnnnnnnnnnnnnnnnnnnnnnnnnnnnnnnnnnnnnnnnnnnnnnnnnnnnnnnnnnnnnnnnnnnnnnnnnnnnnnnnnnnnnnnnnnnnnnnnnnnnnnnnnnnnnnnnnnnnnnnnnnnnnnnnnnnnnnnnnnnnnnnnnnnnnnnnnnnnnnnnnnnnnnnnnnnnnnnnnnnnnnnnnnnnnnnnnnnnnnnnnnnnnnnnnnnnnnnnnnnnnnnnnnnnnnnnnnnnnnnnnnnnnnnnnnnnnnnnnnnnnnnnnnnnnnnnnnnnnnnnnnnnnnnnnnnnnnnnnnnnnnnnnnnnnnnnnnnnnnnnnnnnnnnnnnnnnnnnnnnnnnnnnnnnnnnnnnnnnnnnnnnnnnnnnnnnnnnnnnnnnnnnnnnnnnnnnnnnnnnnnnnnnnnnnnnnnnnnnnnnnnnnnnnnnnnnnnnnnnnnnnnnnnnnnnnnnnnnnnnnnnnnnnnnnnnnnnnnnnnnnnnnnnnnnnnnnnnnnnnnnnnnnnnnnnnnnnnnnnnnnnnnnnnnnnnnnnnnnnnnnnnnnnnnnnnnnnnnnnnnnnnnnnnnnnnnnnnnnnnnnnnnnnnnnnnnnnnnnnnnnnnnnnnnnnnnnnnnnnnnnnnnnnnnnnnnnnnnnnnnnnnnnnnnnnnnnnnnnnnnnnnnnnnnnnnnnnnnnnnnnnnnnnnnnnnnnnnnnnnnnnnnnnnnnnnnnnnnnnnnnnnnnnnnnnnnnnnnnnnnnnnnnnnnnnnnnnnnnnnnnnnnnnnnnnnnnnnnnnnnnnnnnnnnnnnnnnnnnnnnnnnnnnnnnnnnnnnnnnnnnnnnnnnnnnnnnnnnnnnnnnnnnnnnnnnnnnnnnnnnnnnnnnnnnnnnnnnnnnnnnnnnnnnnnnnnnnnnnnnnnnnnnnnnnnnnnnnnnnnnnnnnnnnnnnnnnnnnnnnnnnnnnnnnnnnnnnnnnnnnnnnnnnnnnnnnnnnnnnnnnnnnnnnnnnnnnnnnnnnnnnnnnnnnnnnnnnnnnnnnnnnnnnnnnnnnnnnnnnnnnnnnnnnnnnnnnnnnnnnnnnnnnnnnnnnnnnnnnnnnnnnnnnnnnnnnnnnnnnnnnnnnnnnnnnnnnnnnnnnnnnnnnnnnnnnnnnnnnnnnnnnnnnnnnnnnnnnnnnnnnnnnnnnnnnnnnnnnnnnnnnnnnnnnnnnnnnnnnnnnnnnnnnnnnnnnnnnnnnnnnnnnnnnnnnnnnnnnnnnnnnnnnnnnnnnnnnnnnnnnnnnnnnnnnnnnnnnnnnnnnnnnnnnnnnnnnnnnnnnnnnnnnnnnnnnnnnnnnnnnnnnnnnnnnnnnnnnnnnnnnnnnnnnnnnnnnnnnnnnnnnnnnnnnnnnnnnnnnnnnnnnnnnnnnnnnnnnnnnnnnnnnnnnnnnnnnnnnnnnnnnnnnnnnnnnnnnnnnnnnnnnnnnnnnnnnnnnnnnnnnnnnnnnnnnnnnnnnnnnnnnnnnnnnnnnnnnnnnnnnnnnnnnnnnnnnnnnnnnnnnnnnnnnnnnnnnnnnnnnnnnnnnnnnnnnnnnnnnnnnnnnnnnnnnnnnnnnnnnnnnnnnnnnnnnnnnnnnnnnnnnnnnnnnnnnnnnnnnnnnnnnnnnnnnnnnnnnnnnnnnnnnnnnnnnnnnnnnnnnnnnnnnnnnnnnnnnnnnnnnnnnnnnnnnnnnnnnnnnnnnnnnnnnnnnnnnnnnnnnnnnnnnnnnnnnnnnnnnnnnnnnnnnnnnnnnnnnnnnnnnnnnnnnnnnnnnnnnnnnnnnnnnnnnnnnnnnnnnnnnnnnnnnnnnnnnnnnnnnnnnnnnnnnnnnnnnnnnnnnnnnnnnnnnnnnnnnnnnnnnnnnnnnnnnnnnnnnnnnnnnnnnnnnnnnnnnnnnnnnnnnnnnnnnnnnnnnnnnnnnnnnnnnnnnnnnnnnnnnnnnnnnnnnnnnnnnnnnnnnnnnnnnnnnnnnnnnnnnnnnnnnnnnnnnnnnnnnnnnnnnnnnnnnnnnnnnnnnnnnnnnnnnnnnnnnnnnnnnnnnnnnnnnnnnnnnnnnnnnnnnnnnnnnnnnnnnnnnnnnnnnnnnnnnnnnnnnnnnnnnnnnnnnnnnnnnnnnnnnnnnnnnnnnnnnnnnnnnnnnnnnnnnnnnnnnnnnnnnnnnnnnnnnnnnnnnnnnnnnnnnnnnnnnnnnnnnnnnnnnnnnnnnnnnnnnnnnnnnnnnnnnnnnnnnnnnnnnnnnnnnnnnnnnnnnnnnnnnnnnnnnnnnnnnnnnnnnnnnnnnnnnnnnnnnnnnnnnnnnnnnnnnnnnnnnnnnnnnnnnnnnnnnnnnnnnnnnnnnnnnnnnnnnnnnnnnnnnnnnnnnnnnnnnnnnnnnnnnnnnnnnnnnnnnnnnnnnnnnnnnnnnnnnnnnnnnnnnnnnnnnnnnnnnnnnnnnnnnnnnnnnnnnnnnnnnnnnnnnnnnnnnnnnnnnnnnnnnnnnnnnnnnnnnnnnnnnnnnnnnnnnnnnnnnnnnnnnnnnnnnnnnnnnnnnnnnnnnnnnnnnnnnnnnnnnnnnnnnnnnnnnnnnnnnnnnnnnnnnnnnnnnnnnnnnnnnnnnnnnnnnnnnnnnnnnnnnnnnnnnnnnnnnnnnnnnnnnnnnnnnnnnnnnnnnnnnnnnnnnnnnnnnnnnnnnnnnnnnnnnnnnnnnnnnnnnnnnnnnnnnnnnnnnnnnnnnnnnnnnnnnnnnnnnnnnnnnnnnnnnnnnnnnnnnnnnnnnnnnnnnnnnnnnnnnnnnnnnnnnnnnnnnnnnnnnnnnnnnnnnnnnnnnnnnnnnnnnnnnnnnnnnnnnnnnnnnnnnnnnnnnnnnnnnnnnnnnnnnnnnnnnnnnnnnnnnnnnnnnnnnnnnnnnnnnnnnnnnnnnnnnnnnnnnnnnnnnnnnnnnnnnnnnnnnnnnnnnnnnnnnnnnnnnnnnnnnnnnnnnnnnnnnnnnnnnnnnnnnnnnnnnnnnnnnnnnnnnnnnnnnnnnnnnnnnnnnnnnnnnnnnnnnnnnnnnnnnnnnnnnnnnnnnnnnnnnnnnnnnnnnnnnnnnnnnnnnnnnnnnnnnnnnnnnnnnnnnnnnnnnnnnnnnnnnnnnnnnnnnnnnnnnnnnnnnnnnnnnnnnnnnnnnnnnnnnnnnnnnnnnnnnnnnnnnnnnnnnnnnnnnnnnnnnnnnnnnnnnnnnnnnnnnnnnnnnnnnnnnnnnnnnnnnnnnnnnnnnnnnnnnnnnnnnnnnnnnnnnnnnnnnnnnnnnnnnnnnnnnnnnnnnnnnnnnnnnnnnnnnnnnnnnnnnnnnnnnnnnnnnnnnnnnnnnnnnnnnnnnnnnnnnnnnnnnnnnnnnnnnnnnnnnnnnnnnnnnnnnnnnnnnnnnnnnnnnnnnnnnnnnnnnnnnnnnnnnnnnnnnnnnnnnnnnnnnnnnnnnnnnnnnnnnnnnnnnnnnnnnnnnnnnnnnnnnnnnnnnnnnnnnnnnnnnnnnnnnnnnnnnnnnnnnnnnnnnnnnnnnnnnnnnnnnnnnnnnnnnnnnnnnnnnnnnnnnnnnnnnnnnnnnnnnnnnnnnnnnnnnnnnnnnnnnnnnnnnnnnnnnnnnnnnnnnnnnnnnnnnnnnnnnnnnnnnnnnnnnnnnnnnnnnnnnnnnnnnnnnnnnnnnnnnnnnnnnnnnnnnnnnnnnnnnnnnnnnnnnnnnnnnnnnnnnnnnnnnnnnnnnnnnnnnnnnnnnnnnnnnnnnnnnnnnnnnnnnnnnnnnnnnnnnnnnnnnnnnnnnnnnnnnnnnnnnnnnnnnnnnnnnnnnnnnnnnnnnnnnnnnnnnnnnnnnnnnnnnnnnnnnnnnnnnnnnnnnnnnnnnnnnnnnnnnnnnnnnnnnnnnnnnnnnnnnnnnnnnnnnnnnnnnnnnnnnnnnnnnnnnnnnnnnnnnnnnnnnnnnnnnnnnnnnnnnnnnnnnnnnnnnnnnnnnnnnnnnnnnnnnnnnnnnnnnnnnnnnnnnnnnnnnnnnnnnnnnnnnnnnnnnnnnnnnnnnnnnnnnnnnnnnnnnnnnnnnnnnnnnnnnnnnnnnnnnnnnnnnnnnnnnnnnnnnnnnnnnnnnnnnnnnnnnnnnnnnnnnnnnnnnnnnnnnnnnnnnnnnnnnnnnnnnnnnnnnnnnnnnnnnnnnnnnnnnnnnnnnnnnnnnnnnnnnnnnnnnnnnnnnnnnnnnnnnnnnnnnnnnnnnnnnnnnnnnnnnnnnnnnnnnnnnnnnnnnnnnnnnnnnnnnnnnnnnnnnnnnnnnnnnnnnnnnnnnnnnnnnnnnnnnnnnnnnnnnnnnnnnnnnnnnnnnnnnnnnnnnnnnnnnnnnnnnnnnnnnnnnnnnnnnnnnnnnnnnnnnnnnnnnnnnnnnnnnnnnnnnnnnnnnnnnnnnnnnnnnnnnnnnnnnnnnnnnnnnnnnnnnnnnnnnnnnnnnnnnnnnnnnnnnnnnnnnnnnnnnnnnnnnnnnnnnnnnnnnnnnnnnnnnnnnnnnnnnnnnnnnnnnnnnnnnnnnnnnnnnnnnnnnnnnnnnnnnnnnnnnnnnnnnnnnnnnnnnnnnnnnnnnnnnnnnnnnnnnnnnnnnnnnnnnnnnnnnnnnnnnnnnnnnnnnnnnnnnnnnnnnnnnnnnnnnnnnnnnnnnnnnnnnnnnnnnnnnnnnnnnnnnnnnnnnnnnnnnnnnnnnnnnnnnnnnnnnnnnnnnnnnnnnnnnnnnnnnnnnnnnnnnnnnnnnnnnnnnnnnnnnnnnnnnnnnnnnnnnnnnnnnnnnnnnnnnnnnnnnnnnnnnnnnnnnnnnnnnnnnnnnnnnnnnnnnnnnnnnnnnnnnnnnnnnnnnnnnnnnnnnnnnnnnnnnnnnnnnnnnnnnnnnnnnnnnnnnnnnnnnnnnnnnnnnnnnnnnnnnnnnnnnnnnnnnnnnnnnnnnnnnnnnnnnnnnnnnnnnnnnnnnnnnnnnnnnnnnnnnnnnnnnnnnnnnnnnnnnnnnnnnnnnnnnnnnnnnnnnnnnnnnnnnnnnnnnnnnnnnnnnnnnnnnnnnnnnnnnnnnnnnnnnnnnnnnnnnnnnnnnnnnnnnnnnnnnnnnnnnnnnnnnnnnnnnnnnnnnnnnnnnnnnnnnnnnnnnnnnnnnnnnnnnnnnnnnnnnnnnnnnnnnnnnnnnnnnnnnnnnnnnnnnnnnnnnnnnnnnnnnnnnnnnnnnnnnnnnnnnnnnnnnnnnnnnnnnnnnnnnnnnnnnnnnnnnnnnnnnnnnnnnnnnnnnnnnnnnnnnnnnnnnnnnnnnnnnnnnnnnnnnnnnnnnnnnnnnnnnnnnnnnnnnnnnnnnnnnnnnnnnnnnnnnnnnnnnnnnnnnnnnnnnnnnnnnnnnnnnnnnnnnnnnnnnnnnnnnnnnnnnnnnnnnnnnnnnnnnnnnnnnnnnnnnnnnnnnnnnnnnnnnnnnnnnnnnnnnnnnnnnnnnnnnnnnnnnnnnnnnnnnnnnnnnnnnnnnnnnnnnnnnnnnnnnnnnnnnnnnnnnnnnnnnnnnnnnnnnnnnnnnnnnnnnnnnnnnnnnnnnnnnnnnnnnnnnnnnnnnnnnnnnnnnnnnnnnnnnnnnnnnnnnnnnnnnnnnnnnnnnnnnnnnnnnnnnnnnnnnnnnnnnnnnnnnnnnnnnnnnnnnnnnnnnnnnnnnnnnnnnnnnnnnnnnnnnnnnnnnnnnnnnnnnnnnnnnnnnnnnnnnnnnnnnnnnnnnnnnnnnnnnnnnnnnnnnnnnnnnnnnnnnnnnnnnnnnnnnnnnnnnnnnnnnnnnnnnnnnnnnnnnnnnnnnnnnnnnnnnnnnnnnnnnnnnnnnnnnnnnnnnnnnnnnnnnnnnnnnnnnnnnnnnnnnnnnnnnnnnnnnnnnnnnnnnnnnnnnnnnnnnnnnnnnnnnnnnnnnnnnnnnnnnnnnnnnnnnnnnnnnnnnnnnnnnnnnnnnnnnnnnnnnnnnnnnnnnnnnnnnnnnnnnnnnnnnnnnnnnnnnnnnnnnnnnnnnnnnnnnnnnnnnnnnnnnnnnnnnnnnnnnnnnnnnnnnnnnnnnnnnnnnnnnnnnnnnnnnnnnnnnnnnnnnnnnnnnnnnnnnnnnnnnnnnnnnnnnnnnnnnnnnnnnnnnnnnnnnnnnnnnnnnnnnnnnnnnnnnnnnnnnnnnnnnnnnnnnnnnnnnnnnnnnnnnnnnnnnnnnnnnnnnnnnnnnnnnnnnnnnnnnnnnnnnnnnnnnnnnnnnnnnnnnnnnnnnnnnnnnnnnnnnnnnnnnnnnnnnnnnnnnnnnnnnnnnnnnnnnnnnnnnnnnnnnnnnnnnnnnnnnnnnnnnnnnnnnnnnnnnnnnnnnnnnnnnnnnnnnnnnnnnnnnnnnnnnnnnnnnnnnnnnnnnnnnnnnnnnnnnnnnnnnnnnnnnnnnnnnnnnnnnnnnnnnnnnnnnnnnnnnnnnnnnnnnnnnnnnnnnnnnnnnnnnnnnnnnnnnnnnnnnnnnnnnnnnnnnnnnnnnnnnnnnnnnnnnnnnnnnnnnnnnnnnnnnnnnnnnnnnnnnnnnnnnnnnnnnnnnnnnnnnnnnnnnnnnnnnnnnnnnnnnnnnnnnnnnnnnnnnnnnnnnnnnnnnnnnnnnnnnnnnnnnnnnnnnnnnnnnnnnnnnnnnnnnnnnnnnnnnnnnnnnnnnnnnnnnnnnnnnnnnnnnnnnnnnnnnnnnnnnnnnnnnnnnnnnnnnnnnnnnnnnnnnnnnnnnnnnnnnnnnnnnnnnnnnnnnnnnnnnnnnnnnnnnnnnnnnnnnnnnnnnnnnnnnnnnnnnnnnnnnnnnnnnnnnnnnnnnnnnnnnnnnnnnnnnnnnnnnnnnnnnnnnnnnnnnnnnnnnnnnnnnnnnnnnnnnnnnnnnnnnnnnnnnnnnnnnnnnnnnnnnnnnnnnnnnnnnnnnnnnnnnnnnnnnnnnnnnnnnnnnnnnnnnnnnnnnnnnnnnnnnnnnnnnnnnnnnnnnnnnnnnnnnnnnnnnnnnnnnnnnnnnnnnnnnnnnnnnnnnnnnnnnnnnnnnnnnnnnnnnnnnnnnnnnnnnnnnnnnnnnnnnnnnnnnnnnnnnnnnnnnnnnnnnnnnnnnnnnnnnnnnnnnnnnnnnnnnnnnnnnnnnnnnnnnnnnnnnnnnnnnnnnnnnnnnnnnnnnnnnnnnnnnnnnnnnnnnnnnnnnnnnnnnnnnnnnngcgccaccgctacttccccacgcaggactggcgcgcccgccatgaatggctcgggcgccagggcgagctacacggcttcagcctgatcaccgtccactgctcggccagcatcgcccgcatcgacaagggcgcagccgtcttcaccgtcgacgacacccagttcgacggcgtgctcaaggtcaccgacgcggcgcggttcgaggccgcgctgcgcaccggcatcggcaacaagggcaaggccttcggcttcggcctgctgctcgtctgacaccgcatccctcacgaaagcgaccaccatgaacaagcacaccctgatcatcgaggccacgctgcgcaccgtcggcccgctgtcgatccgcctgccggtggccgagggcgccgccgagaaccgctgggcaaacttcccggtgctcacgcgcggcctggacgacgaaggcaatccgctgcagaccggctacctgcccgccaccacggtgcgcggcttcctgcgccgcgccatcgtgaccaacgccatggagcgcgccgccgccgagggcaagccctacactctgcagcgcgcctacgcggacctgatcggccaggacgcggcgagcgagaagtccgaggacgtggatctcgtgaagctcgccgcgcagcgcgacgcagagccggtggccgatctctttggcctgggcatgacgctcaagtctcggctcttcgtcagccacttcctgccgcgggtgaacgtactgcccgaggtgacctcgggcgtgcgcaaggaccttgaagacaccgagggcgtgctcgatgcgctcagccaggcggatcgcgacctgtatctcggccgctcggctgccaacagcgagcgggctgccgccgctgcggtggtgaccgacctgcgccgcaagctcaagaaggccgagcgcgcgggcgaggacaccgccgacctggccgccgccctcaaggccgccgaggagcgcgtcgcgggcttcgaggaccgcatgggcgagatgaagaactcctcgcgcacgctgaccagctacttcgccctgcccgcggggctcgatctgcttggccgcctggtgatcgagcgtgcacgcgagcgcgacttgccgatgattgaactcgcgctcgatgccctgagccgccgcccgctgctgggcgcgcaggtggcgcgcggctgcggcgaggtggcaggcagctttgacgtgctgcgcgacggcgtgctgatccggcgcatcagcgtgggcggctggaagccggcgcagatgaccgagttcgccgctgcggcgtgaggaaaattgcgacttcttgcgggcgcgaagagccgattgcgctaggcaatcagaggcttgcagcgcctcgggtcaagccacccctcgtttgggtggctactggaactccctgcaaaggactcccgcatcatggacaggtcaagccacccctcgtttgggtggctactggaacaacttctggaaacgaacggacacgttgcggggtcaagccacccctcgtttgggtggctactggaaccggatgccgaaggtccaagtgcccgccgccggtcaagccacctcgttcgggtggctactggaactcgccgcgtcttgctgcctgccgtctctggggtcaagccacccctcgtttgggtggctactggaacgacgccgaggtgcagtccctcatcctcaccggtcaagccacccctcgtttgggtggctactggaacaagctggctagcgaggaatggttgaagaacggtcaagccacccctcgtttgggtggctactggaaccgcgagcggatcgtccacggttcggcagcgggtcaagccacccctcgtttgggtggctactggaaccagttattgaagcgggtccgtggctcgcgcaatcaagccacctctcgtttaggtggctactggaactccatcaggccgacgtgcgtgaccgtgcccgatcaagccacccctcgtttgggtggctactggaactcgtcggcgagaatgacggtgatgctgttgagtcaagccacccctcgtttgggtggctactggaactacctgcaagaccgcaccgaggccccggccagtcaagccacccctcgtttgggtggctactggaactgggcgtactgaaacgcctcttgcgcctcgggtcaagccacccctcgtttgggtggctactggaacgacaagctcgccgccgccgctgaagcgcagggtcaagccacccctcgtttgggtggttactggaactgcacgatgcgttgccgctgctcttgctcgggtcaagccacccctcgtttgggtggctacttgaagttcgcttcggcgtcttcgtcggaggcatccgctcaagccacccctcgtttgggtggctactggaacgaggccaacgaactcatgcgtcacgtcgagggtcaagccacccctcgtttgggtggctactggaagaagggcgtcaactggttgcgccgcgcgaccgcctaagccaccgcattggtgcgtggctactgtgcacgtccggcttgctaacaggtgttagcaagtccgaaggcatcgctaggacgacgcccccgtgggcgcaccgcgcggtgatcactggccagccctacaacggccggcatgatcgggtagcgcaggacgctgcgcgatcaagggcaaggagactgggcatccgtgtttcgcaccactgagcaggccaacttcgcaaacgtgatggcggcgcatctgcccgcgcccgatgcacccctgctgctcgaagggggcgtgggcatcggcaagacgcgcgcctacctgcacgctgccgtgcagtcgggccagcggattgcggtcgtcgtgcccacgcaccagctcatcgaccagttgctcgcctcggccgacctgacagccgtgcgcggcgaggccacagtggcggccttccggccggcgcggatgttcgagcggcggcgcgagtacgaagagcagcgcgaggccgccgcccacgcgcagatcatggtgtgcacggcggcctcggtggtgatcgatcagcgcctcgccggcgaatacaacggctcgaccaccgcgcgcgactacctgatcttcgacgaggccgaccagttgcccgacatggcggcgctgcagtcggatctggcaatcagtcgcgccgacctcgacgccgccggcatccgctttaccacggtggaagacacactgcgccgcctggccgacaaggcgccgcgcaccgtcgagcccgaggtgcgcgccgcggcgcgcgtgatgatcgaggttctggccgagcctcgctggttccagaaggtggggctggacgaggacggcgccatcgtgctcacgcacaagctgccgggtcgcctgctcaagaaggtggccaaccggccgggcgtggcctttgtgtcggccacgctcacggtggcgggtcgcttcgacgacttccgcaacaccatgggcatcgggccgatctcgcggctctcgacggtgatcgagccgcagcagcacgggcgcctgagctttcgcatcgatccgcagaccgtggacacgcccgagtggatcgaggccacggtggcggccatcaaggcggcaccgcggccctgcctggtggcgaccaccagccacgacctgtcggcacggctaggggagagggtgcccggcgccatcgtgcgcgacgccgatgttcccgcccgcaccgccgccgagcaggccgagggcggggtgctgatcagcgccggcgcctgggcggggctggatacgccaacccgctggcgggccatcgtcgtgccgcgcgtgccctacggccagccggtggtcatcgatgggcagatcgagtcaagctacctcgacgcccgcaacaccgccgtgcgccggctaaggcaggtgatcggccgcggactgcgcacccccgatgcggtgtgcgaggtcaccctgctcgacgcgcgcgccgagcgcctgcccgagttcgtgccggtgcggttccgggcggcgtggagcactagagtgttcattgagggcgctcgcactgaggtcatgctcagcaaggccgagcgtgacccggcactgcgtcgggccgcgctgagtcggtacggccaccgttgtcaggcctgcagtttcgttcccaccgttctgggacagcttgacgtgcaccacaagagtcccatcaaggagggggaacgcaagacgcgccttgaggatgtggctgtgctgtgcgccaactgccaccggctggcgcatgctgaggatccccctgttccggtcgagaggcttgccgagttgacgcgagacacgcgctagcggtgtgtgctcgttaggcttggctggcaagagacgtgccttagagaaagctcgcttgaccaagtggagtcatggttgggcgccttggtctcggccagcctcggctagatcccatcgaacactcacctgaagtgctctcagagatgaatgaacttgacctgcaaggcgctgattcgaaggttggtgacaccgaagaagcgcgaggaatcgaactgcgctttgaggccgacccgacagtcaattacgcatcagtgcagaacagtgttccgatcggcaggcgcctggatatccagaacaagaccgaccacgccgcggtgaacgtcttggtgaccgtgaagccggccacaccattcgcgcaatcaaaaaagttcctgttcgagcaccttgcccctggggagacgcggcgcgtagatgtcgtcaaccttccgccggagccggcttatctcgctgcgctcgtggacgcagagcgctcccacatcgattgcgtggcaaccgaaggggagggcggacggacgctcgcgaccgcgcgagtcgatgtggacgtgctcgctgccaatcagtgggcaggcctgcgcgccttgccgtctctgctggcggccttcagccagccgaacattcctctcatcgagggcatcctgcgggatgcgtccgagcggctaaggaaagtgagcagcggcgcgtccctgaacgcctaccagtcgagtaaccgggaggccgtctggctgcagttgtcggccatctactccgctgtcgccgcgctcgacgtccagtacagccaggcgccggccagcttcgaggccgaagggcagaaaatccgcggcagcgagcagatcctgcaaagccgactagccaactgcctggacctgagcatgctgctcgcagcatgcctggagcaagccgggctgcacccggtggtgctgctgagcaagggccacgcgtggctggggtgctggctgaccgatacctacttcgccacgaccgttgtcgatgacgctcaggcggtccgcaagcggatagacactggggagttcattaccttcgagtgcaccggcgtcacgactcagcccaagctccggctcaagacggcggtgaacaagggcgccgagaacctcgccagcgaggagtttggctacgccatcgacgttcgacgctgcagggaggagcaggttcgtcccctgccttcccgctcggaattcttgcagtccgtgactgccaatgtcgacaccgaggaactggaggtcgagcctgctcccgcgctgccgccactagaggtcggtgaaccgattgtcattggagacgacacgccgcaggggcgcctggcgcgttggaaggcgaagctcctggacatgacgctgcgcaatcgcctgctgaacttcaagaaatcaaagagcaatctggaacttgtcgttcacgacgttgcggcgctcgaggatcgcctagctagcgggaaagagttgagcttcaagccctacccgaaggtgatggagggcgccgacccgcgcgatgcgaccgtctatgccagtcgacacggcgcggaggcaatcgccaatttcgtgcgtgacgctcttgacaagggcgagttggtcacgcgagcttccgaggagaagttcgagaaccaactgctggatctgtttcgggcggccagaaccgggatcgaggagagcggcgcgaacgcgcttcacctggcgatcggcatgctgcagtggacggagaccgacacggcggagcgaaagctcatggcaccgatactgatgttgcctgtgagcttgactcggtcctcggtgcgttctggcttcaagctcggcagcactgacgacgagccgttcatcaatccgaccttgctgcagttactggccgagcagttcgacattcggatcgatgtggcgaggttgctgcctcaagacgccgcaggaatcgacgtggagcgcgtcctgcaggcgtttcgcctggccatcagggagtacaagggctgggaggtcaaggccgaggttcaccttggcatgttctcgttcgctaagttcgtgatgtggcgggacttggagtcgcgcttggatgacctgaccaggaatcgggtggtcaagcacctgctgcacactcccggccaagaattcgcgggagagcgcgcagacatcacagagaccgatctggacgacaggttttcacctagccagatccttgcacccttgctcgcggactcgtcccagctggcggccctcgccaaggcaggggcagggatggatctcgtcatcatcggccctcccggctgcggcaagacccaggttctggccaacgcagtggcacatctcatcgcggagggtaagaaggttctggtgtgctccgagaaggcggctgcactcgaagttcttcagaggcgcctggtacagatcggcctggggccctttgtgctcgaactccactcgtcgaaggccaacaaggttggcgtgctgaagcagctcgaggaggcgctccatcaagccggtcagcttccgacggaccgctggcaggccgaggctgaacacttggcgggactgcgcgacactctcaacggcgttgtcagggcactgcacaagcgccgtcgctcgggactgacagtgttcgaggcgaccgggactgtggttgctgccggtcagcgcaagccctcgcagttcgactggcctgatgccgagatgcatgacgcggtggggttcgcgcaccttcgcgagtgcgccaagcgcgcccaggcggtggcctgtgcattaccgacaatcaaggatcacgcgctcagccaggtctacgcggcggagtggtcgttcgcgtggcaagacgacctactgcaatcagcacagcgtctgatgcgcctcgctgccgacctcgaagtcgctgcgggacccgtgttcaggacggtcggcctgccagagaagggcggttctttggccaactacctggcgctggatcgtctggctgacgtcttgctcgacgcgaccggcgtccccggcccagtcgcccgggcaggacacaaccctgacatcacgcgaaggctcgagagtctccaaaggcacggtgcgcttcggcaggaggccgccgggaaattggcgaccggctacaagccttcgattgaagggctgagtgctgaggacatcgcgcaacggtggcgcacggctagcgcgaagtggatcgtcccgcggaggcttgctcagcgcgccgttctccgggagctgcagccgcatcgccaggatggcgaggttccaacggctggcgaagtgcccggactgatcgatgccctcggaatcctcaacaccgaagacgccgagatccgcaccctttccgccgggcaggagagtgtgctcggggccgcgtggcctagcgtaaatgagcggctcgataccctgggacggtgcgcggcgtggagccaacgctatcgggaggcgctcgcacagctcgtggatgcgagccgatcggttgacgacatggccgcccgcctccagatcctggtgggcgaacagcagcacctattgaaggtggacgcggttgtcggtcagcagctggtccgcgtgcgcgaactgatggtcgccttgagcgcggaacttgagcgcgcccggaaactttctcaaaacacggacttcgcaggcgggccacacagcgcgggatttctggttcgcctggcagcgaccgcacaacactggcttggatcggcgcgcgacctgaaggattggtgcagttggcgacgggctcgtgccgacgcgatctcggcaggattggcgcccctggtggcggacatcgaggaggggaacattgcggttggatcgatagtcgagcacttcgacttcagctatcagctttggtggctcaagcgaacggtcgacagcgatccagttctgcgcaccttctccagcgctgaccatgccaggaagattgaggagttccgatcggtggacagggcctttcaggacctgacgcgggactacatcaaagccaaggtcgcagcgaacatcccggagcaacgcagcctacagcccgccagcgagtctgagatgggtaggctgcgccgggagctacagaagcagcggggtcatcaatcgatccgtcgcttgatcgagggaatgccgacccttctgactcggctgaagccgtgcgtgctgatgtcgcccctctcggtggccacctttctcgatacggcgaacacgatgttcgacgtggtgctgttcgatgaggcgagccagatcccggcttgggacgcggtcggagccattgctcgcgcgcgtcaggccgtcgttgtcggcgatcccaagcagttgcctcccacgaacttcttccagaaggtcgacgagcttgacgacgctgccgaggaagctggggtggtggcggatctggagagcatcctcgacgagtgtctaggcgcgggcctgccatcggtggatctgcggtggcactaccggagccgccacgaggccctgatggccttctcgaatgcccgctactacgacaatggcctgatcacttttccttccaatacgactgaggaccgatcggtcgaactcaggcgggtggcgggcgtctacgaccgcgggggcagcaggacaaaccgcatcgaggccgacgccgtcgtcagcgagatcgaggcccactatctcaaccccgcgcagcgcgaactatccgtgggcgtggtgaccttcaatcagccgcagcaacggctgattgagcagttgctggacgcgcgtcgtcgagcgaagccggaactcgatgtggccatcgcggagtgcgctttcgagcccttgttcatcaagaatctcgagaacgtgcagggggacgagcgggatcggatgctcttctcgatctgctacggaagggaccagaccggccggatgacgatgaacttcggcccgctcaacctggagggcgggcatcggcgtctgaacgttgccatcacgcgggcgcgagagcaggtcatggtgttttcttcggtgacttccgaggacatcgatccgggccgggtgagcgcgcgtggggtcctggacctgaagacttatctcgactttgccgcgaagggccaccgcgccctggcgacggagtctctcccgaccggtcgcgagcccgacagccccttcgaggtcgccgttatccaacgacttcgagatcgcggctggacggtgcattcgcaagtaggggcttccggctaccggatcgacatcggcgtggtgcatcccggtgcgcctggccgatacctgctcggtgtggagtgcgatggcgcgatgtatcactcagcggctacggcccgggaccgcgaccgcttgcggcagatggtgctggaggggctgggctggaagctgcaccgtatctggagctcggactggtggcacgacgctgaagctcagacggccaagctcatcgatcggcttaatgcgttgctgcgagatgaagaggcaggtgggggggctgagggcgtgcccgccggaggtggcgaggaggatggacggagccactctcgcgagaggttcgagcgtcaggcgactattgagaccacggtcgagccgaccggcaaggccggcaagccgcggtacggcgggacgagtgtgcggcctccggtctacttccgtatcgacatcaagggtgggaagcccgaggccttctacgagtacggcgacgacgatcggattcgccgcgcaatcgagcaaattgtcgagtccgaggcgccggtgcagacaacggcggtttttcgccgtgtcgcccgggcttggggactggagcggacaggggccaggattgtcgaaaatctggagcgcctgtcccggggaatgaaggccacgggaaagggcgagcgccgattcctttggcgtcaggacgatgatccgagtgcttggagcgactttagagttgccggagacgatgaggactctaagcgtcgacccgaggaggtctgcgacgaagagatccagaacatcgccgcgtacttgttgcatcactccggctctatgcccttcgacgatcttgctcgggaagttgcccggcaggtcggcatcgggcgagcctccaaagactgggtgcagatggtccgagtcgcttgtggagccaagcgaacggcgcatgtgatcgaggtgcgcaacgaaggcgcctatctggtgtcctgatttgtcattgagagggaacttagctatgcacgagatcatctgcccgcactgcaggaaggccttcaagattgacgaggcagggtatgccgacatcctcaaacaggttcgcgacggcgagttcgaacagcagttgcacgaccgcctcgagctcgccgagagggacaagcagagtgccgtcgagctagcaaagatcaaggtggccagtgagttgcagagatctgcagctgctaaggacgccgagattcaggaactaaaggccaggctcgatgccggcgcggtcgcgcggaagctggccgtggccgaggcccttagcgtcgtggaaagagagcgtgacgagctcgccaatgaactcaagcaggccaggcacgacaagcaagccgctgcccagctggcggacgcgaaacttgtcaacgagctgcagcgagccgcttcagcgaaggacgcggagattcaggacctgaaggcgagactcgacgcgggcgatgttgcgcgcaagctcgcggtctcagaggcggtcagcgcagtggagaaggagcgtgacgagctgaagaatggcttggagcgagtgagtcttgagaagcagctcgccgagaaatcgctgaaggacaagtatgagacgcagatcagggatcgcgacgaagcgatcgaacggcttcgagacatgaaggcgcgtctgtcgaccaagatggtcggagagaccctcgagcagcactgcgagaccgagttcaaccgcattcgggcgactgcatttccgagggcgtacttcgagaaggacaacgacgcccgtagcggcagcaagggcgacttcatattccgagactcggatgaagcaggcaccgaggtggtctcgatcatgttcgagatgaagaacgagagcgacgagacggcgaccaagaagaggaacgaggactttcttaaggaactcgacaaagaccgggttgagaagggctgcgaatacgccgtgctcgtttcactccttgagccagacagcgatctctacaacactgggatcgtcgatgtctcacatcgccatccaaagatgtacgtcgttcgaccgcaattcttcattcagatcatcacgctgctgcgcaacgccgcgcagaacgcgctgaagtacaagagagagctcgcgctggtcaaggcgcagaacgtcgacatcacgaacttcgagagcgagctcgagacgtttaagtctgctttcgcgaaaaacttcgacctcgcctcaagaaaattcgcaacggcgatcgaggagatcgacaaatcgatcgatcacctgcagaagactaaggacgccctgctcggaacggaccgaaaccttcggctcgcgaatgacaaggcgcaggacgtgacgatcaagaagttgacgcgcggcaatgcgacgatggcaaccaagttcgccgatctgaaaaagcatgggtccagcgacgcagggtgaggcaaccgagcgcggccgcttcgggggcgatgcagatctacaccaactcatgtcgctcgggagctcacttcgaggctccaacgtcgtccaatgcctagggaagtgtcagtgcacgagagaagtggtgctggcgcgacccccaaactgggaccggatcgcagaagaatccggcggggatcgcggcgccgaacgactccttgacaccgctcaacgtgaactagccgggccgcggtcgccgacggcaaccgctgcgggcggtgtcactccttaagcgcgcgtgacgagcacggtgtgcgatgggagtgtcacgacgcgagcgccccgaggcgttctacgcggatccacggctgcactaggcaacgaagggtcgtgcccacagagacctcgagtgtgggtgccagccgcctctctgcgaatgggacgcgtgtcggtccggggtccgccggttagcggcgattcagtggagcgactccacaaatagacgctgggagctgctacggccctcaggtgcgcggttgcccggcgagggcgagagtcgccatctcgtcgccaagtgcagcctaaaagcgacaagggtcagcggttgctagctcgctgacccttggaatcttggctccccgacctggactcgaaccagggacctgcggattaacagtccgtcgctctaccgactgagctatcggggaaagaggcgggagtatatcggcgcaggcagggcctcgcaaattgggcgcgactcgcgtcgcctcacagcaccttggcgatcgaggcggcgacgtgg

SEQ ID NO: 40 - DNA, 19924 bp, Artificial Sequence; identical to SEQ ID NO: 39
  Synthetic Oligonucleotide
  misc_feature (1)..(7340): n is a, c, g, or t

SEQ ID NO: 41 - DNA, 19872 bp, Artificial Sequence
  Synthetic Oligonucleotide
  misc_feature (1)..(9999): n is a, c, g, or t
nnnnnnnnnnnnnnnnnnnnnnnnnnnnnnnnnnnnnnnnnnnnnnnnnnnnnnnnnnnnnnnnnnnnnnnnnnnnnnnnnnnnnnnnnnnnnnnnnnnnnnnnnnnnnnnnnnnnnnnnnnnnnnnnnnnnnnnnnnnnnnnnnnnnnnnnnnnnnnnnnnnnnnnnnnnnnnnnnnnnnnnnnnnnnnnnnnnnnnnnnnnnnnnnnnnnnnnnnnnnnnnnnnnnnnnnnnnnnnnnnnnnnnnnnnnnnnnnnnnnnnnnnnnnnnnnnnnnnnnnnnnnnnnnnnnnnnnnnnnnnnnnnnnnnnnnnnnnnnnnnnnnnnnnnnnnnnnnnnnnnnnnnnnnnnnnnnnnnnnnnnnnnnnnnnnnnnnnnnnnnnnnnnnnnnnnnnnnnnnnnnnnnnnnnnnnnnnnnnnnnnnnnnnnnnnnnnnnnnnnnnnnnnnnnnnnnnnnnnnnnnnnnnnnnnnnnnnnnnnnnnnnnnnnnnnnnnnnnnnnnnnnnnnnnnnnnnnnnnnnnnnnnnnnnnnnnnnnnnnnnnnnnnnnnnnnnnnnnnnnnnnnnnnnnnnnnnnnnnnnnnnnnnnnnnnnnnnnnnnnnnnnnnnnnnnnnnnnnnnnnnnnnnnnnnnnnnnnnnnnnnnnnnnnnnnnnnnnnnnnnnnnnnnnnnnnnnnnnnnnnnnnnnnnnnnnnnnnnnnnnnnnnnnnnnnnnnnnnnnnnnnnnnnnnnnnnnnnnnnnnnnnnnnnnnnnnnnnnnnnnnnnnnnnnnnnnnnnnnnnnnnnnnnnnnnnnnnnnnnnnnnnnnnnnnnnnnnnnnnnnnnnnnnnnnnnnnnnnnnnnnnnnnnnnnnnnnnnnnnnnnnnnnnnnnnnnnnnnnnnnnnnnnnnnnnnnnnnnnnnnnnnnnnnnnnnnnnnnnnnnnnnnnnnnnnnnnnnnnnnnnnnnnnnnnnnnnnnnnnnnnnnnnnnnnnnnnnnnnnnnnnnnnnnnnnnnnnnnnnnnnnnnnnnnnnnnnnnnnnnnnnnnnnnnnnnnnnnnnnnnnnnnnnnnnnnnnnnnnnnnnnnnnnnnnnnnnnnnnnnnnnnnnnnnnnnnnnnnnnnnnnnnnnnnnnnnnnnnnnnnnnnnnnnnnnnnnnnnnnnnnnnnnnnnnnnnnnnnnnnnnnnnnnnnnnnnnnnnnnnnnnnnnnnnnnnnnnnnnnnnnnnnnnnnnnnnnnnnnnnnnnnnnnnnnnnnnnnnnnnnnnnnnnnnnnnnnnnnnnnnnnnnnnnnnnnnnnnnnnnnnnnnnnnnnnnnnnnnnnnnnnnnnnnnnnnnnnnnnnnnnnnnnnnnnnnnnnnnnnnnnnnnnnnnnnnnnnnnnnnnnnnnnnnnnnnnnnnnnnnnnnnnnnnnnnnnnnnnnnnnnnnnnnnnnnnnnnnnnnnnnnnnnnnnnnnnnnnnnnnnnnnnnnnnnnnnnnnnnnnnnnnnnnnnnnnnnnnnnnnnnnnnnnnnnnnnnnnnnnnnnnnnnnnnnnnnnnnnnnnnnnnnnnnnnnnnnnnnnnnnnnnnnnnnnnnnnnnnnnnnnnnnnnnnnnnnnnnnnnnnnnnnnnnnnnnnnnnnnnnnnnnnnnnnnnnnnnnnnnnnnnnnnnnnnnnnnnnnnnnnnnnnnnnnnnnnnnnnnnnnnnnnnnnnnnnnnnnnnnnnnnnnnnnnnnnnnnnnnnnnnnnnnnnnnnnnnnnnnnnnnnnnnnnnnnnnnnnnnnnnnnnnnnnnnnnnnnnnnnnnnnnnnnnnnnnnnnnnnnnnnnnnnnnnnnnnnnnnnnnnnnnnnnnnnnnnnnnnnnnnnnnnnnnnnnnnnnnnnnnnnnnnnnnnnnnnnnnnnnnnnnnnnnnnnnnnnnnnnnnnnnnnnnnnnnnnnnnnnnnnnnnnnnnnnnnnnnnnnnnnnnnnnnnnnnnnnnnnnnnnnnnnnnnnnnnnnnnnnnnnnnnnnnnnnnnnnnnnnnnnnnnnnnnnnnnnnnnnnnnnnnnnnnnnnnnnnnnnnnnnnnnnnnnnnnnnnnnnnnnnnnnnnnnnnnnnnnnnnnnnnnnnnnnnnnnnnnnnnnnnnnnnnnnnnnnnnnnnnnnnnnnnnnnnnnnnnnnnnnnnnnnnnnnnnnnnnnnnnnnnnnnnnnnnnnnnnnnnnnnnnnnnnnnnnnnnnnnnnnnnnnnnnnnnnnnnnnnnnnnnnnnnnnnnnnnnnnnnnnnnnnnnnnnnnnnnnnnnnnnnnnnnnnnnnnnnnnnnnnnnnnnnnnnnnnnnnnnnnnnnnnnnnnnnnnnnnnnnnnnnnnnnnnnnnnnnnnnnnnnnnnnnnnnnnnnnnnnnnnnnnnnnnnnnnnnnnnnnnnnnnnnnnnnnnnnnnnnnnnnnnnnnnnnnnnnnnnnnnnnnnnnnnnnnnnnnnnnnnnnnnnnnnnnnnnnnnnnnnnnnnnnnnnnnnnnnnnnnnnnnnnnnnnnnnnnnnnnnnnnnnnnnnnnnnnnnnnnnnnnnnnnnnnnnnnnnnnnnnnnnnnnnnnnnnnnnnnnnnnnnnnnnnnnnnnnnnnnnnnnnnnnnnnnnnnnnnnnnnnnnnnnnnnnnnnnnnnnnnnnnnnnnnnnnnnnnnnnnnnnnnnnnnnnnnnnnnnnnnnnnnnnnnnnnnnnnnnnnnnnnnnnnnnnnnnnnnnnnnnnnnnnnnnnnnnnnnnnnnnnnnnnnnnnnnnnnnnnnnnnnnnnnnnnnnnnnnnnnnnnnnnnnnnnnnnnnnnnnnnnnnnnnnnnnnnnnnnnnnnnnnnnnnnnnnnnnnnnnnnnnnnnnnnnnnnnnnnnnnnnnnnnnnnnnnnnnnnnnnnnnnnnnnnnnnnnnnnnnnnnnnnnnnnnnnnnnnnnnnnnnnnnnnnnnnnnnnnnnnnnnnnnnnnnnnnnnnnnnnnnnnnnnnnnnnnnnnnnnnnnnnnnnnnnnnnnnnnnnnnnnnnnnnnnnnnnnnnnnnnnnnnnnnnnnnnnnnnnnnnnnnnnnnnnnnnnnnnnnnnnnnnnnnnnnnnnnnnnnnnnnnnnnnnnnnnnnnnnnnnnnnnnnnnnnnnnnnnnnnnnnnnnnnnnnnnnnnnnnnnnnnnnnnnnnnnnnnnnnnnnnnnnnnnnnnnnnnnnnnnnnnnnnnnnnnnnnnnnnnnnnnnnnnnnnnnnnnnnnnnnnnnnnnnnnnnnnnnnnnnnnnnnnnnnnnnnnnnnnnnnnnnnnnnnnnnnnnnnnnnnnnnnnnnnnnnnnnnnnnnnnnnnnnnnnnnnnnnnnnnnnnnnnnnnnnnnnnnnnnnnnnnnnnnnnnnnnnnnnnnnnnnnnnnnnnnnnnnnnnnnnnnnnnnnnnnnnnnnnnnnnnnnnnnnnnnnnnnnnnnnnnnnnnnnnnnnnnnnnnnnnnnnnnnnnnnnnnnnnnnnnnnnnnnnnnnnnnnnnnnnnnnnnnnnnnnnnnnnnnnnnnnnnnnnnnnnnnnnnnnnnnnnnnnnnnnnnnnnnnnnnnnnnnnnnnnnnnnnnnnnnnnnnnnnnnnnnnnnnnnnnnnnnnnnnnnnnnnnnnnnnnnnnnnnnnnnnnnnnnnnnnnnnnnnnnnnnnnnnnnnnnnnnnnnnnnnnnnnnnnnnnnnnnnnnnnnnnnnnnnnnnnnnnnnnnnnnnnnnnnnnnnnnnnnnnnnnnnnnnnnnnnnnnnnnnnnnnnnnnnnnnnnnnnnnnnnnnnnnnnnnnnnnnnnnnnnnnnnnnnnnnnnnnnnnnnnnnnnnnnnnnnnnnnnnnnnnnnnnnnnnnnnnnnnnnnnnnnnnnnnnnnnnnnnnnnnnnnnnnnnnnnnnnnnnnnnnnnnnnnnnnnnnnnnnnnnnnnnnnnnnnnnnnnnnnnnnnnnnnnnnnnnnnnnnnnnnnnnnnnnnnnnnnnnnnnnnnnnnnnnnnnnnnnnnnnnnnnnnnnnnnnnnnnnnnnnnnnnnnnnnnnnnnnnnnnnnnnnnnnnnnnnnnnnnnnnnnnnnnnnnnnnnnnnnnnnnnnnnnnnnnnnnnnnnnnnnnnnnnnnnnnnnnnnnnnnnnnnnnnnnnnnnnnnnnnnnnnnnnnnnnnnnnnnnnnnnnnnnnnnnnnnnnnnnnnnnnnnnnnnnnnnnnnnnnnnnnnnnnnnnnnnnnnnnnnnnnnnnnnnnnnnnnnnnnnnnnnnnnnnnnnnnnnnnnnnnnnnnnnnnnnnnnnnnnnnnnnnnnnnnnnnnnnnnnnnnnnnnnnnnnnnnnnnnnnnnnnnnnnnnnnnnnnnnnnnnnnnnnnnnnnnnnnnnnnnnnnnnnnnnnnnnnnnnnnnnnnnnnnnnnnnnnnnnnnnnnnnnnnnnnnnnnnnnnnnnnnnnnnnnnnnnnnnnnnnnnnnnnnnnnnnnnnnnnnnnnnnnnnnnnnnnnnnnnnnnnnnnnnnnnnnnnnnnnnnnnnnnnnnnnnnnnnnnnnnnnnnnnnnnnnnnnnnnnnnnnnnnnnnnnnnnnnnnnnnnnnnnnnnnnnnnnnnnnnnnnnnnnnnnnnnnnnnnnnnnnnnnnnnnnnnnnnnnnnnnnnnnnnnnnnnnnnnnnnnnnnnnnnnnnnnnnnnnnnnnnnnnnnnnnnnnnnnnnnnnnnnnnnnnnnnnnnnnnnnnnnnnnnnnnnnnnnnnnnnnnnnnnnnnnnnnnnnnnnnnnnnnnnnnnnnnnnnnnnnnnnnnnnnnnnnnnnnnnnnnnnnnnnnnnnnnnnnnnnnnnnnnnnnnnnnnnnnnnnnnnnnnnnnnnnnnnnnnnnnnnnnnnnnnnnnnnnnnnnnnnnnnnnnnnnnnnnnnnnnnnnnnnnnnnnnnnnnnnnnnnnnnnnnnnnnnnnnnnnnnnnnnnnnnnnnnnnnnnnnnnnnnnnnnnnnnnnnnnnnnnnnnnnnnnnnnnnnnnnnnnnnnnnnnnnnnnnnnnnnnnnnnnnnnnnnnnnnnnnnnnnnnnnnnnnnnnnnnnnnnnnnnnnnnnnnnnnnnnnnnnnnnnnnnnnnnnnnnnnnnnnnnnnnnnnnnnnnnnnnnnnnnnnnnnnnnnnnnnnnnnnnnnnnnnnnnnnnnnnnnnnnnnnnnnnnnnnnnnnnnnnnnnnnnnnnnnnnnnnnnnnnnnnnnnnnnnnnnnnnnnnnnnnnnnnnnnnnnnnnnnnnnnnnnnnnnnnnnnnnnnnnnnnnnnnnnnnnnnnnnnnnnnnnnnnnnnnnnnnnnnnnnnnnnnnnnnnnnnnnnnnnnnnnnnnnnnnnnnnnnnnnnnnnnnnnnnnnnnnnnnnnnnnnnnnnnnnnnnnnnnnnnnnnnnnnnnnnnnnnnnnnnnnnnnnnnnnnnnnnnnnnnnnnnnnnnnnnnnnnnnnnnnnnnnnnnnnnnnnnnnnnnnnnnnnnnnnnnnnnnnnnnnnnnnnnnnnnnnnnnnnnnnnnnnnnnnnnnnnnnnnnnnnnnnnnnnnnnnnnnnnnnnnnnnnnnnnnnnnnnnnnnnnnnnnnnnnnnnnnnnnnnnnnnnnnnnnnnnnnnnnnnnnnnnnnnnnnnnnnnnnnnnnnnnnnnnnnnnnnnnnnnnnnnnnnnnnnnnnnnnnnnnnnnnnnnnnnnnnnnnnnnnnnnnnnnnnnnnnnnnnnnnnnnnnnnnnnnnnnnnnnnnnnnnnnnnnnnnnnnnnnnnnnnnnnnnnnnnnnnnnnnnnnnnnnnnnnnnnnnnnnnnnnnnnnnnnnnnnnnnnnnnnnnnnnnnnnnnnnnnnnnnnnnnnnnnnnnnnnnnnnnnnnnnnnnnnnnnnnnnnnnnnnnnnnnnnnnnnnnnnnnnnnnnnnnnnnnnnnnnnnnnnnnnnnnnnnnnnnnnnnnnnnnnnnnnnnnnnnnnnnnnnnnnnnnnnnnnnnnnnnnnnnnnnnnnnnnnnnnnnnnnnnnnnnnnnnnnnnnnnnnnnnnnnnnnnnnnnnnnnnnnnnnnnnnnnnnnnnnnnnnnnnnnnnnnnnnnnnnnnnnnnnnnnnnnnnnnnnnnnnnnnnnnnnnnnnnnnnnnnnnnnnnnnnnnnnnnnnnnnnnnnnnnnnnnnnnnnnnnnnnnnnnnnnnnnnnnnnnnnnnnnnnnnnnnnnnnnnnnnnnnnnnnnnnnnnnnnnnnnnnnnnnnnnnnnnnnnnnnnnnnnnnnnnnnnnnnnnnnnnnnnnnnnnnnnnnnnnnnnnnnnnnnnnnnnnnnnnnnnnnnnnnnnnnnnnnnnnnnnnnnnnnnnnnnnnnnnnnnnnnnnnnnnnnnnnnnnnnnnnnnnnnnnnnnnnnnnnnnnnnnnnnnnnnnnnnnnnnnnnnnnnnnnnnnnnnnnnnnnnnnnnnnnnnnnnnnnnnnnnnnnnnnnnnnnnnnnnnnnnnnnnnnnnnnnnnnnnnnnnnnnnnnnnnnnnnnnnnnnnnnnnnnnnnnnnnnnnnnnnnnnnnnnnnnnnnnnnnnnnnnnnnnnnnnnnnnnnnnnnnnnnnnnnnnnnnnnnnnnnnnnnnnnnnnnnnnnnnnnnnnnnnnnnnnnnnnnnnnnnnnnnnnnnnnnnnnnnnnnnnnnnnnnnnnnnnnnnnnnnnnnnnnnnnnnnnnnnnnnnnnnnnnnnnnnnnnnnnnnnnnnnnnnnnnnnnnnnnnnnnnnnnnnnnnnnnnnnnnnnnnnnnnnnnnnnnnnnnnnnnnnnnnnnnnnnnnnnnnnnnnnnnnnnnnnnnnnnnnnnnnnnnnnnnnnnnnnnnnnnnnnnnnnnnnnnnnnnnnnnnnnnnnnnnnnnnnnnnnnnnnnnnnnnnnnnnnnnnnnnnnnnnnnnnnnnnnnnnnnnnnnnnnnnnnnnnnnnnnnnnnnnnnnnnnnnnnnnnnnnnnnnnnnnnnnnnnnnnnnnnnnnnnnnnnnnnnnnnnnnnnnnnnnnnnnnnnnnnnnnnnnnnnnnnnnnnnnnnnnnnnnnnnnnnnnnnnnnnnnnnnnnnnnnnnnnnnnnnnnnnnnnnnnnnnnnnnnnnnnnnnnnnnnnnnnnnnnnnnnnnnnnnnnnnnnnnnnnnnnnnnnnnnnnnnnnnnnnnnnnnnnnnnnnnnnnnnnnnnnnnnnnnnnnnnnnnnnnnnnnnnnnnnnnnnnnnnnnnnnnnnnnnnnnnnnnnnnnnnnnnnnnnnnnnnnnnnnnnnnnnnnnnnnnnnnnnnnnnnnnnnnnnnnnnnnnnnnnnnnnnnnnnnnnnnnnnnnnnnnnnnnnnnnnnnnnnnnnnnnnnnnnnnnnnnnnnnnnnnnnnnnnnnnnnnnnnnnnnnnnnnnnnnnnnnnnnnnnnnnnnnnnnnnnnnnnnnnnnnnnnnnnnnnnnnnnnnnnnnnnnnnnnnnnnnnnnnnnnnnnnnnnnnnnnnnnnnnnnnnnnnnnnnnnnnnnnnnnnnnnnnnnnnnnnnnnnnnnnnnnnnnnnnnnnnnnnnnnnnnnnnnnnnnnnnnnnnnnnnnnnnnnnnnnnnnnnnnnnnnnnnnnnnnnnnnnnnnnnnnnnnnnnnnnnnnnnnnnnnnnnnnnnnnnnnnnnnnnnnnnnnnnnnnnnnnnnnnnnnnnnnnnnnnnnnnnnnnnnnnnnnnnnnnnnnnnnnnnnnnnnnnnnnnnnnnnnnnnnnnnnnnnnnnnnnnnnnnnnnnnnnnnnnnnnnnnnnnnnnnnnnnnnnnnnnnnnnnnnnnnnnnnnnnnnnnnnnnnnnnnnnnnnnnnnnnnnnnnnnnnnnnnnnnnnnnnnnnnnnnnnnnnnnnnnnnnnnnnnnnnnnnnnnnnnnnnnnnnnnnnnnnnnnnnnnnnnnnnnnnnnnnnnnnnnnnnnnnnnnnnnnnnnnnnnnnnnnnnnnnnnnnnnnnnnnnnnnnnnnnnnnnnnnnnnnnnnnnnnnnnnnnnnnnnnnnnnnnnnnnnnnnnnnnnnnnnnnnnnnnnnnnnnnnnnnnnnnnnnnnnnnnnnnnnnnnnnnnnnnnnnnnnnnnnnnnnnnnnnnnnnnnnnnnnnnnnnnnnnnnnnnnnnnnnnnnnnnnnnnnnnnnnnnnnnnnnnnnnnnnnnnnnnnnnnnnnnnnnnnnnnnnnnnnnnnnnnnnnnnnnnnnnnnnnnnnnnnnnnnnnnnnnnnnnnnnnnnnnnnnnnnnnnnnnnnnnnnnnnnnnnnnnnnnnnnnnnnnnnnnnnnnnnnnnnnnnnnnnnnnnnnnnnnnnnnnnnnnnnnnnnnnnnnnnnnnnnnnnnnnnnnnnnnnnnnnnnnnnnnnnnnnnnnnnnnnnnnnnnnnnnnnnnnnnnnnnnnnnnnnnnnnnnnnnnnnnnnnnnnnnnnnnnnnnnnnnnnnnnnnnnnnnnnnnnnnnnnnnnnnnnnnnnnnnnnnnnnnnnnnnnnnnnnnnnnnnnnnnnnnnnnnnnnnnnnnnnnnnnnnnnnnnnnnnnnnnnnnnnnnnnnnnnnnnnnnnnnnnnnnnnnnnnnnnnnnnnnnnnnnnnnnnnnnnnnnnnnnnnnnnnnnnnnnnnnnnnnnnnnnnnnnnnnnnnnnnnnnnnnnnnnnnnnnnnnnnnnnnnnnnnnnnnnnnnnnnnnnnnnnnnnnnnnnnnnnnnnnnnnnnnnnnnnnnnnnnnnnnnnnnnnnnnnnnnnnnnnnnnnnnnnnnnnnnnnnnnnnnnnnnnnnnnnnnnnnnnnnnnnnnnnnnnnnnnnnnnnnnnnnnnnnnnnnnnnnnnnnnnnnnnnnnnnnnnnnnnnnnnnnnnnnnnnnnnnnnnnnnnnnnnnnnnnnnnnnnnnnnnnnnnnnnnnnnnnnnnnnnnnnnnnnnnnnnnnnnnnnnnnnnnnnnnnnnnnnnnnnnnnnnnnnnnnnnnnnnnnnnnnnnnnnnnnnnnnnnnnnnnnnnnnnnnnnnnnnnnnnnnnnnnnnnnnnnnnnnnnnnnnnnnnnnnnnnnnnnnnnnnnnnnnnnnnnnnnnnnnnnnnnnnnnnnnnnnnnnnnnnnnnnnnnnnnnnnnnnnnnnnnnnnnnnnnnnnnnnnnnnnnnnnnnnnnnnnnnnnnnnnnnnnnnnnnnnnnnnnnnnnnnnnnnnnnnnnnnnnnnnnnnnnnnnnnnnnnnnnnnnnnnnnnnnnnnnnnnnnnnnnnnnnnnnnnnnnnnnnnnnnnnnnnnnnnnnnnnnnnnnnnnnnnnnnnnnnnnnnnnnnnnnnnnnnnnnnnnnnnnnnnnnnnnnnnnnnnnnnnnnnnnnnnnnnnnnnnnnnnnnnnnnnnnnnnnnnnnnnnnnnnnnnnnnnnnnnnnnnnnnnnnnnnnnnnnnnnnnnnnnnnnnnnnnnnnnnnnnnnnnnnnnnnnnnnnnnnnnnnnnnnnnnnnnnnnnnnnnnnnnnnnnnnnnnnnnnnnnnnnnnnnnnnnnnnnnnnnnnnnnnnnnnnnnnnnnnnnnnnnnnnnnnnnnnnnnnnnnnnnnnnnnnnnnnnnnnnnnnnnnnnnnnnnnnnnnnnnnnnnnnnnnnnnnnnnnnnnnnnnnnnnnnnnnnnnnnnnnnnnnnnnnnnnnnnnnnnnnnnnnnnnnnnnnnnnnnnnnnnnnnnnnnnnnnnnnnnnnnnnnnnnnnnnnnnnnnnnnnnnnnnnnnnnnnnnnnnnnnnnnnnnnnnnnnnnnnnnnnnnnnnnnnnnnnnnnnnnnnnnnnnnnnnnnnnnnnnnnnnnnnnnnnnnnnnnnnnnnnnnnnnnnnnnnnnnnnnnnnnnnnnnnnnnnnnnnnnnnnnnnnnnnnnnnnnnnnnnnnnnnnnnnnnnnnnnnnnnnnnnnnnnnnnnnnnnnnnnnnnnnnnnnnnnnnnnnnnnnnnnnnnnnnnnnnnnnnnnnnnnnnnnnnnnnnnnnnnnnnnnnnnnnnnnnnnnnnnnnnnnnnnnnnnnnnnnnnnnnnnnnnnnnnnnnnnnnnnnnnnnnnnnnnnnnnnnnnnnnnnnnnnnnnnnnnnnnnnnnnnnnnnnnnnnnnnnnnnnnnnnnnnnnnnnnnnnnnnnnnnnnnnnnnnnnnnnnnnnnnnnnnnnnnnnnnnnnnnnnnnnnnnnnnnngtttcccgtgcgcctgctgcgtcccaggaggcgcgcgctgccgcgacgatgatcctcgagatgctggatgatcccgcgaagtatcactcggtgaccttcaacccggagaccgggctcgtcttgcggcacaacatgccaggacgcctgatgaagcgggtcgccaacaacccgaacgctgccttcatcggtacgtcgcttgccctcggcaggagcttcgatgccttcaagcgtgccatgggcatcgtcagtccgagcggcttgtcatcgatcatcgagcccaagaaccacggcagcctgcgttgccaccacgccgcgcatgcgccgctgtccgaggaatggttcgccgcgctcaagcagagtatcgcgaaggcggcgcgaccctgcctcgtcgtcaccgcggacgagcagcaggcccgggccatcggcttgctgacgcccgaggcgtcggtacgcctttcaggcgactcgccgtcacccgaatcattgacgtccgctggagccgtgctgatcgctgcggcgaactggccgggactcgacgcgccgcgggagtggcgcagcatcatcatcgcccgcgtacccatcgacgccgaatggggtcaggacgaggatgccgacgaacacttcgtcgatccccgcaatcaggccgtcaggctgctcaagaacatcatcggctggggagttcgccgacccgatgccgaatgtgatctttatgtgctcgactatcgcccggggttggtggagtcgctgatcccggctcgattcaagggtgattgggcacagcggcgcgcgatgacgggacgcggggcggcggaggacagcgcgatcgaacgcctcatcgctgccgagcagcctggcaaggcgctgcgtgacgaggtgttccgggtgcttggcaagcgctgcatgacctgcgatctcgtgccgaagccggggataccgctcgagatccatctgctcgggccagtctcggtcagcgaagacgatcgatcgctggccgaggagatggcggtgctctgccagtcatgccaccggctcgcgcattcggtcacgccgccgctctcgatgcccatgctgcgcggcttccacgaacgcaagcgcgcgcgaacctgagtccgtcgccgttgccgcgcaaggcggcttccgtcagatcgccaccgcgtgcacggggctgtccgtggcggcgctacggcgccgcagcgcgaacatgcgcatggttccgtagcctttggcggcagccgtcagaccgacgtagtcgcagcagaactcgtccgcgtgctcgagttcgagcgccgcggcaaaagtttcggtgacatagacgagaccgggtggcgtcaccggctcgatgcgcgccgcaagactcacgtgcgcgccgaagaagttctgtttcagcagcagaggatcgtcggtttcgaacaccggaccgagatgaccgccgagtcgcaaggccaggggttcggcgaaagcgccgctgtcggcagccaacgcctgcatcgcgacctgcaggtcgagggcgcattccgccgcttcgcgggtccggcgaaaaacgaggaacatgccatcgccccaggtgttgaggctgagcacgcgcgcgcgatggctctcgatggcacgtgcgaccccgcccaggacaccatggacgaactgcggcatttcccgatccgatatggtgctgaagcgggtgaagtcgccgaacagcatggctcgcgcccgtcgccggttcctgcgctcgtccgcaggcgccgcagcgttggtttcttgcgcgtcttgcggtgcgttgccgtgatccggcaacggaatgatgcgctgcggccttccggattcgcgccacagtccgacgtcgacggccgttccggccacgccgcgagcgggggtgccgtcccacaccgcaagttgcgccacgctcgtgaaaaggtgttgggaggcgagcacggcaaggcccatggcgatccggctcgagtaggtgaacaacgtgtcgtcgccgagcccggcgccatcggtcgcgtaacggaccgattgcgcggcggcgaggcaacgccgcatccgggtcacccattgcccgccggcgggccgcaccgaggtttcaatgaaatcgtccagaaggaacggcagtaccacatgcagctgcgcaccgcgatcgagcagcgcttcggcaaagaggatgtctgcacctgaggcgagcgaaccatagccgaagcccgctgcgtgctcgtccagtgtctcaccgatggcggcggcgatcgtcgcttcggccgcggccgggaagcgacccgggactccgggtgcggcgatcatgtgacccgtgtagtggatcaccgcgggcggcgtcagggacgccacccacgatggcggcagacccttggcctcggtcgcgtgcttgatcgaacgcgctgcggtggcgagcatggtgtagtcaccattgctcgcttcgcgtgcggcatcgagccttgcctcggccgacacgagatcgccattgatggtatgcgcttcgatcagggttgcgagggaccagaaccgatcttcgccctctgccgtgtccaccatcgtctcgagcgaggcgatcaggcgccgcgccactgcagccgcacgctccggctccccggcaagcagcagcaggttcgcgaaattgatcccggggtaatagtcgccgcgctcgaggtaggccgcttcgtactttgcggccgcggtgcgcagcagggcgagcctctcggcttcatcggtgctggccagggcgagatccttgtccagtcgggcatcgagttcacgcagaccgcgttcgcttcgaccttcgagtcccagtgaaacgaaccattgtcttgcctgccgcgtggcccccgagcgggcgagggcgaggacggctcggtgtttaagcctggtgctgtcgggatgttcgcccagcccgcggcgggcgatgtcgaacgcccggaacgcctcgcctgcacgctcggcttcgcgcaccagcgcataccagtccgcttcgttgcgaccgaccgtcggtgcgtggcgcagatcacccatggtgcattgtttactcgacccgggtccagatcgacttgctgtagaagaagcccctcgattgcttcacttcgagtttgcgacctcccggcagttgcaggatttcggcgcggctgagggatccggtttccggatcgagcaatatcgcctcttcccagacgttctctgcggcgttgaatcgggcgttttgcaagatcgtcagccccatgaacaactgccccttgcgcgaaccgggacagtccttgcagcgcgctgcacgctgcgccgggtcccgaacctcctcgattcgtccccagagttttcctgacagcaatgaaatgcgcacgaggaagccgcccgggtcgctctcggcttcgtgggtcagccagagtcccgtcggcggtggcggcggggtcgcgaaggaaaatgttgatacaccgatcaggaggatggaaaagagaagctttacacgcatgttccgttcacctccgccagctgtggagcgcccgcgatgcgcctgcgtcaccgatcctcaaaccgccctttcaacgcgaaccagtcgcccgacgcccgcagcccggcccgcttcgatgtcgcgctcgctgtcgccgatgaggatcgacgctgcagggtcgatgccgagctcgcggatcgcacgcaggatcattcccggtgccggcttgcgacagtcgcaggatcgcgtgaattgcgcaacggtaccctgcgggtgatgcgggcagtggtacaccgcggcgatacggatgccctgcgccgccaaggcttcgcgatagcgatccgtgagcagttcatagtccgcctcggagaagtagccccgcgcgatgccggactggttggtgatcacgaccagcagataaccctcgtcggccagccgctgcaacatcgcgacggcgtccggtgcgaacctgaagtcctcccagcgaccgacatacccggagtcgacgttgatcaccccgtcgcggtcgatgaacgcggctttgcgcaggccggacatggagcctccggtcagcgggccggatcgcccagtttcgagaggatgcgggtggtggacaggccgggcacgaggtcgaggatggccacctggccgcccgctgccgtgacacaccgtccgccggcgacttcgccggcgatgtagtccccgcctttcacgagtacctgcggcaacacctcgcagtagagatgttccggcgtgtcttcctcgaaggcgacgagatagtcgacgcactccagcatgccgaggaccgtgagtcggtgctcgagcggattgaccggccgcgtcggccccttgagccgacgtaccgaggcgtcgtcgttgacggccacgaccagcaggtcaccgagctcccgcgctcgccgcaggaggtcgacgtgtccggcgtgcagcacatcgaagcaaccgttggtcatcaccgtcgcccggcccgccgccttcgcggcggcgacgatttctttgagtgcgcgccggtcgacgaccttgcgcagcaggcccgaagcgggtgatgaggatctcgcgtggagaatctccgctacggtggtggtggccgttcccgacttggcgacgacgagaccggcagcgatgttcgcccagtcgacggcctcgcgcagcggtacgcccgaccccagcgccgccgccagagtcgcgaccaccgtgtcgccggcaccggtgacatcgaagacctcgcgggcgcgactggccagatgcagcggctccgcattgcgctcgagcagggtcatgccatgttcgccgcgggtgacgagcagagcttcgagacccagccggtcgcgcaggttgacgccgcgttcgacgatgctgcgttcgtccgcgcagcgacccaccaccgcctcgaactcggcgagattcggcgtgatcaccgtggcgccgcaatagcgcatgaagtccgttcccttcgggtcgaccaccacgggtttgccgagagcgcgggcagcctcgatcatctgcggcgtctcgctgccgaggaagcccttcgcgtaatccgagagcaccagcacgtcggcaccttcgagacgagcgcggatgccatcgaccttgctcgcgcccgaaagacccgccagaccgtgctcgaagtcgagtcgtaccagttgttgccggcgcgacatcacccgcagtttgcggatggtctgcgcgcctgcgacctgcatcaggccgtgggcgatgccgcgctggtcgaggagccgtccgagttccgcgcctgctgcatcgtcaccgatgagtccgaccagcgtcgcccgcgcgcccagcgccacgatgttgagcgccacattggccgcgccgccgggacgtgtctcctcgaagtcgaccagcaccaccggcacgggcgcctcgggggagatgcgcgaggtcgttcccacccagtaggtgtcggccatgacatcgccggcgacgagtacctgcgccgcaccgaagtcgagtactccctggattttcatcggccggacgggggtgcaacgagcccaagggcaatctcgacatctgcgcacagcgtatgtgcgaggaagatgtgcgcttcctggatcctcgcggtgtcgtccgacggcacgatcaaagaaatatcgcagagcggcggcatcttgccgccatcgcggccgagcaggcctatccgggtgatgccgagctcgccggcggcctgcagtgccacgagaacgttgggggaattgccggatgtggaaatgccgagcaggcagtcgccccggcggccgatggcgcggacctggcgcgcaaacacctgttcgtagccatagtcgttgccgatgcaggtgagcgccgaggtatccgtggtcagggcgatcgcagcgagcggatcgcgctctgcacgaagccgtccggtcagctcggcggcgatgtgctggcaatcggcggcggaaccgccgttgccgcagagcagcagcttgcctccgccgcgcagcgaatcggcgatcgcgcgggttgctgccgcgaggacaggctgcagcccggccactcgttgaaaggtttcaaggtgcgcctgcagcgcatcggggaacgtactcatcctcgggtcacctctggcgaattgtagatcacccgcgcgctcttcgctgccgatcggccatgacagtggcgggggtattggatacccttgccggcaatgtcgaaaagcttccgaaacgggtcgtcgggacgggcgaacaagccgcttcccccgtccctccaggggctcttcagccaggctgtggcccgtcatcaggccgggcgtatccacgaggcgctcggcttctatgaacgcgtgctcgaaggttcgccccggcacttcgacagcctgaatctgggcggcctcgccagtcttcaggcgggtgatccggggcgcggcgcgcgctggctcgcggctgcggtcgaactcaaccccggcaacgtggcaacccggaataacctgggcgtcgccttgctcgatctggggcgcagtgccgaggccctggctgcgttcgacctggccatcgggctacagcgcgatttcgtcgatgcccacttcaatcgcggcaagaccctgcttgcgctggcgcggttcgagcaggccgtggacgccttcgatgcagcggcgcgcctcaagcccgcgcatgccgaggcgctgcagtaccgcggcgtcgccttgaagatgctcggccgcaacgacgaggctctcgccagtttcgaggccgccctcgcgatccgcgccgactatccggatgcgcacaacaaccgcggcgtcacgctgttcgaaacgggccgatacgaggaggcgatcgcggcgtttggcgaggtgctgcgcctgagcggcccgcatcccgatccgtacaacaacctcgggcgcgcgttgcaggagttgcgacgcccggccgaggcgatcgatgcattcgatgctgcgctcaaactccgccccgattacgccgatgccctgaacagtcgcggaaactcgctgctcgagttgcgacgtctcgaggaggccctggcgagcttcgaagcggcgatccgtcatcgtccggggtatgtcgaggcgatcaacaatcgcggcaacgcactgttggagttgcggcgcttcgacgcggcgatcgtcgagtacgacctggcgctgcgcttgcggcccgacttcgccgaggcgcacgtcaaccgcagcaatgcgctgatgcagctggctagacccgtcgcggctctggcggatctcgatgcggcggtccgcctgcagcccgaacttgccggagcccacctcaaccgcgcgcatctttggctgaacaccggcgactatccgcagggctggcgcgaattcgagtggcgctggaaggtgcagggtcgtgccgtggtcgccttgcgcagcgccgcgcatggcctttggctcggacaggagcctattgccggatccactctggtcatctgtcacgagcaaggcgtgggcgacacgctgcagttctgccgttacggtcttttggccgccgcggcgggtgcacgcgtcgttgcgctggtgccgaaaccgctgacgcgcctgatgtccgcgcagccgtgggtgtcgcaagtggtggaaaccgggcagaccctgccgcccttcgacttccactgtccgatgatgtcgctgccgctggcattcggtacgacgctcgagacgattccgttcggtgacgcgccgtacctgctggcgccaaccggcgacgtggagcgctggggccagtggctggccgaacgtctgccgggctcctccgcagtcgccgacggcggccggcagctgcgcgtgggtctcgtctggaacggcggctttcgtgccgatcagcccgaactctgggcggtcaatgaacgtcgcaacgtgccgctgggccttttcgccgcggccctcgatctgccgggtatcgacttcgtcagcctgcagaagggcgacccggcggagtccgagctgcgtggtcgggagcgcgagttctggaaagttgcgaccttgctgaacccggcgtcggaactcaccgacttcgccgacacagccggcttgatcgcgaaccttgatctggtgatcagcgtggacacctcgacggcgcatctggccgcggcgatgggcaagccgacgtggatcctgaaccgctacgacacctgctggcggtggctgttcgatcgggaagacagtccgtggtatggatcggtgaagctgttccggcagggcgcggatcgcgactggcgacccgtgctcgagcgagtgtccagcgccctgcaatacgttgtcggaggtgcgtgatgagacgtggttttcgcgagcctggcgggcgcaccacccagcaacgcctcgaggccgccgtcgaactgcatcgcgccgggcgtctggaagaggccctgaaggcctacaggaatctcgcgcaggccgatccgacgaacttccacgcgctgcatctcggcgggctcgtcagcgtgcagctcggcgatcgcgcgcgcggcgtcgagatgctcagggcggcgatcaagatcaatcccgacgtgcccaccgcccacaacaactgtggcgtcgccttgctgggtctcggtcggcacgaggaggcgctggcgagtttcgacagcgccattgcactgcagcaagactacttcgacgccatcatcaaccgcggcaacgccctgaaggaactcggcaagctcgaggatgcgctcgcgagcttcgatcttgcgatcaagctgcagcgcgacaacgccgatgcgcacttcaaccgcggcaatacgctggtgcagctgcgacgcttcggtgaggccatcaccgcgttcgacgccacgctgcgtttgcagccgggcaatctcgatgccgtccagtcgcgtggcgcggcgctgcagggcctgcagcggcaccgcgaggccatcgcggcgttcgacaccgtgctcgcgcagcgcgcggacagcgtcgacgtcctcaccaatcgcggcgtcagtcagctcgaactcggcaaccacgaggatgcgctggccagtttcgatgcggctctcgcgttgcgcgccgaccaccccgaggctctcaacaaccgcggttcggcgctgcaaaagctcaagcgattcgcagaggccgtggacagttacgacgcggcgatccgccaccgacccgactaccacgaagcgtggagcaatcgcggcggcacgctctgggcgctggggcgccacgacgaggctctcgagagtttcgacacggcactgcgactcaagcccgacgccgtggagatcaggacgacccgcggcaatgcctgcctcgaactcggccgctacgccgaggctttgtcggagtacgacaaggccatcgagacccagcccgattgcgccgaagcgcactgggacaaggcgaacgccatgctgcgttacggcgactacgaccgcggctgggccgaatacgaatggcgctgggagctgaagtccggcaaaccgctcggcacgcgcggtccccgcgaaaccctgtggacgggccgcgagcccgtgagcggcaagaccctgctgctgcaggccgagcagggtcttggagacacgttgcagctggtgcgctacgtatccttactggcgcgaatgggcgcacgagtggtgctgcagctgccacagccgctggcccggttgctgcaggatatgcccggtgtagcgcaggtggtcccgacgggccagctggctccgcgtcacgacttgcattgctcgatgatgtcgctgccgctggctttcgggacgacgctcgagaacattccgttcgccaaagaggcgtacctgcaggcgctgcccggtgacgtggagcgctggggcaagtggctcgaggaacatctttcgggttcgtccgcagaagcggcgacggccggcggcggcaaccgccgcccgcgcgtgggcctggtgtggaacggcggcttccgcgccgaccagcccgatctctg

SEQ ID NO: 42 - DNA, 19862 bp, Artificial Sequence
  Synthetic Oligonucleotide
  misc_feature (1)..(8424): n is a, c, g, or t
nnnnnnnnnnnnnnnnnnnnnnnnnnnnnnnnnnnnnnnnnnnnnnnnnnnnnnnnnnnnnnnnnnnnnnnnnnnnnnnnnnnnnnnnnnnnnnnnnnnnnnnnnnnnnnnnnnnnnnnnnnnnnnnnnnnnnnnnnnnnnnnnnnnnnnnnnnnnnnnnnnnnnnnnnnnnnnnnnnnnnnnnnnnnnnnnnnnnnnnnnnnnnnnnnnnnnnnnnnnnnnnnnnnnnnnnnnnnnnnnnnnnnnnnnnnnnnnnnnnnnnnnnnnnnnnnnnnnnnnnnnnnnnnnnnnnnnnnnnnnnnnnnnnnnnnnnnnnnnnnnnnnnnnnnnnnnnnnnnnnnnnnnnnnnnnnnnnnnnnnnnnnnnnnnnnnnnnnnnnnnnnnnnnnnnnnnnnnnnnnnnnnnnnnnnnnnnnnnnnnnnnnnnnnnnnnnnnnnnnnnnnnnnnnnnnnnnnnnnnnnnnnnnnnnnnnnnnnnnnnnnnnnnnnnnnnnnnnnnnnnnnnnnnnnnnnnnnnnnnnnnnnnnnnnnnnnnnnnnnnnnnnnnnnnnnnnnnnnnnnnnnnnnnnnnnnnnnnnnnnnnnnnnnnnnnnnnnnnnnnnnnnnnnnnnnnnnnnnnnnnnnnnnnnnnnnnnnnnnnnnnnnnnnnnnnnnnnnnnnnnnnnnnnnnnnnnnnnnnnnnnnnnnnnnnnnnnnnnnnnnnnnnnnnnnnnnnnnnnnnnnnnnnnnnnnnnnnnnnnnnnnnnnnnnnnnnnnnnnnnnnnnnnnnnnnnnnnnnnnnnnnnnnnnnnnnnnnnnnnnnnnnnnnnnnnnnnnnnnnnnnnnnnnnnnnnnnnnnnnnnnnnnnnnnnnnnnnnnnnnnnnnnnnnnnnnnnnnnnnnnnnnnnnnnnnnnnnnnnnnnnnnnnnnnnnnnnnnnnnnnnnnnnnnnnnnnnnnnnnnnnnnnnnnnnnnnnnnnnnnnnnnnnnnnnnnnnnnnnnnnnnnnnnnnnnnnnnnnnnnnnnnnnnnnnnnnnnnnnnnnnnnnnnnnnnnnnnnnnnnnnnnnnnnnnnnnnnnnnnnnnnnnnnnnnnnnnnnnnnnnnnnnnnnnnnnnnnnnnnnnnnnnnnnnnnnnnnnnnnnnnnnnnnnnnnnnnnnnnnnnnnnnnnnnnnnnnnnnnnnnnnnnnnnnnnnnnnnnnnnnnnnnnnnnnnnnnnnnnnnnnnnnnnnnnnnnnnnnnnnnnnnnnnnnnnnnnnnnnnnnnnnnnnnnnnnnnnnnnnnnnnnnnnnnnnnnnnnnnnnnnnnnnnnnnnnnnnnnnnnnnnnnnnnnnnnnnnnnnnnnnnnnnnnnnnnnnnnnnnnnnnnnnnnnnnnnnnnnnnnnnnnnnnnnnnnnnnnnnnnnnnnnnnnnnnnnnnnnnnnnnnnnnnnnnnnnnnnnnnnnnnnnnnnnnnnnnnnnnnnnnnnnnnnnnnnnnnnnnnnnnnnnnnnnnnnnnnnnnnnnnnnnnnnnnnnnnnnnnnnnnnnnnnnnnnnnnnnnnnnnnnnnnnnnnnnnnnnnnnnnnnnnnnnnnnnnnnnnnnnnnnnnnnnnnnnnnnnnnnnnnnnnnnnnnnnnnnnnnnnnnnnnnnnnnnnnnnnnnnnnnnnnnnnnnnnnnnnnnnnnnnnnnnnnnnnnnnnnnnnnnnnnnnnnnnnnnnnnnnnnnnnnnnnnnnnnnnnnnnnnnnnnnnnnnnnnnnnnnnnnnnnnnnnnnnnnnnnnnnnnnnnnnnnnnnnnnnnnnnnnnnnnnnnnnnnnnnnnnnnnnnnnnnnnnnnnnnnnnnnnnnnnnnnnnnnnnnnnnnnnnnnnnnnnnnnnnnnnnnnnnnnnnnnnnnnnnnnnnnnnnnnnnnnnnnnnnnnnnnnnnnnnnnnnnnnnnnnnnnnnnnnnnnnnnnnnnnnnnnnnnnnnnnnnnnnnnnnnnnnnnnnnnnnnnnnnnnnnnnnnnnnnnnnnnnnnnnnnnnnnnnnnnnnnnnnnnnnnnnnnnnnnnnnnnnnnnnnnnnnnnnnnnnnnnnnnnnnnnnnnnnnnnnnnnnnnnnnnnnnnnnnnnnnnnnnnnnnnnnnnnnnnnnnnnnnnnnnnnnnnnnnnnnnnnnnnnnnnnnnnnnnnnnnnnnnnnnnnnnnnnnnnnnnnnnnnnnnnnnnnnnnnnnnnnnnnnnnnnnnnnnnnnnnnnnnnnnnnnnnnnnnnnnnnnnnnnnnnnnnnnnnnnnnnnnnnnnnnnnnnnnnnnnnnnnnnnnnnnnnnnnnnnnnnnnnnnnnnnnnnnnnnnnnnnnnnnnnnnnnnnnnnnnnnnnnnnnnnnnnnnnnnnnnnnnnnnnnnnnnnnnnnnnnnnnnnnnnnnnnnnnnnnnnnnnnnnnnnnnnnnnnnnnnnnnnnnnnnnnnnnnnnnnnnnnnnnnnnnnnnnnnnnnnnnnnnnnnnnnnnnnnnnnnnnnnnnnnnnnnnnnnnnnnnnnnnnnnnnnnnnnnnnnnnnnnnnnnnnnnnnnnnnnnnnnnnnnnnnnnnnnnnnnnnnnnnnnnnnnnnnnnnnnnnnnnnnnnnnnnnnnnnnnnnnnnnnnnnnnnnnnnnnnnnnnnnnnnnnnnnnnnnnnnnnnnnnnnnnnnnnnnnnnnnnnnnnnnnnnnnnnnnnnnnnnnnnnnnnnnnnnnnnnnnnnnnnnnnnnnnnnnnnnnnnnnnnnnnnnnnnnnnnnnnnnnnnnnnnnnnnnnnnnnnnnnnnnnnnnnnnnnnnnnnnnnnnnnnnnnnnnnnnnnnnnnnnnnnnnnnnnnnnnnnnnnnnnnnnnnnnnnnnnnnnnnnnnnnnnnnnnnnnnnnnnnnnnnnnnnnnnnnnnnnnnnnnnnnnnnnnnnnnnnnnnnnnnnnnnnnnnnnnnnnnnnnnnnnnnnnnnnnnnnnnnnnnnnnnnnnnnnnnnnnnnnnnnnnnnnnnnnnnnnnnnnnnnnnnnnnnnnnnnnnnnnnnnnnnnnnnnnnnnnnnnnnnnnnnnnnnnnnnnnnnnnnnnnnnnnnnnnnnnnnnnnnnnnnnnnnnnnnnnnnnnnnnnnnnnnnnnnnnnnnnnnnnnnnnnnnnnnnnnnnnnnnnnnnnnnnnnnnnnnnnnnnnnnnnnnnnnnnnnnnnnnnnnnnnnnnnnnnnnnnnnnnnnnnnnnnnnnnnnnnnnnnnnnnnnnnnnnnnnnnnnnnnnnnnnnnnnnnnnnnnnnnnnnnnnnnnnnnnnnnnnnnnnnnnnnnnnnnnnnnnnnnnnnnnnnnnnnnnnnnnnnnnnnnnnnnnnnnnnnnnnnnnnnnnnnnnnnnnnnnnnnnnnnnnnnnnnnnnnnnnnnnnnnnnnnnnnnnnnnnnnnnnnnnnnnnnnnnnnnnnnnnnnnnnnnnnnnnnnnnnnnnnnnnnnnnnnnnnnnnnnnnnnnnnnnnnnnnnnnnnnnnnnnnnnnnnnnnnnnnnnnnnnnnnnnnnnnnnnnnnnnnnnnnnnnnnnnnnnnnnnnnnnnnnnnnnnnnnnnnnnnnnnnnnnnnnnnnnnnnnnnnnnnnnnnnnnnnnnnnnnnnnnnnnnnnnnnnnnnnnnnnnnnnnnnnnnnnnnnnnnnnnnnnnnnnnnnnnnnnnnnnnnnnnnnnnnnnnnnnnnnnnnnnnnnnnnnnnnnnnnnnnnnnnnnnnnnnnnnnnnnnnnnnnnnnnnnnnnnnnnnnnnnnnnnnnnnnnnnnnnnnnnnnnnnnnnnnnnnnnnnnnnnnnnnnnnnnnnnnnnnnnnnnnnnnnnnnnnnnnnnnnnnnnnnnnnnnnnnnnnnnnnnnnnnnnnnnnnnnnnnnnnnnnnnnnnnnnnnnnnnnnnnnnnnnnnnnnnnnnnnnnnnnnnnnnnnnnnnnnnnnnnnnnnnnnnnnnnnnnnnnnnnnnnnnnnnnnnnnnnnnnnnnnnnnnnnnnnnnnnnnnnnnnnnnnnnnnnnnnnnnnnnnnnnnnnnnnnnnnnnnnnnnnnnnnnnnnnnnnnnnnnnnnnnnnnnnnnnnnnnnnnnnnnnnnnnnnnnnnnnnnnnnnnnnnnnnnnnnnnnnnnnnnnnnnnnnnnnnnnnnnnnnnnnnnnnnnnnnnnnnnnnnnnnnnnnnnnnnnnnnnnnnnnnnnnnnnnnnnnnnnnnnnnnnnnnnnnnnnnnnnnnnnnnnnnnnnnnnnnnnnnnnnnnnnnnnnnnnnnnnnnnnnnnnnnnnnnnnnnnnnnnnnnnnnnnnnnnnnnnnnnnnnnnnnnnnnnnnnnnnnnnnnnnnnnnnnnnnnnnnnnnnnnnnnnnnnnnnnnnnnnnnnnnnnnnnnnnnnnnnnnnnnnnnnnnnnnnnnnnnnnnnnnnnnnnnnnnnnnnnnnnnnnnnnnnnnnnnnnnnnnnnnnnnnnnnnnnnnnnnnnnnnnnnnnnnnnnnnnnnnnnnnnnnnnnnnnnnnnnnnnnnnnnnnnnnnnnnnnnnnnnnnnnnnnnnnnnnnnnnnnnnnnnnnnnnnnnnnnnnnnnnnnnnnnnnnnnnnnnnnnnnnnnnnnnnnnnnnnnnnnnnnnnnnnnnnnnnnnnnnnnnnnnnnnnnnnnnnnnnnnnnnnnnnnnnnnnnnnnnnnnnnnnnnnnnnnnnnnnnnnnnnnnnnnnnnnnnnnnnnnnnnnnnnnnnnnnnnnnnnnnnnnnnnnnnnnnnnnnnnnnnnnnnnnnnnnnnnnnnnnnnnnnnnnnnnnnnnnnnnnnnnnnnnnnnnnnnnnnnnnnnnnnnnnnnnnnnnnnnnnnnnnnnnnnnnnnnnnnnnnnnnnnnnnnnnnnnnnnnnnnnnnnnnnnnnnnnnnnnnnnnnnnnnnnnnnnnnnnnnnnnnnnnnnnnnnnnnnnnnnnnnnnnnnnnnnnnnnnnnnnnnnnnnnnnnnnnnnnnnnnnnnnnnnnnnnnnnnnnnnnnnnnnnnnnnnnnnnnnnnnnnnnnnnnnnnnnnnnnnnnnnnnnnnnnnnnnnnnnnnnnnnnnnnnnnnnnnnnnnnnnnnnnnnnnnnnnnnnnnnnnnnnnnnnnnnnnnnnnnnnnnnnnnnnnnnnnnnnnnnnnnnnnnnnnnnnnnnnnnnnnnnnnnnnnnnnnnnnnnnnnnnnnnnnnnnnnnnnnnnnnnnnnnnnnnnnnnnnnnnnnnnnnnnnnnnnnnnnnnnnnnnnnnnnnnnnnnnnnnnnnnnnnnnnnnnnnnnnnnnnnnnnnnnnnnnnnnnnnnnnnnnnnnnnnnnnnnnnnnnnnnnnnnnnnnnnnnnnnnnnnnnnnnnnnnnnnnnnnnnnnnnnnnnnnnnnnnnnnnnnnnnnnnnnnnnnnnnnnnnnnnnnnnnnnnnnnnnnnnnnnnnnnnnnnnnnnnnnnnnnnnnnnnnnnnnnnnnnnnnnnnnnnnnnnnnnnnnnnnnnnnnnnnnnnnnnnnnnnnnnnnnnnnnnnnnnnnnnnnnnnnnnnnnnnnnnnnnnnnnnnnnnnnnnnnnnnnnnnnnnnnnnnnnnnnnnnnnnnnnnnnnnnnnnnnnnnnnnnnnnnnnnnnnnnnnnnnnnnnnnnnnnnnnnnnnnnnnnnnnnnnnnnnnnnnnnnnnnnnnnnnnnnnnnnnnnnnnnnnnnnnnnnnnnnnnnnnnnnnnnnnnnnnnnnnnnnnnnnnnnnnnnnnnnnnnnnnnnnnnnnnnnnnnnnnnnnnnnnnnnnnnnnnnnnnnnnnnnnnnnnnnnnnnnnnnnnnnnnnnnnnnnnnnnnnnnnnnnnnnnnnnnnnnnnnnnnnnnnnnnnnnnnnnnnnnnnnnnnnnnnnnnnnnnnnnnnnnnnnnnnnnnnnnnnnnnnnnnnnnnnnnnnnnnnnnnnnnnnnnnnnnnnnnnnnnnnnnnnnnnnnnnnnnnnnnnnnnnnnnnnnnnnnnnnnnnnnnnnnnnnnnnnnnnnnnnnnnnnnnnnnnnnnnnnnnnnnnnnnnnnnnnnnnnnnnnnnnnnnnnnnnnnnnnnnnnnnnnnnnnnnnnnnnnnnnnnnnnnnnnnnnnnnnnnnnnnnnnnnnnnnnnnnnnnnnnnnnnnnnnnnnnnnnnnnnnnnnnnnnnnnnnnnnnnnnnnnnnnnnnnnnnnnnnnnnnnnnnnnnnnnnnnnnnnnnnnnnnnnnnnnnnnnnnnnnnnnnnnnnnnnnnnnnnnnnnnnnnnnnnnnnnnnnnnnnnnnnnnnnnnnnnnnnnnnnnnnnnnnnnnnnnnnnnnnnnnnnnnnnnnnnnnnnnnnnnnnnnnnnnnnnnnnnnnnnnnnnnnnnnnnnnnnnnnnnnnnnnnnnnnnnnnnnnnnnnnnnnnnnnnnnnnnnnnnnnnnnnnnnnnnnnnnnnnnnnnnnnnnnnnnnnnnnnnnnnnnnnnnnnnnnnnnnnnnnnnnnnnnnnnnnnnnnnnnnnnnnnnnnnnnnnnnnnnnnnnnnnnnnnnnnnnnnnnnnnnnnnnnnnnnnnnnnnnnnnnnnnnnnnnnnnnnnnnnnnnnnnnnnnnnnnnnnnnnnnnnnnnnnnnnnnnnnnnnnnnnnnnnnnnnnnnnnnnnnnnnnnnnnnnnnnnnnnnnnnnnnnnnnnnnnnnnnnnnnnnnnnnnnnnnnnnnnnnnnnnnnnnnnnnnnnnnnnnnnnnnnnnnnnnnnnnnnnnnnnnnnnnnnnnnnnnnnnnnnnnnnnnnnnnnnnnnnnnnnnnnnnnnnnnnnnnnnnnnnnnnnnnnnnnnnnnnnnnnnnnnnnnnnnnnnnnnnnnnnnnnnnnnnnnnnnnnnnnnnnnnnnnnnnnnnnnnnnnnnnnnnnnnnnnnnnnnnnnnnnnnnnnnnnnnnnnnnnnnnnnnnnnnnnnnnnnnnnnnnnnnnnnnnnnnnnnnnnnnnnnnnnnnnnnnnnnnnnnnnnnnnnnnnnnnnnnnnnnnnnnnnnnnnnnnnnnnnnnnnnnnnnnnnnnnnnnnnnnnnnnnnnnnnnnnnnnnnnnnnnnnnnnnnnnnnnnnnnnnnnnnnnnnnnnnnnnnnnnnnnnnnnnnnnnnnnnnnnnnnnnnnnnnnnnnnnnnnnnnnnnnnnnnnnnnnnnnnnnnnnnnnnnnnnnnnnnnnnnnnnnnnnnnnnnnnnnnnnnnnnnnnnnnnnnnnnnnnnnnnnnnnnnnnnnnnnnnnnnnnnnnnnnnnnnnnnnnnnnnnnnnnnnnnnnnnnnnnnnnnnnnnnnnnnnnnnnnnnnnnnnnnnnnnnnnnnnnnnnnnnnnnnnnnnnnnnnnnnnnnnnnnnnnnnnnnnnnnnnnnnnnnnnnnnnnnnnnnnnnnnnnnnnnnnnnnnnnnnnnnnnnnnnnnnnnnnnnnnnnnnnnnnnnnnnnnnnnnnnnnnnnnnnnnnnnnnnnnnnnnnnnnnnnnnnnnnnnnnnnnnnnnnnnnnnnnnnnnnnnnnnnnnnnnnnnnnnnnnnnnnnnnnnnnnnnnnnnnnnnnnnnnnnnnnnnnnnnnnnnnnnnnnnnnnnnnnnnnnnnnnnnnnnnnnnnnnnnnnnnnnnnnnnnnnnnnnnnnnnnnnnnnnnnnnnnnnnnnnnnnnnnnnnnnnnnnnnnnnnnnnnnnnnnnnnnnnnnnnnnnnnnnnnnnnnnnnnnnnnnnnnnnnnnnnnnnnnnnnnnnnnnnnnnnnnnnnnnnnnnnnnnnnnnnnnnnnnnnnnnnnnnnnnnnnnnnnnnnnnnnnnnnnnnnnnnnnnnnnnnnnnnnnnnnnnnnnnnnnnnnnnnnnnnnnnnnnnnnnnnnnnnnnnnnnnnnnnnnnnnnnnnnnnnnnnnnnnnnnnnnnnnnnnnnnnnnnnnnnnnnnnnnnnnnnnnnnnnnnnnnnnnnnnnnnnnnnnnnnnnnnnnnnnnnnnnnnnnnnnnnnnnnnnnnnnnnnnnnnnnnnnnnnnnnnnnnnnnnnnnnnnnnnnnnnnnnnnnnnnnnnnnnnnnnnnnnnnnnnnnnnnnnnnnnnnnnnnnnnnnnnnnnnnnnnnnnnnnnnnnnnnnnnnnnnnnnnnnnnnnnnnnnnnnnnnnnnnnnnnnnnnnnnnnnnnnnnnnnnnnnnnnnnnnnnnnnnnnnnnnnnnnnnnnnnnnnnnnnnnnnnnnnnnnnnnnnnnnnnnnnnnnnnnnnnnnnnnnnnnnnnnnnnnnnnnnnnnnnnnnnnnnnnnnnnnnnnnnnnnnnnnnnnnnnnnnnnnnnnnnnnnnnnnnnnnnnnnnnnnnnnnnnnnnnnnnnnnnnnnnnnnnnnnnnnnnnnnnnnnnnnnnnnnnnnnnnnnnnnnnnnnnnnnnnnnnnnnnnnnnnnnnnnnnnnnnnnnnnnnnnnnnnnnnnnnnnnnnnnnnnnnnnnnnnnnnnnnnnnnnnnnnnnnnnnnnnnnnnnnnnnnnnnnnnnnnnnnnnnnnnnnnnnnnnnnnnnnnnnnnnnnnnnnnnnnnnnnnnnnnnnnnnnnnnnnnnnnnnncgacctgccgatgatcgaactcgcgctcgacgcgctgagccgccgcccgctgctgggggcgcaggtggcgcgcggctgcggcgaggtggcgggcagcttcgatgtgctgcgcgacggcgtgctgatccggcgcatcagcgtgggcggctggaagccggcgcagatgaccgagttcgccgctgcggcgtgaggaaaattgcgacttcttgcgggcgcgaagagccgattgcgctaggcaatcagaggcttgcagcgcctcgggtcaagccacccctcgtttgggtggctactggaactccctgcaaaggactcccgcatcatggacaggtcaagccacccctcgtttgggtggctactggaacaacttctggaaacgaacggacacgttgcggggtcaagccacccctcgtttgggtggctactggaaccggatgccgaaggtccaagtgcccgccgccggtcaagccacctcgttcgggtggctactggaactcgccgcgtcttgctgcctgccgtctctggggtcaagccacccctcgtttgggtggctactggaacgacgccgaggtgcagtccctcatcctcaccggtcaagccacccctcgtttgggtggctactggaacaagctggctagcgaggaatggttgaagaacggtcaagccacccctcgtttgggtggctactggaaccgcgagcggatcgtccacggttcggcagcgggtcaagccacccctcgtttgggtggctactggaaccagttattgaagcgggtccgtggctcgcgcaatcaagccacctctcgtttaggtggctactggaactccatcaggccgacgtgcgtgaccgtgcccgatcaagccacccctcgtttgggtggctactggaactcgtcggcgagaatgacggtgatgctgttgagtcaagccacccctcgtttgggtggctactggaactacctgcaagaccgcaccgaggccccggccagtcaagccacccctcgtttgggtggctactggaactgggcgtactgaaacgcctcttgcgcctcgggtcaagccacccctcgtttgggtggctactggaacgacaagctcgccgccgccgctgaagcgcagggtcaagccacccctcgtttgggtggttactggaactgcacgatgcgttgccgctgctcttgctcgggtcaagccacccctcgtttgggtggctacttgaagttcgcttcggcgtcttcgtcggaggcatccgctcaagccacccctcgtttgggtggctactggaacgaggccaacgaactcatgcgtcacgtcgagggtcaagccacccctcgtttgggtggctactggaagaagggcgtcaactggttgcgccgcgcgaccgcctaagccaccgcattggtgcgtggctactgtgcacgtccggcttgctaacaggtgttagcaagtccgaaggcatcgctaggacgacgcccccgtgggcgcaccgcgcggtgatcactggccagccctacaacggccggcatgatcgggtagcgcaggacgctgcgcgatcaagggcaaggagactgggcatccgtgtttcgcaccactgagcaggccaacttcgcaaacgtgatggcggcgcatctgcccgcgcccgatgcacccctgctgctcgaagggggcgtgggcatcggcaagacgcgcgcctacctgcacgctgccgtgcagtcgggccagcggattgcggtcgtcgtgcccacgcaccagctcatcgaccagttgctcgcctcggccgacctgacagccgtgcgcggcgaggccacagtggcggccttccggccggcgcggatgttcgagcggcggcgcgagtacgaagagcagcgcgaggccgccgcccacgcgcagatcatggtgtgcacggcggcctcggtggtgatcgatcagcgcctcgccggcgaatacaacggctcgaccaccgcgcgcgactacctgatcttcgacgaggccgaccagttgcccgacatggcggcgctgcagtcggatctggcaatcagtcgcgccgacctcgacgccgccggcatccgctttaccacggtggaagacacactgcgccgcctggccgacaaggcgccgcgcaccgtcgagcccgaggtgcgcgccgcggcgcgcgtgatgatcgaggttctggccgagcctcgctggttccagaaggtggggctggacgaggacggcgccatcgtgctcacgcacaagctgccgggtcgcctgctcaagaaggtggccaaccggccgggcgtggcctttgtgtcggccacgctcacggtggcgggtcgcttcgacgacttccgcaacaccatgggcatcgggccgatctcgcggctctcgacggtgatcgagccgcagcagcacgggcgcctgagctttcgcatcgatccgcagaccgtggacacgcccgagtggatcgaggccacggtggcggccatcaaggcggcaccgcggccctgcctggtggcgaccaccagccacgacctgtcggcacggctaggggagagggtgcccggcgccatcgtgcgcgacgccgatgttcccgcccgcaccgccgccgagcaggccgagggcggggtgctgatcagcgccggcgcctgggcggggctggatacgccaacccgctggcgggccatcgtcgtgccgcgcgtgccctacggccagccggtggtcatcgatgggcagatcgagtcaagctacctcgacgcccgcaacaccgccgtgcgccggctaaggcaggtgatcggccgcggactgcgcacccccgatgcggtgtgcgaggtcaccctgctcgacgcgcgcgccgagcgcctgcccgagttcgtgccggtgcggttccgggcggcgtggagcactagagtgttcattgagggcgctcgcactgaggtcatgctcagcaaggccgagcgtgacccggcactgcgtcgggccgcgctgagtcggtacggccaccgttgtcaggcctgcagtttcgttcccaccgttctgggacagcttgacgtgcaccacaagagtcccatcaaggagggggaacgcaagacgcgccttgaggatgtggctgtgctgtgcgccaactgccaccggctggcgcatgctgaggatccccctgttccggtcgagaggcttgccgagttgacgcgagacacgcgctagcggtgtgtgctcgttaggcttggctggcaagagacgtgccttagagaaagctcgcttgaccaagtggagtcatggttgggcgccttggtctcggccagcctcggctagatcccatcgaacactcacctgaagtgctctcagagatgaatgaacttgacctgcaaggcgctgattcgaaggttggtgacaccgaagaagcgcgaggaatcgaactgcgctttgaggccgacccgacagtcaattacgcatcagtgcagaacagtgttccgatcggcaggcgcctggatatccagaacaagaccgaccacgccgcggtgaacgtcttggtgaccgtgaagccggccacaccattcgcgcaatcaaaaaagttcctgttcgagcaccttgcccctggggagacgcggcgcgtagatgtcgtcaaccttccgccggagccggcttatctcgctgcgctcgtggacgcagagcgctcccacatcgattgcgtggcaaccgaaggggagggcggacggacgctcgcgaccgcgcgagtcgatgtggacgtgctcgctgccaatcagtgggcaggcctgcgcgccttgccgtctctgctggcggccttcagccagccgaacattcctctcatcgagggcatcctgcgggatgcgtccgagcggctaaggaaagtgagcagcggcgcgtccctgaacgcctaccagtcgagtaaccgggaggccgtctggctgcagttgtcggccatctactccgctgtcgccgcgctcgacgtccagtacagccaggcgccggccagcttcgaggccgaagggcagaaaatccgcggcagcgagcagatcctgcaaagccgactagccaactgcctggacctgagcatgctgctcgcagcatgcctggagcaagccgggctgcacccggtggtgctgctgagcaagggccacgcgtggctggggtgctggctgaccgatacctacttcgccacgaccgttgtcgatgacgctcaggcggtccgcaagcggatagacactggggagttcattaccttcgagtgcaccggcgtcacgactcagcccaagctccggctcaagacggcggtgaacaagggcgccgagaacctcgccagcgaggagtttggctacgccatcgacgttcgacgctgcagggaggagcaggttcgtcccctgccttcccgctcggaattcttgcagtccgtgactgccaatgtcgacaccgaggaactggaggtcgagcctgctcccgcgctgccgccactagaggtcggtgaaccgattgtcattggagacgacacgccgcaggggcgcctggcgcgttggaaggcgaagctcctggacatgacgctgcgcaatcgcctgctgaacttcaagaaatcaaagagcaatctggaacttgtcgttcacgacgttgcggcgctcgaggatcgcctagctagcgggaaagagttgagcttcaagccctacccgaaggtgatggagggcgccgacccgcgcgatgcgaccgtctatgccagtcgacacggcgcggaggcaatcgccaatttcgtgcgtgacgctcttgacaagggcgagttggtcacgcgagcttccgaggagaagttcgagaaccaactgctggatctgtttcgggcggccagaaccgggatcgaggagagcggcgcgaacgcgcttcacctggcgatcggcatgctgcagtggacggagaccgacacggcggagcgaaagctcatggcaccgatactgatgttgcctgtgagcttgactcggtcctcggtgcgttctggcttcaagctcggcagcactgacgacgagccgttcatcaatccgaccttgctgcagttactggccgagcagttcgacattcggatcgatgtggcgaggttgctgcctcaagacgccgcaggaatcgacgtggagcgcgtcctgcaggcgtttcgcctggccatcagggagtacaagggctgggaggtcaaggccgaggttcaccttggcatgttctcgttcgctaagttcgtgatgtggcgggacttggagtcgcgcttggatgacctgaccaggaatcgggtggtcaagcacctgctgcacactcccggccaagaattcgcgggagagcgcgcagacatcacagagaccgatctggacgacaggttttcacctagccagatccttgcacccttgctcgcggactcgtcccagctggcggccctcgccaaggcaggggcagggatggatctcgtcatcatcggccctcccggctgcggcaagacccaggttctggccaacgcagtggcacatctcatcgcggagggtaagaaggttctggtgtgctccgagaaggcggctgcactcgaagttcttcagaggcgcctggtacagatcggcctggggccctttgtgctcgaactccactcgtcgaaggccaacaaggttggcgtgctgaagcagctcgaggaggcgctccatcaagccggtcagcttccgacggaccgctggcaggccgaggctgaacacttggcgggactgcgcgacactctcaacggcgttgtcagggcactgcacaagcgccgtcgctcgggactgacagtgttcgaggcgaccgggactgtggttgctgccggtcagcgcaagccctcgcagttcgactggcctgatgccgagatgcatgacgcggtggggttcgcgcaccttcgcgagtgcgccaagcgcgcccaggcggtggcctgtgcattaccgacaatcaaggatcacgcgctcagccaggtctacgcggcggagtggtcgttcgcgtggcaagacgacctactgcaatcagcacagcgtctgatgcgcctcgctgccgacctcgaagtcgctgcgggacccgtgttcaggacggtcggcctgccagagaagggcggttctttggccaactacctggcgctggatcgtctggctgacgtcttgctcgacgcgaccggcgtccccggcccagtcgcccgggcaggacacaaccctgacatcacgcgaaggctcgagagtctccaaaggcacggtgcgcttcggcaggaggccgccgggaaattggcgaccggctacaagccttcgattgaagggctgagtgctgaggacatcgcgcaacggtggcgcacggctagcgcgaagtggatcgtcccgcggaggcttgctcagcgcgccgttctccgggagctgcagccgcatcgccaggatggcgaggttccaacggctggcgaagtgcccggactgatcgatgccctcggaatcctcaacaccgaagacgccgagatccgcaccctttccgccgggcaggagagtgtgctcggggccgcgtggcctagcgtaaatgagcggctcgataccctgggacggtgcgcggcgtggagccaacgctatcgggaggcgctcgcacagctcgtggatgcgagccgatcggttgacgacatggccgcccgcctccagatcctggtgggcgaacagcagcacctattgaaggtggacgcggttgtcggtcagcagctggtccgcgtgcgcgaactgatggtcgccttgagcgcggaacttgagcgcgcccggaaactttctcaaaacacggacttcgcaggcgggccacacagcgcgggatttctggttcgcctggcagcgaccgcacaacactggcttggatcggcgcgcgacctgaaggattggtgcagttggcgacgggctcgtgccgacgcgatctcggcaggattggcgcccctggtggcggacatcgaggaggggaacattgcggttggatcgatagtcgagcacttcgacttcagctatcagctttggtggctcaagcgaacggtcgacagcgatccagttctgcgcaccttctccagcgctgaccatgccaggaagattgaggagttccgatcggtggacagggcctttcaggacctgacgcgggactacatcaaagccaaggtcgcagcgaacatcccggagcaacgcagcctacagcccgccagcgagtctgagatgggtaggctgcgccgggagctacagaagcagcggggtcatcaatcgatccgtcgcttgatcgagggaatgccgacccttctgactcggctgaagccgtgcgtgctgatgtcgcccctctcggtggccacctttctcgatacggcgaacacgatgttcgacgtggtgctgttcgatgaggcgagccagatcccggcttgggacgcggtcggagccattgctcgcgcgcgtcaggccgtcgttgtcggcgatcccaagcagttgcctcccacgaacttcttccagaaggtcgacgagcttgacgacgctgccgaggaagctggggtggtggcggatctggagagcatcctcgacgagtgtctaggcgcgggcctgccatcggtggatctgcggtggcactaccggagccgccacgaggccctgatggccttctcgaatgcccgctactacgacaatggcctgatcacttttccttccaatacgactgaggaccgatcggtcgaactcaggcgggtggcgggcgtctacgaccgcgggggcagcaggacaaaccgcatcgaggccgacgccgtcgtcagcgagatcgaggcccactatctcaaccccgcgcagcgcgaactatccgtgggcgtggtgaccttcaatcagccgcagcaacggctgattgagcagttgctggacgcgcgtcgtcgagcgaagccggaactcgatgtggccatcgcggagtgcgctttcgagcccttgttcatcaagaatctcgagaacgtgcagggggacgagcgggatcggatgctcttctcgatctgctacggaagggaccagaccggccggatgacgatgaacttcggcccgctcaacctggagggcgggcatcggcgtctgaacgttgccatcacgcgggcgcgagagcaggtcatggtgttttcttcggtgacttccgaggacatcgatccgggccgggtgagcgcgcgtggggtcctggacctgaagacttatctcgactttgccgcgaagggccaccgcgccctggcgacggagtctctcccgaccggtcgcgagcccgacagccccttcgaggtcgccgttatccaacgacttcgagatcgcggctggacggtgcattcgcaagtaggggcttccggctaccggatcgacatcggcgtggtgcatcccggtgcgcctggccgatacctgctcggtgtggagtgcgatggcgcgatgtatcactcagcggctacggcccgggaccgcgaccgcttgcggcagatggtgctggaggggctgggctggaagctgcaccgtatctggagctcggactggtggcacgacgctgaagctcagacggccaagctcatcgatcggcttaatgcgttgctgcgagatgaagaggcaggtgggggggctgagggcgtgcccgccggaggtggcgaggaggatggacggagccactctcgcgagaggttcgagcgtcaggcgactattgagaccacggtcgagccgaccggcaaggccggcaagccgcggtacggcgggacgagtgtgcggcctccggtctacttccgtatcgacatcaagggtgggaagcccgaggccttctacgagtacggcgacgacgatcggattcgccgcgcaatcgagcaaattgtcgagtccgaggcgccggtgcagacaacggcggtttttcgccgtgtcgcccgggcttggggactggagcggacaggggccaggattgtcgaaaatctggagcgcctgtcccggggaatgaaggccacgggaaagggcgagcgccgattcctttggcgtcaggacgatgatccgagtgcttggagcgactttagagttgccggagacgatgaggactctaagcgtcgacccgaggaggtctgcgacgaagagatccagaacatcgccgcgtacttgttgcatcactccggctctatgcccttcgacgatcttgctcgggaagttgcccggcaggtcggcatcgggcgagcctccaaagactgggtgcagatggtccgagtcgcttgtggagccaagcgaacggcgcatgtgatcgaggtgcgcaacgaaggcgcctatctggtgtcctgatttgtcattgagagggaacttagctatgcacgagatcatctgcccgcactgcaggaaggccttcaagattgacgaggcagggtatgccgacatcctcaaacaggttcgcgacggcgagttcgaacagcagttgcacgaccgcctcgagctcgccgagagggacaagcagagtgccgtcgagctagcaaagatcaaggtggccagtgagttgcagagatctgcagctgctaaggacgccgagattcaggaactaaaggccaggctcgatgccggcgcggtcgcgcggaagctggccgtggccgaggcccttagcgtcgtggaaagagagcgtgacgagctcgccaatgaactcaagcaggccaggcacgacaagcaagccgctgcccagctggcggacgcgaaacttgtcaacgagctgcagcgagccgcttcagcgaaggacgcggagattcaggacctgaaggcgagactcgacgcgggcgatgttgcgcgcaagctcgcggtctcagaggcggtcagcgcagtggagaaggagcgtgacgagctgaagaatggcttggagcgagtgagtcttgagaagcagctcgccgagaaatcgctgaaggacaagtatgagacgcagatcagggatcgcgacgaagcgatcgaacggcttcgagacatgaaggcgcgtctgtcgaccaagatggtcggagagaccctcgagcagcactgcgagaccgagttcaaccgcattcgggcgactgcatttccgagggcgtacttcgagaaggacaacgacgcccgtagcggcagcaagggcgacttcatattccgagactcggatgaagcaggcaccgaggtggtctcgatcatgttcgagatgaagaacgagagcgacgagacggcgaccaagaagaggaacgaggactttcttaaggaactcgacaaagaccgggttgagaagggctgcgaatacgccgtgctcgtttcactccttgagccagacagcgatctctacaacactgggatcgtcgatgtctcacatcgccatccaaagatgtacgtcgttcgaccgcaattcttcattcagatcatcacgctgctgcgcaacgccgcgcagaacgcgctgaagtacaagagagagctcgcgctggtcaaggcgcagaacgtcgacatcacgaacttcgagagcgagctcgagacgtttaagtctgctttcgcgaaaaacttcgacctcgcctcaagaaaattcgcaacggcgatcgaggagatcgacaaatcgatcgatcacctgcagaagactaaggacgccctgctcggaacggaccgaaaccttcggctcgcgaatgacaaggcgcaggacgtgacgatcaagaagttgacgcgcggcaatgcgacgatggcaaccaagttcgccgatctgaaaaagcatgggtccagcgacgcagggtgaggcaaccgagcgcggccgcttcgggggcgatgcagatctacaccaactcatgtcgctcgggagctcacttcgaggctccaacgtcgtccaatgcctagggaagtgtcagtgcacgagagaagtggtgctggcgcgacccccaaactgggaccggatcgcagaagaatccggcggggatcgcggcgccgaacgactccttgacaccgctcaacgtgaactagccgggccgcggtcgccgacggcaaccgctgcgggcggtgtcactccttaagcgcgcgtgacgagcacggtgtgcgatgggagtgtcacgacgcgagcgccccgaggcgttctacgcggatccacggctgcactaggcaacgaagggtcgtgcccacagagacctcgagtgtgggtgccagccgcctctctgcgaatgggacgcgtgtcggtccggggtccgccggttagcggcgattcagtggagcgactccacaaatagacgctgggagctgctacggccctcaggtgcgcggttgcccggcgagggcgagagtcgccatctcgtcgccaagtgcagcctaaaagcgacaagggtcagcggttgctagctcgctgacccttggaatcttggctccccgacctggactcgaaccagggacctgcggattaacagtccgtcgctctaccgactgagctatcggggaaagaggcgggagtatatcggcgcaggcagggcc

SEQ ID NO: 43 - DNA, 19862 bp, Artificial Sequence; identical to SEQ ID NO: 42
  Synthetic Oligonucleotide
  misc_feature (1)..(8424): n is a, c, g, or t

SEQ ID NO: 44 - DNA, 19824 bp, Artificial Sequence
  Synthetic Oligonucleotide
  misc_feature (1)..(9951): n is a, c, g, or t
nnnnnnnnnnnnnnnnnnnnnnnnnnnnnnnnnnnnnnnnnnnnnnnnnnnnnnnnnnnnnnnnnnnnnnnnnnnnnnnnnnnnnnnnnnnnnnnnnnnnnnnnnnnnnnnnnnnnnnnnnnnnnnnnnnnnnnnnnnnnnnnnnnnnnnnnnnnnnnnnnnnnnnnnnnnnnnnnnnnnnnnnnnnnnnnnnnnnnnnnnnnnnnnnnnnnnnnnnnnnnnnnnnnnnnnnnnnnnnnnnnnnnnnnnnnnnnnnnnnnnnnnnnnnnnnnnnnnnnnnnnnnnnnnnnnnnnnnnnnnnnnnnnnnnnnnnnnnnnnnnnnnnnnnnnnnnnnnnnnnnnnnnnnnnnnnnnnnnnnnnnnnnnnnnnnnnnnnnnnnnnnnnnnnnnnnnnnnnnnnnnnnnnnnnnnnnnnnnnnnnnnnnnnnnnnnnnnnnnnnnnnnnnnnnnnnnnnnnnnnnnnnnnnnnnnnnnnnnnnnnnnnnnnnnnnnnnnnnnnnnnnnnnnnnnnnnnnnnnnnnnnnnnnnnnnnnnnnnnnnnnnnnnnnnnnnnnnnnnnnnnnnnnnnnnnnnnnnnnnnnnnnnnnnnnnnnnnnnnnnnnnnnnnnnnnnnnnnnnnnnnnnnnnnnnnnnnnnnnnnnnnnnnnnnnnnnnnnnnnnnnnnnnnnnnnnnnnnnnnnnnnnnnnnnnnnnnnnnnnnnnnnnnnnnnnnnnnnnnnnnnnnnnnnnnnnnnnnnnnnnnnnnnnnnnnnnnnnnnnnnnnnnnnnnnnnnnnnnnnnnnnnnnnnnnnnnnnnnnnnnnnnnnnnnnnnnnnnnnnnnnnnnnnnnnnnnnnnnnnnnnnnnnnnnnnnnnnnnnnnnnnnnnnnnnnnnnnnnnnnnnnnnnnnnnnnnnnnnnnnnnnnnnnnnnnnnnnnnnnnnnnnnnnnnnnnnnnnnnnnnnnnnnnnnnnnnnnnnnnnnnnnnnnnnnnnnnnnnnnnnnnnnnnnnnnnnnnnnnnnnnnnnnnnnnnnnnnnnnnnnnnnnnnnnnnnnnnnnnnnnnnnnnnnnnnnnnnnnnnnnnnnnnnnnnnnnnnnnnnnnnnnnnnnnnnnnnnnnnnnnnnnnnnnnnnnnnnnnnnnnnnnnnnnnnnnnnnnnnnnnnnnnnnnnnnnnnnnnnnnnnnnnnnnnnnnnnnnnnnnnnnnnnnnnnnnnnnnnnnnnnnnnnnnnnnnnnnnnnnnnnnnnnnnnnnnnnnnnnnnnnnnnnnnnnnnnnnnnnnnnnnnnnnnnnnnnnnnnnnnnnnnnnnnnnnnnnnnnnnnnnnnnnnnnnnnnnnnnnnnnnnnnnnnnnnnnnnnnnnnnnnnnnnnnnnnnnnnnnnnnnnnnnnnnnnnnnnnnnnnnnnnnnnnnnnnnnnnnnnnnnnnnnnnnnnnnnnnnnnnnnnnnnnnnnnnnnnnnnnnnnnnnnnnnnnnnnnnnnnnnnnnnnnnnnnnnnnnnnnnnnnnnnnnnnnnnnnnnnnnnnnnnnnnnnnnnnnnnnnnnnnnnnnnnnnnnnnnnnnnnnnnnnnnnnnnnnnnnnnnnnnnnnnnnnnnnnnnnnnnnnnnnnnnnnnnnnnnnnnnnnnnnnnnnnnnnnnnnnnnnnnnnnnnnnnnnnnnnnnnnnnnnnnnnnnnnnnnnnnnnnnnnnnnnnnnnnnnnnnnnnnnnnnnnnnnnnnnnnnnnnnnnnnnnnnnnnnnnnnnnnnnnnnnnnnnnnnnnnnnnnnnnnnnnnnnnnnnnnnnnnnnnnnnnnnnnnnnnnnnnnnnnnnnnnnnnnnnnnnnnnnnnnnnnnnnnnnnnnnnnnnnnnnnnnnnnnnnnnnnnnnnnnnnnnnnnnnnnnnnnnnnnnnnnnnnnnnnnnnnnnnnnnnnnnnnnnnnnnnnnnnnnnnnnnnnnnnnnnnnnnnnnnnnnnnnnnnnnnnnnnnnnnnnnnnnnnnnnnnnnnnnnnnnnnnnnnnnnnnnnnnnnnnnnnnnnnnnnnnnnnnnnnnnnnnnnnnnnnnnnnnnnnnnnnnnnnnnnnnnnnnnnnnnnnnnnnnnnnnnnnnnnnnnnnnnnnnnnnnnnnnnnnnnnnnnnnnnnnnnnnnnnnnnnnnnnnnnnnnnnnnnnnnnnnnnnnnnnnnnnnnnnnnnnnnnnnnnnnnnnnnnnnnnnnnnnnnnnnnnnnnnnnnnnnnnnnnnnnnnnnnnnnnnnnnnnnnnnnnnnnnnnnnnnnnnnnnnnnnnnnnnnnnnnnnnnnnnnnnnnnnnnnnnnnnnnnnnnnnnnnnnnnnnnnnnnnnnnnnnnnnnnnnnnnnnnnnnnnnnnnnnnnnnnnnnnnnnnnnnnnnnnnnnnnnnnnnnnnnnnnnnnnnnnnnnnnnnnnnnnnnnnnnnnnnnnnnnnnnnnnnnnnnnnnnnnnnnnnnnnnnnnnnnnnnnnnnnnnnnnnnnnnnnnnnnnnnnnnnnnnnnnnnnnnnnnnnnnnnnnnnnnnnnnnnnnnnnnnnnnnnnnnnnnnnnnnnnnnnnnnnnnnnnnnnnnnnnnnnnnnnnnnnnnnnnnnnnnnnnnnnnnnnnnnnnnnnnnnnnnnnnnnnnnnnnnnnnnnnnnnnnnnnnnnnnnnnnnnnnnnnnnnnnnnnnnnnnnnnnnnnnnnnnnnnnnnnnnnnnnnnnnnnnnnnnnnnnnnnnnnnnnnnnnnnnnnnnnnnnnnnnnnnnnnnnnnnnnnnnnnnnnnnnnnnnnnnnnnnnnnnnnnnnnnnnnnnnnnnnnnnnnnnnnnnnnnnnnnnnnnnnnnnnnnnnnnnnnnnnnnnnnnnnnnnnnnnnnnnnnnnnnnnnnnnnnnnnnnnnnnnnnnnnnnnnnnnnnnnnnnnnnnnnnnnnnnnnnnnnnnnnnnnnnnnnnnnnnnnnnnnnnnnnnnnnnnnnnnnnnnnnnnnnnnnnnnnnnnnnnnnnnnnnnnnnnnnnnnnnnnnnnnnnnnnnnnnnnnnnnnnnnnnnnnnnnnnnnnnnnnnnnnnnnnnnnnnnnnnnnnnnnnnnnnnnnnnnnnnnnnnnnnnnnnnnnnnnnnnnnnnnnnnnnnnnnnnnnnnnnnnnnnnnnnnnnnnnnnnnnnnnnnnnnnnnnnnnnnnnnnnnnnnnnnnnnnnnnnnnnnnnnnnnnnnnnnnnnnnnnnnnnnnnnnnnnnnnnnnnnnnnnnnnnnnnnnnnnnnnnnnnnnnnnnnnnnnnnnnnnnnnnnnnnnnnnnnnnnnnnnnnnnnnnnnnnnnnnnnnnnnnnnnnnnnnnnnnnnnnnnnnnnnnnnnnnnnnnnnnnnnnnnnnnnnnnnnnnnnnnnnnnnnnnnnnnnnnnnnnnnnnnnnnnnnnnnnnnnnnnnnnnnnnnnnnnnnnnnnnnnnnnnnnnnnnnnnnnnnnnnnnnnnnnnnnnnnnnnnnnnnnnnnnnnnnnnnnnnnnnnnnnnnnnnnnnnnnnnnnnnnnnnnnnnnnnnnnnnnnnnnnnnnnnnnnnnnnnnnnnnnnnnnnnnnnnnnnnnnnnnnnnnnnnnnnnnnnnnnnnnnnnnnnnnnnnnnnnnnnnnnnnnnnnnnnnnnnnnnnnnnnnnnnnnnnnnnnnnnnnnnnnnnnnnnnnnnnnnnnnnnnnnnnnnnnnnnnnnnnnnnnnnnnnnnnnnnnnnnnnnnnnnnnnnnnnnnnnnnnnnnnnnnnnnnnnnnnnnnnnnnnnnnnnnnnnnnnnnnnnnnnnnnnnnnnnnnnnnnnnnnnnnnnnnnnnnnnnnnnnnnnnnnnnnnnnnnnnnnnnnnnnnnnnnnnnnnnnnnnnnnnnnnnnnnnnnnnnnnnnnnnnnnnnnnnnnnnnnnnnnnnnnnnnnnnnnnnnnnnnnnnnnnnnnnnnnnnnnnnnnnnnnnnnnnnnnnnnnnnnnnnnnnnnnnnnnnnnnnnnnnnnnnnnnnnnnnnnnnnnnnnnnnnnnnnnnnnnnnnnnnnnnnnnnnnnnnnnnnnnnnnnnnnnnnnnnnnnnnnnnnnnnnnnnnnnnnnnnnnnnnnnnnnnnnnnnnnnnnnnnnnnnnnnnnnnnnnnnnnnnnnnnnnnnnnnnnnnnnnnnnnnnnnnnnnnnnnnnnnnnnnnnnnnnnnnnnnnnnnnnnnnnnnnnnnnnnnnnnnnnnnnnnnnnnnnnnnnnnnnnnnnnnnnnnnnnnnnnnnnnnnnnnnnnnnnnnnnnnnnnnnnnnnnnnnnnnnnnnnnnnnnnnnnnnnnnnnnnnnnnnnnnnnnnnnnnnnnnnnnnnnnnnnnnnnnnnnnnnnnnnnnnnnnnnnnnnnnnnnnnnnnnnnnnnnnnnnnnnnnnnnnnnnnnnnnnnnnnnnnnnnnnnnnnnnnnnnnnnnnnnnnnnnnnnnnnnnnnnnnnnnnnnnnnnnnnnnnnnnnnnnnnnnnnnnnnnnnnnnnnnnnnnnnnnnnnnnnnnnnnnnnnnnnnnnnnnnnnnnnnnnnnnnnnnnnnnnnnnnnnnnnnnnnnnnnnnnnnnnnnnnnnnnnnnnnnnnnnnnnnnnnnnnnnnnnnnnnnnnnnnnnnnnnnnnnnnnnnnnnnnnnnnnnnnnnnnnnnnnnnnnnnnnnnnnnnnnnnnnnnnnnnnnnnnnnnnnnnnnnnnnnnnnnnnnnnnnnnnnnnnnnnnnnnnnnnnnnnnnnnnnnnnnnnnnnnnnnnnnnnnnnnnnnnnnnnnnnnnnnnnnnnnnnnnnnnnnnnnnnnnnnnnnnnnnnnnnnnnnnnnnnnnnnnnnnnnnnnnnnnnnnnnnnnnnnnnnnnnnnnnnnnnnnnnnnnnnnnnnnnnnnnnnnnnnnnnnnnnnnnnnnnnnnnnnnnnnnnnnnnnnnnnnnnnnnnnnnnnnnnnnnnnnnnnnnnnnnnnnnnnnnnnnnnnnnnnnnnnnnnnnnnnnnnnnnnnnnnnnnnnnnnnnnnnnnnnnnnnnnnnnnnnnnnnnnnnnnnnnnnnnnnnnnnnnnnnnnnnnnnnnnnnnnnnnnnnnnnnnnnnnnnnnnnnnnnnnnnnnnnnnnnnnnnnnnnnnnnnnnnnnnnnnnnnnnnnnnnnnnnnnnnnnnnnnnnnnnnnnnnnnnnnnnnnnnnnnnnnnnnnnnnnnnnnnnnnnnnnnnnnnnnnnnnnnnnnnnnnnnnnnnnnnnnnnnnnnnnnnnnnnnnnnnnnnnnnnnnnnnnnnnnnnnnnnnnnnnnnnnnnnnnnnnnnnnnnnnnnnnnnnnnnnnnnnnnnnnnnnnnnnnnnnnnnnnnnnnnnnnnnnnnnnnnnnnnnnnnnnnnnnnnnnnnnnnnnnnnnnnnnnnnnnnnnnnnnnnnnnnnnnnnnnnnnnnnnnnnnnnnnnnnnnnnnnnnnnnnnnnnnnnnnnnnnnnnnnnnnnnnnnnnnnnnnnnnnnnnnnnnnnnnnnnnnnnnnnnnnnnnnnnnnnnnnnnnnnnnnnnnnnnnnnnnnnnnnnnnnnnnnnnnnnnnnnnnnnnnnnnnnnnnnnnnnnnnnnnnnnnnnnnnnnnnnnnnnnnnnnnnnnnnnnnnnnnnnnnnnnnnnnnnnnnnnnnnnnnnnnnnnnnnnnnnnnnnnnnnnnnnnnnnnnnnnnnnnnnnnnnnnnnnnnnnnnnnnnnnnnnnnnnnnnnnnnnnnnnnnnnnnnnnnnnnnnnnnnnnnnnnnnnnnnnnnnnnnnnnnnnnnnnnnnnnnnnnnnnnnnnnnnnnnnnnnnnnnnnnnnnnnnnnnnnnnnnnnnnnnnnnnnnnnnnnnnnnnnnnnnnnnnnnnnnnnnnnnnnnnnnnnnnnnnnnnnnnnnnnnnnnnnnnnnnnnnnnnnnnnnnnnnnnnnnnnnnnnnnnnnnnnnnnnnnnnnnnnnnnnnnnnnnnnnnnnnnnnnnnnnnnnnnnnnnnnnnnnnnnnnnnnnnnnnnnnnnnnnnnnnnnnnnnnnnnnnnnnnnnnnnnnnnnnnnnnnnnnnnnnnnnnnnnnnnnnnnnnnnnnnnnnnnnnnnnnnnnnnnnnnnnnnnnnnnnnnnnnnnnnnnnnnnnnnnnnnnnnnnnnnnnnnnnnnnnnnnnnnnnnnnnnnnnnnnnnnnnnnnnnnnnnnnnnnnnnnnnnnnnnnnnnnnnnnnnnnnnnnnnnnnnnnnnnnnnnnnnnnnnnnnnnnnnnnnnnnnnnnnnnnnnnnnnnnnnnnnnnnnnnnnnnnnnnnnnnnnnnnnnnnnnnnnnnnnnnnnnnnnnnnnnnnnnnnnnnnnnnnnnnnnnnnnnnnnnnnnnnnnnnnnnnnnnnnnnnnnnnnnnnnnnnnnnnnnnnnnnnnnnnnnnnnnnnnnnnnnnnnnnnnnnnnnnnnnnnnnnnnnnnnnnnnnnnnnnnnnnnnnnnnnnnnnnnnnnnnnnnnnnnnnnnnnnnnnnnnnnnnnnnnnnnnnnnnnnnnnnnnnnnnnnnnnnnnnnnnnnnnnnnnnnnnnnnnnnnnnnnnnnnnnnnnnnnnnnnnnnnnnnnnnnnnnnnnnnnnnnnnnnnnnnnnnnnnnnnnnnnnnnnnnnnnnnnnnnnnnnnnnnnnnnnnnnnnnnnnnnnnnnnnnnnnnnnnnnnnnnnnnnnnnnnnnnnnnnnnnnnnnnnnnnnnnnnnnnnnnnnnnnnnnnnnnnnnnnnnnnnnnnnnnnnnnnnnnnnnnnnnnnnnnnnnnnnnnnnnnnnnnnnnnnnnnnnnnnnnnnnnnnnnnnnnnnnnnnnnnnnnnnnnnnnnnnnnnnnnnnnnnnnnnnnnnnnnnnnnnnnnnnnnnnnnnnnnnnnnnnnnnnnnnnnnnnnnnnnnnnnnnnnnnnnnnnnnnnnnnnnnnnnnnnnnnnnnnnnnnnnnnnnnnnnnnnnnnnnnnnnnnnnnnnnnnnnnnnnnnnnnnnnnnnnnnnnnnnnnnnnnnnnnnnnnnnnnnnnnnnnnnnnnnnnnnnnnnnnnnnnnnnnnnnnnnnnnnnnnnnnnnnnnnnnnnnnnnnnnnnnnnnnnnnnnnnnnnnnnnnnnnnnnnnnnnnnnnnnnnnnnnnnnnnnnnnnnnnnnnnnnnnnnnnnnnnnnnnnnnnnnnnnnnnnnnnnnnnnnnnnnnnnnnnnnnnnnnnnnnnnnnnnnnnnnnnnnnnnnnnnnnnnnnnnnnnnnnnnnnnnnnnnnnnnnnnnnnnnnnnnnnnnnnnnnnnnnnnnnnnnnnnnnnnnnnnnnnnnnnnnnnnnnnnnnnnnnnnnnnnnnnnnnnnnnnnnnnnnnnnnnnnnnnnnnnnnnnnnnnnnnnnnnnnnnnnnnnnnnnnnnnnnnnnnnnnnnnnnnnnnnnnnnnnnnnnnnnnnnnnnnnnnnnnnnnnnnnnnnnnnnnnnnnnnnnnnnnnnnnnnnnnnnnnnnnnnnnnnnnnnnnnnnnnnnnnnnnnnnnnnnnnnnnnnnnnnnnnnnnnnnnnnnnnnnnnnnnnnnnnnnnnnnnnnnnnnnnnnnnnnnnnnnnnnnnnnnnnnnnnnnnnnnnnnnnnnnnnnnnnnnnnnnnnnnnnnnnnnnnnnnnnnnnnnnnnnnnnnnnnnnnnnnnnnnnnnnnnnnnnnnnnnnnnnnnnnnnnnnnnnnnnnnnnnnnnnnnnnnnnnnnnnnnnnnnnnnnnnnnnnnnnnnnnnnnnnnnnnnnnnnnnnnnnnnnnnnnnnnnnnnnnnnnnnnnnnnnnnnnnnnnnnnnnnnnnnnnnnnnnnnnnnnnnnnnnnnnnnnnnnnnnnnnnnnnnnnnnnnnnnnnnnnnnnnnnnnnnnnnnnnnnnnnnnnnnnnnnnnnnnnnnnnnnnnnnnnnnnnnnnnnnnnnnnnnnnnnnnnnnnnnnnnnnnnnnnnnnnnnnnnnnnnnnnnnnnnnnnnnnnnnnnnnnnnnnnnnnnnnnnnnnnnnnnnnnnnnnnnnnnnnnnnnnnnnnnnnnnnnnnnnnnnnnnnnnnnnnnnnnnnnnnnnnnnnnnnnnnnnnnnnnnnnnnnnnnnnnnnnnnnnnnnnnnnnnnnnnnnnnnnnnnnnnnnnnnnnnnnnnnnnnnnnnnnnnnnnnnnnnnnnnnnnnnnnnnnnnnnnnnnnnnnnnnnnnnnnnnnnnnnnnnnnnnnnnnnnnnnnnnnnnnnnnnnnnnnnnnnnnnnnnnnnnnnnnnnnnnnnnnnnnnnnnnnnnnnnnnnnnnnnnnnnnnnnnnnnnnnnnnnnnnnnnnnnnnnnnnnnnnnnnnnnnnnnnnnnnnnnnnnnnnnnnnnnnnnnnnnnnnnnnnnnnnnnnnnnnnnnnnnnnnnnnnnnnnnnnnnnnnnnnnnnnnnnnnnnnnnnnnnnnnnnnnnnnnnnnnnnnnnnnnnnnnnnnnnnnnnnnnnnnnnnnnnnnnnnnnnnnnnnnnnnnnnnnnnnnnnnnnnnnnnnnnnnnnnnnnnnnnnnnnnnnnnnnnnnnnnnnnnnnnnnnnnnnnnnnnnnnnnnnnnnnnnnnnnnnnnnnnnnnnnnnnnnnnnnnnnnnnnnnnnnnnnnnnnnnnnnnnnnnnnnnnnnnnnnnnnnnnnnnnnnnnnnnnnnnnnnnnnnnnnnnnnnnnnnnnnnnnnnnnnnnnnnnnnnnnnnnnnnnnnnnnnnnnnnnnnnnnnnnnnnnnnnnnnnnnnnnnnnnnnnnnnnnnnnnnnnnnnnnnnnnnnnnnnnnnnnnnnnnnnnnnnnnnnnnnnnnnnnnnnnnnnnnnnnnnnnnnnnnnnnnnnnnnnnnnnnnnnnnnnnnnnnnnnnnnnnnnnnnnnnnnnnnnnnnnnnnnnnnnnnnnnnnnnnnnnnnnnnnnnnnnnnnnnnnnnnnnnnnnnnnnnnnnnnnnnnnnnnnnnnnnnnnnnnnnnnnnnnnnnnnnnnnnnnnnnnnnnnnnnnnnnnnnnnnnnnnnnnnnnnnnnnnnnnnnnnnnnnnnnnnnnnnnnnnnnnnnnnnnnnnnnnnnnnnnnnnnnnnnnnnnnnnnnnnnnnnnnnnnnnnnnnnnnnnnnnnnnnnnnnnnnnnnnnnnnnnnnnnnnnnnnnnnnnnnnnnnnnnnnnnnnnnnnnnnnnnnnnnnnnnnnnnnnnnnnnnnnnnnnnnnnnnnnnnnnnnnnnnnnnnnnnnnnnnnnnnnnnnnnnnnnnnnnnnnnnnnnnnnnnnnnnnnnnnnnnnnnnnnnnnnnnnnnnnnnnnnnnnnnnnnnnnnnnnnnnnnnnnnnnnnnnnnnnnnnnnnnnnnnnnnnnnnnnnnnnnnnnnnnnnnnnnnnnnnnnnnnnnnnnnnnnnnnnnnnnnnnnnnnnnnnnnnnnnnnnnnnnnnnnnnnnnnnnnnnnnnnnnnnnnnnnnnnnnnnnnnnnnnnnnnnnnnnnnnnnnnnnnnnnnnnnnnnnnnnnnnnnnnnnnnnnnnnnnnnnnnnnnnnnnnnnnnnnnnnnnnnnnnnnnnnnnnnnnnnnnnnnnnnnnnnnnnnnnnnnnnnnnnnnnnnnnnnnnnnnnnnnnnnnnnnnnnnnnnnnnnnnnnnnnnnnnnnnnnnnnnnnnnnnnnnnnnnnnnnnnnnnnnnnnnnnnnnnnnnnnnnnnnnnnnnnnnnnnnnnnnnnnnnnnnnnnnnnnnnnnnnnnnnnnnnnnnnnnnnnnnnnnnnnnnnnnnnnnnnnnnnnnnnnnnnnnnnnnnnnnnnnnnnnnnnnnnnnnnnnnnnnnnnnnnnnnnnnnnnnnnnnnnnnnnnnnnnnnnnnnnnnnnnnnnnnnnnnnnnnnnnnnnnnnnnnnnnnnnnnnnnnnnnnnnnnnnnnnnnnnnnnnnnnnnnnnnnnnnnnnnnnnnnnnnnnnnnnnnnnnnnnnnnnnnnnnnnnnnnnnnnnnnnnnnnnnnnnnnnnnnnnnnnnnnnnnnnnnnnnnnnnnnnnnnnnnnnnnnnnnnnnnnnnnnnnnnnnnnnnnnnnnnnnnnnnnnnnnnnnnnnnnnnnnnnnnnnnnnnnnnnnnnnnnnnnnnnnnngtttcccgtgcgcctgctgcgtcccaggaggcgcgcgctgccgcgacgatgatcctcgagatgctggatgatcccgcgaagtatcactcggtgaccttcaacccggagaccgggctcgtcttgcggcacaacatgccaggacgcctgatgaagcgggtcgccaacaacccgaacgctgccttcatcggtacgtcgcttgccctcggcaggagcttcgatgccttcaagcgtgccatgggcatcgtcagtccgagcggcttgtcatcgatcatcgagcccaagaaccacggcagcctgcgttgccaccacgccgcgcatgcgccgctgtccgaggaatggttcgccgcgctcaagcagagtatcgcgaaggcggcgcgaccctgcctcgtcgtcaccgcggacgagcagcaggcccgggccatcggcttgctgacgcccgaggcgtcggtacgcctttcaggcgactcgccgtcacccgaatcattgacgtccgctggagccgtgctgatcgctgcggcgaactggccgggactcgacgcgccgcgggagtggcgcagcatcatcatcgcccgcgtacccatcgacgccgaatggggtcaggacgaggatgccgacgaacacttcgtcgatccccgcaatcaggccgtcaggctgctcaagaacatcatcggctggggagttcgccgacccgatgccgaatgtgatctttatgtgctcgactatcgcccggggttggtggagtcgctgatcccggctcgattcaagggtgattgggcacagcggcgcgcgatgacgggacgcggggcggcggaggacagcgcgatcgaacgcctcatcgctgccgagcagcctggcaaggcgctgcgtgacgaggtgttccgggtgcttggcaagcgctgcatgacctgcgatctcgtgccgaagccggggataccgctcgagatccatctgctcgggccagtctcggtcagcgaagacgatcgatcgctggccgaggagatggcggtgctctgccagtcatgccaccggctcgcgcattcggtcacgccgccgctctcgatgcccatgctgcgcggcttccacgaacgcaagcgcgcgcgaacctgagtccgtcgccgttgccgcgcaaggcggcttccgtcagatcgccaccgcgtgcacggggctgtccgtggcggcgctacggcgccgcagcgcgaacatgcgcatggttccgtagcctttggcggcagccgtcagaccgacgtagtcgcagcagaactcgtccgcgtgctcgagttcgagcgccgcggcaaaagtttcggtgacatagacgagaccgggtggcgtcaccggctcgatgcgcgccgcaagactcacgtgcgcgccgaagaagttctgtttcagcagcagaggatcgtcggtttcgaacaccggaccgagatgaccgccgagtcgcaaggccaggggttcggcgaaagcgccgctgtcggcagccaacgcctgcatcgcgacctgcaggtcgagggcgcattccgccgcttcgcgggtccggcgaaaaacgaggaacatgccatcgccccaggtgttgaggctgagcacgcgcgcgcgatggctctcgatggcacgtgcgaccccgcccaggacaccatggacgaactgcggcatttcccgatccgatatggtgctgaagcgggtgaagtcgccgaacagcatggctcgcgcccgtcgccggttcctgcgctcgtccgcaggcgccgcagcgttggtttcttgcgcgtcttgcggtgcgttgccgtgatccggcaacggaatgatgcgctgcggccttccggattcgcgccacagtccgacgtcgacggccgttccggccacgccgcgagcgggggtgccgtcccacaccgcaagttgcgccacgctcgtgaaaaggtgttgggaggcgagcacggcaaggcccatggcgatccggctcgagtaggtgaacaacgtgtcgtcgccgagcccggcgccatcggtcgcgtaacggaccgattgcgcggcggcgaggcaacgccgcatccgggtcacccattgcccgccggcgggccgcaccgaggtttcaatgaaatcgtccagaaggaacggcagtaccacatgcagctgcgcaccgcgatcgagcagcgcttcggcaaagaggatgtctgcacctgaggcgagcgaaccatagccgaagcccgctgcgtgctcgtccagtgtctcaccgatggcggcggcgatcgtcgcttcggccgcggccgggaagcgacccgggactccgggtgcggcgatcatgtgacccgtgtagtggatcaccgcgggcggcgtcagggacgccacccacgatggcggcagacccttggcctcggtcgcgtgcttgatcgaacgcgctgcggtggcgagcatggtgtagtcaccattgctcgcttcgcgtgcggcatcgagccttgcctcggccgacacgagatcgccattgatggtatgcgcttcgatcagggttgcgagggaccagaaccgatcttcgccctctgccgtgtccaccatcgtctcgagcgaggcgatcaggcgccgcgccactgcagccgcacgctccggctccccggcaagcagcagcaggttcgcgaaattgatcccggggtaatagtcgccgcgctcgaggtaggccgcttcgtactttgcggccgcggtgcgcagcagggcgagcctctcggcttcatcggtgctggccagggcgagatccttgtccagtcgggcatcgagttcacgcagaccgcgttcgcttcgaccttcgagtcccagtgaaacgaaccattgtcttgcctgccgcgtggcccccgagcgggcgagggcgaggacggctcggtgtttaagcctggtgctgtcgggatgttcgcccagcccgcggcgggcgatgtcgaacgcccggaacgcctcgcctgcacgctcggcttcgcgcaccagcgcataccagtccgcttcgttgcgaccgaccgtcggtgcgtggcgcagatcacccatggtgcattgtttactcgacccgggtccagatcgacttgctgtagaagaagcccctcgattgcttcacttcgagtttgcgacctcccggcagttgcaggatttcggcgcggctgagggatccggtttccggatcgagcaatatcgcctcttcccagacgttctctgcggcgttgaatcgggcgttttgcaagatcgtcagccccatgaacaactgccccttgcgcgaaccgggacagtccttgcagcgcgctgcacgctgcgccgggtcccgaacctcctcgattcgtccccagagttttcctgacagcaatgaaatgcgcacgaggaagccgcccgggtcgctctcggcttcgtgggtcagccagagtcccgtcggcggtggcggcggggtcgcgaaggaaaatgttgatacaccgatcaggaggatggaaaagagaagctttacacgcatgttccgttcacctccgccagctgtggagcgcccgcgatgcgcctgcgtcaccgatcctcaaaccgccctttcaacgcgaaccagtcgcccgacgcccgcagcccggcccgcttcgatgtcgcgctcgctgtcgccgatgaggatcgacgctgcagggtcgatgccgagctcgcggatcgcacgcaggatcattcccggtgccggcttgcgacagtcgcaggatcgcgtgaattgcgcaacggtaccctgcgggtgatgcgggcagtggtacaccgcggcgatacggatgccctgcgccgccaaggcttcgcgatagcgatccgtgagcagttcatagtccgcctcggagaagtagccccgcgcgatgccggactggttggtgatcacgaccagcagataaccctcgtcggccagccgctgcaacatcgcgacggcgtccggtgcgaacctgaagtcctcccagcgaccgacatacccggagtcgacgttgatcaccccgtcgcggtcgatgaacgcggctttgcgcaggccggacatggagcctccggtcagcgggccggatcgcccagtttcgagaggatgcgggtggtggacaggccgggcacgaggtcgaggatggccacctggccgcccgctgccgtgacacaccgtccgccggcgacttcgccggcgatgtagtccccgcctttcacgagtacctgcggcaacacctcgcagtagagatgttccggcgtgtcttcctcgaaggcgacgagatagtcgacgcactccagcatgccgaggaccgtgagtcggtgctcgagcggattgaccggccgcgtcggccccttgagccgacgtaccgaggcgtcgtcgttgacggccacgaccagcaggtcaccgagctcccgcgctcgccgcaggaggtcgacgtgtccggcgtgcagcacatcgaagcaaccgttggtcatcaccgtcgcccggcccgccgccttcgcggcggcgacgatttctttgagtgcgcgccggtcgacgaccttgcgcagcaggcccgaagcgggtgatgaggatctcgcgtggagaatctccgctacggtggtggtggccgttcccgacttggcgacgacgagaccggcagcgatgttcgcccagtcgacggcctcgcgcagcggtacgcccgaccccagcgccgccgccagagtcgcgaccaccgtgtcgccggcaccggtgacatcgaagacctcgcgggcgcgactggccagatgcagcggctccgcattgcgctcgagcagggtcatgccatgttcgccgcgggtgacgagcagagcttcgagacccagccggtcgcgcaggttgacgccgcgttcgacgatgctgcgttcgtccgcgcagcgacccaccaccgcctcgaactcggcgagattcggcgtgatcaccgtggcgccgcaatagcgcatgaagtccgttcccttcgggtcgaccaccacgggtttgccgagagcgcgggcagcctcgatcatctgcggcgtctcgctgccgaggaagcccttcgcgtaatccgagagcaccagcacgtcggcaccttcgagacgagcgcggatgccatcgaccttgctcgcgcccgaaagacccgccagaccgtgctcgaagtcgagtcgtaccagttgttgccggcgcgacatcacccgcagtttgcggatggtctgcgcgcctgcgacctgcatcaggccgtgggcgatgccgcgctggtcgaggagccgtccgagttccgcgcctgctgcatcgtcaccgatgagtccgaccagcgtcgcccgcgcgcccagcgccacgatgttgagcgccacattggccgcgccgccgggacgtgtctcctcgaagtcgaccagcaccaccggcacgggcgcctcgggggagatgcgcgaggtcgttcccacccagtaggtgtcggccatgacatcgccggcgacgagtacctgcgccgcaccgaagtcgagtactccctggattttcatcggccggacgggggtgcaacgagcccaagggcaatctcgacatctgcgcacagcgtatgtgcgaggaagatgtgcgcttcctggatcctcgcggtgtcgtccgacggcacgatcaaagaaatatcgcagagcggcggcatcttgccgccatcgcggccgagcaggcctatccgggtgatgccgagctcgccggcggcctgcagtgccacgagaacgttgggggaattgccggatgtggaaatgccgagcaggcagtcgccccggcggccgatggcgcggacctggcgcgcaaacacctgttcgtagccatagtcgttgccgatgcaggtgagcgccgaggtatccgtggtcagggcgatcgcagcgagcggatcgcgctctgcacgaagccgtccggtcagctcggcggcgatgtgctggcaatcggcggcggaaccgccgttgccgcagagcagcagcttgcctccgccgcgcagcgaatcggcgatcgcgcgggttgctgccgcgaggacaggctgcagcccggccactcgttgaaaggtttcaaggtgcgcctgcagcgcatcggggaacgtactcatcctcgggtcacctctggcgaattgtagatcacccgcgcgctcttcgctgccgatcggccatgacagtggcgggggtattggatacccttgccggcaatgtcgaaaagcttccgaaacgggtcgtcgggacgggcgaacaagccgcttcccccgtccctccaggggctcttcagccaggctgtggcccgtcatcaggccgggcgtatccacgaggcgctcggcttctatgaacgcgtgctcgaaggttcgccccggcacttcgacagcctgaatctgggcggcctcgccagtcttcaggcgggtgatccggggcgcggcgcgcgctggctcgcggctgcggtcgaactcaaccccggcaacgtggcaacccggaataacctgggcgtcgccttgctcgatctggggcgcagtgccgaggccctggctgcgttcgacctggccatcgggctacagcgcgatttcgtcgatgcccacttcaatcgcggcaagaccctgcttgcgctggcgcggttcgagcaggccgtggacgccttcgatgcagcggcgcgcctcaagcccgcgcatgccgaggcgctgcagtaccgcggcgtcgccttgaagatgctcggccgcaacgacgaggctctcgccagtttcgaggccgccctcgcgatccgcgccgactatccggatgcgcacaacaaccgcggcgtcacgctgttcgaaacgggccgatacgaggaggcgatcgcggcgtttggcgaggtgctgcgcctgagcggcccgcatcccgatccgtacaacaacctcgggcgcgcgttgcaggagttgcgacgcccggccgaggcgatcgatgcattcgatgctgcgctcaaactccgccccgattacgccgatgccctgaacagtcgcggaaactcgctgctcgagttgcgacgtctcgaggaggccctggcgagcttcgaagcggcgatccgtcatcgtccggggtatgtcgaggcgatcaacaatcgcggcaacgcactgttggagttgcggcgcttcgacgcggcgatcgtcgagtacgacctggcgctgcgcttgcggcccgacttcgccgaggcgcacgtcaaccgcagcaatgcgctgatgcagctggctagacccgtcgcggctctggcggatctcgatgcggcggtccgcctgcagcccgaacttgccggagcccacctcaaccgcgcgcatctttggctgaacaccggcgactatccgcagggctggcgcgaattcgagtggcgctggaaggtgcagggtcgtgccgtggtcgccttgcgcagcgccgcgcatggcctttggctcggacaggagcctattgccggatccactctggtcatctgtcacgagcaaggcgtgggcgacacgctgcagttctgccgttacggtcttttggccgccgcggcgggtgcacgcgtcgttgcgctggtgccgaaaccgctgacgcgcctgatgtccgcgcagccgtgggtgtcgcaagtggtggaaaccgggcagaccctgccgcccttcgacttccactgtccgatgatgtcgctgccgctggcattcggtacgacgctcgagacgattccgttcggtgacgcgccgtacctgctggcgccaaccggcgacgtggagcgctggggccagtggctggccgaacgtctgccgggctcctccgcagtcgccgacggcggccggcagctgcgcgtgggtctcgtctggaacggcggctttcgtgccgatcagcccgaactctgggcggtcaatgaacgtcgcaacgtgccgctgggccttttcgccgcggccctcgatctgccgggtatcgacttcgtcagcctgcagaagggcgacccggcggagtccgagctgcgtggtcgggagcgcgagttctggaaagttgcgaccttgctgaacccggcgtcggaactcaccgacttcgccgacacagccggcttgatcgcgaaccttgatctggtgatcagcgtggacacctcgacggcgcatctggccgcggcgatgggcaagccgacgtggatcctgaaccgctacgacacctgctggcggtggctgttcgatcgggaagacagtccgtggtatggatcggtgaagctgttccggcagggcgcggatcgcgactggcgacccgtgctcgagcgagtgtccagcgccctgcaatacgttgtcggaggtgcgtgatgagacgtggttttcgcgagcctggcgggcgcaccacccagcaacgcctcgaggccgccgtcgaactgcatcgcgccgggcgtctggaagaggccctgaaggcctacaggaatctcgcgcaggccgatccgacgaacttccacgcgctgcatctcggcgggctcgtcagcgtgcagctcggcgatcgcgcgcgcggcgtcgagatgctcagggcggcgatcaagatcaatcccgacgtgcccaccgcccacaacaactgtggcgtcgccttgctgggtctcggtcggcacgaggaggcgctggcgagtttcgacagcgccattgcactgcagcaagactacttcgacgccatcatcaaccgcggcaacgccctgaaggaactcggcaagctcgaggatgcgctcgcgagcttcgatcttgcgatcaagctgcagcgcgacaacgccgatgcgcacttcaaccgcggcaatacgctggtgcagctgcgacgcttcggtgaggccatcaccgcgttcgacgccacgctgcgtttgcagccgggcaatctcgatgccgtccagtcgcgtggcgcggcgctgcagggcctgcagcggcaccgcgaggccatcgcggcgttcgacaccgtgctcgcgcagcgcgcggacagcgtcgacgtcctcaccaatcgcggcgtcagtcagctcgaactcggcaaccacgaggatgcgctggccagtttcgatgcggctctcgcgttgcgcgccgaccaccccgaggctctcaacaaccgcggttcggcgctgcaaaagctcaagcgattcgcagaggccgtggacagttacgacgcggcgatccgccaccgacccgactaccacgaagcgtggagcaatcgcggcggcacgctctgggcgctggggcgccacgacgaggctctcgagagtttcgacacggcactgcgactcaagcccgacgccgtggagatcaggacgacccgcggcaatgcctgcctcgaactcggccgctacgccgaggctttgtcggagtacgacaaggccatcgagacccagcccgattgcgccgaagcgcactgggacaaggcgaacgccatgctgcgttacggcgactacgaccgcggctgggccgaatacgaatggcgctgggagctgaagtccggcaaaccgctcggcacgcgcggtccccgcgaaaccctgtggacgggccgcgagcccgtgagcggcaagaccctgctgctgcaggccgagcagggtcttggagacacgttgcagctggtgcgctacgtatccttactggcgcgaatgggcgcacgagtggtgctgcagctgccacagccgctggcccggttgctgcaggatatgcccggtgtagcgcaggtggtcccgacgggccagctggctccgcgtcacgacttgcattgctcgatgatgtcgctgccgctggctttcgggacgacgctcgagaacattccgttcgccaaagaggcgtacctgcaggcgctgcccggtgacgtggagcgctggggcaagtggctcgaggaacatctttcgggttcgtccgcagaagcggcgacggccggcggcggcaaccgccgcccgcgcgtgggcctggtgtggaacggcggcttccgcgccgaccagcccgatctctg

SEQ ID NO: 45 - DNA, 19679 bp, Artificial Sequence
  Synthetic Oligonucleotide
  misc_feature (1)..(9997): n is a, c, g, or t
nnnnnnnnnnnnnnnnnnnnnnnnnnnnnnnnnnnnnnnnnnnnnnnnnnnnnnnnnnnnnnnnnnnnnnnnnnnnnnnnnnnnnnnnnnnnnnnnnnnnnnnnnnnnnnnnnnnnnnnnnnnnnnnnnnnnnnnnnnnnnnnnnnnnnnnnnnnnnnnnnnnnnnnnnnnnnnnnnnnnnnnnnnnnnnnnnnnnnnnnnnnnnnnnnnnnnnnnnnnnnnnnnnnnnnnnnnnnnnnnnnnnnnnnnnnnnnnnnnnnnnnnnnnnnnnnnnnnnnnnnnnnnnnnnnnnnnnnnnnnnnnnnnnnnnnnnnnnnnnnnnnnnnnnnnnnnnnnnnnnnnnnnnnnnnnnnnnnnnnnnnnnnnnnnnnnnnnnnnnnnnnnnnnnnnnnnnnnnnnnnnnnnnnnnnnnnnnnnnnnnnnnnnnnnnnnnnnnnnnnnnnnnnnnnnnnnnnnnnnnnnnnnnnnnnnnnnnnnnnnnnnnnnnnnnnnnnnnnnnnnnnnnnnnnnnnnnnnnnnnnnnnnnnnnnnnnnnnnnnnnnnnnnnnnnnnnnnnnnnnnnnnnnnnnnnnnnnnnnnnnnnnnnnnnnnnnnnnnnnnnnnnnnnnnnnnnnnnnnnnnnnnnnnnnnnnnnnnnnnnnnnnnnnnnnnnnnnnnnnnnnnnnnnnnnnnnnnnnnnnnnnnnnnnnnnnnnnnnnnnnnnnnnnnnnnnnnnnnnnnnnnnnnnnnnnnnnnnnnnnnnnnnnnnnnnnnnnnnnnnnnnnnnnnnnnnnnnnnnnnnnnnnnnnnnnnnnnnnnnnnnnnnnnnnnnnnnnnnnnnnnnnnnnnnnnnnnnnnnnnnnnnnnnnnnnnnnnnnnnnnnnnnnnnnnnnnnnnnnnnnnnnnnnnnnnnnnnnnnnnnnnnnnnnnnnnnnnnnnnnnnnnnnnnnnnnnnnnnnnnnnnnnnnnnnnnnnnnnnnnnnnnnnnnnnnnnnnnnnnnnnnnnnnnnnnnnnnnnnnnnnnnnnnnnnnnnnnnnnnnnnnnnnnnnnnnnnnnnnnnnnnnnnnnnnnnnnnnnnnnnnnnnnnnnnnnnnnnnnnnnnnnnnnnnnnnnnnnnnnnnnnnnnnnnnnnnnnnnnnnnnnnnnnnnnnnnnnnnnnnnnnnnnnnnnnnnnnnnnnnnnnnnnnnnnnnnnnnnnnnnnnnnnnnnnnnnnnnnnnnnnnnnnnnnnnnnnnnnnnnnnnnnnnnnnnnnnnnnnnnnnnnnnnnnnnnnnnnnnnnnnnnnnnnnnnnnnnnnnnnnnnnnnnnnnnnnnnnnnnnnnnnnnnnnnnnnnnnnnnnnnnnnnnnnnnnnnnnnnnnnnnnnnnnnnnnnnnnnnnnnnnnnnnnnnnnnnnnnnnnnnnnnnnnnnnnnnnnnnnnnnnnnnnnnnnnnnnnnnnnnnnnnnnnnnnnnnnnnnnnnnnnnnnnnnnnnnnnnnnnnnnnnnnnnnnnnnnnnnnnnnnnnnnnnnnnnnnnnnnnnnnnnnnnnnnnnnnnnnnnnnnnnnnnnnnnnnnnnnnnnnnnnnnnnnnnnnnnnnnnnnnnnnnnnnnnnnnnnnnnnnnnnnnnnnnnnnnnnnnnnnnnnnnnnnnnnnnnnnnnnnnnnnnnnnnnnnnnnnnnnnnnnnnnnnnnnnnnnnnnnnnnnnnnnnnnnnnnnnnnnnnnnnnnnnnnnnnnnnnnnnnnnnnnnnnnnnnnnnnnnnnnnnnnnnnnnnnnnnnnnnnnnnnnnnnnnnnnnnnnnnnnnnnnnnnnnnnnnnnnnnnnnnnnnnnnnnnnnnnnnnnnnnnnnnnnnnnnnnnnnnnnnnnnnnnnnnnnnnnnnnnnnnnnnnnnnnnnnnnnnnnnnnnnnnnnnnnnnnnnnnnnnnnnnnnnnnnnnnnnnnnnnnnnnnnnnnnnnnnnnnnnnnnnnnnnnnnnnnnnnnnnnnnnnnnnnnnnnnnnnnnnnnnnnnnnnnnnnnnnnnnnnnnnnnnnnnnnnnnnnnnnnnnnnnnnnnnnnnnnnnnnnnnnnnnnnnnnnnnnnnnnnnnnnnnnnnnnnnnnnnnnnnnnnnnnnnnnnnnnnnnnnnnnnnnnnnnnnnnnnnnnnnnnnnnnnnnnnnnnnnnnnnnnnnnnnnnnnnnnnnnnnnnnnnnnnnnnnnnnnnnnnnnnnnnnnnnnnnnnnnnnnnnnnnnnnnnnnnnnnnnnnnnnnnnnnnnnnnnnnnnnnnnnnnnnnnnnnnnnnnnnnnnnnnnnnnnnnnnnnnnnnnnnnnnnnnnnnnnnnnnnnnnnnnnnnnnnnnnnnnnnnnnnnnnnnnnnnnnnnnnnnnnnnnnnnnnnnnnnnnnnnnnnnnnnnnnnnnnnnnnnnnnnnnnnnnnnnnnnnnnnnnnnnnnnnnnnnnnnnnnnnnnnnnnnnnnnnnnnnnnnnnnnnnnnnnnnnnnnnnnnnnnnnnnnnnnnnnnnnnnnnnnnnnnnnnnnnnnnnnnnnnnnnnnnnnnnnnnnnnnnnnnnnnnnnnnnnnnnnnnnnnnnnnnnnnnnnnnnnnnnnnnnnnnnnnnnnnnnnnnnnnnnnnnnnnnnnnnnnnnnnnnnnnnnnnnnnnnnnnnnnnnnnnnnnnnnnnnnnnnnnnnnnnnnnnnnnnnnnnnnnnnnnnnnnnnnnnnnnnnnnnnnnnnnnnnnnnnnnnnnnnnnnnnnnnnnnnnnnnnnnnnnnnnnnnnnnnnnnnnnnnnnnnnnnnnnnnnnnnnnnnnnnnnnnnnnnnnnnnnnnnnnnnnnnnnnnnnnnnnnnnnnnnnnnnnnnnnnnnnnnnnnnnnnnnnnnnnnnnnnnnnnnnnnnnnnnnnnnnnnnnnnnnnnnnnnnnnnnnnnnnnnnnnnnnnnnnnnnnnnnnnnnnnnnnnnnnnnnnnnnnnnnnnnnnnnnnnnnnnnnnnnnnnnnnnnnnnnnnnnnnnnnnnnnnnnnnnnnnnnnnnnnnnnnnnnnnnnnnnnnnnnnnnnnnnnnnnnnnnnnnnnnnnnnnnnnnnnnnnnnnnnnnnnnnnnnnnnnnnnnnnnnnnnnnnnnnnnnnnnnnnnnnnnnnnnnnnnnnnnnnnnnnnnnnnnnnnnnnnnnnnnnnnnnnnnnnnnnnnnnnnnnnnnnnnnnnnnnnnnnnnnnnnnnnnnnnnnnnnnnnnnnnnnnnnnnnnnnnnnnnnnnnnnnnnnnnnnnnnnnnnnnnnnnnnnnnnnnnnnnnnnnnnnnnnnnnnnnnnnnnnnnnnnnnnnnnnnnnnnnnnnnnnnnnnnnnnnnnnnnnnnnnnnnnnnnnnnnnnnnnnnnnnnnnnnnnnnnnnnnnnnnnnnnnnnnnnnnnnnnnnnnnnnnnnnnnnnnnnnnnnnnnnnnnnnnnnnnnnnnnnnnnnnnnnnnnnnnnnnnnnnnnnnnnnnnnnnnnnnnnnnnnnnnnnnnnnnnnnnnnnnnnnnnnnnnnnnnnnnnnnnnnnnnnnnnnnnnnnnnnnnnnnnnnnnnnnnnnnnnnnnnnnnnnnnnnnnnnnnnnnnnnnnnnnnnnnnnnnnnnnnnnnnnnnnnnnnnnnnnnnnnnnnnnnnnnnnnnnnnnnnnnnnnnnnnnnnnnnnnnnnnnnnnnnnnnnnnnnnnnnnnnnnnnnnnnnnnnnnnnnnnnnnnnnnnnnnnnnnnnnnnnnnnnnnnnnnnnnnnnnnnnnnnnnnnnnnnnnnnnnnnnnnnnnnnnnnnnnnnnnnnnnnnnnnnnnnnnnnnnnnnnnnnnnnnnnnnnnnnnnnnnnnnnnnnnnnnnnnnnnnnnnnnnnnnnnnnnnnnnnnnnnnnnnnnnnnnnnnnnnnnnnnnnnnnnnnnnnnnnnnnnnnnnnnnnnnnnnnnnnnnnnnnnnnnnnnnnnnnnnnnnnnnnnnnnnnnnnnnnnnnnnnnnnnnnnnnnnnnnnnnnnnnnnnnnnnnnnnnnnnnnnnnnnnnnnnnnnnnnnnnnnnnnnnnnnnnnnnnnnnnnnnnnnnnnnnnnnnnnnnnnnnnnnnnnnnnnnnnnnnnnnnnnnnnnnnnnnnnnnnnnnnnnnnnnnnnnnnnnnnnnnnnnnnnnnnnnnnnnnnnnnnnnnnnnnnnnnnnnnnnnnnnnnnnnnnnnnnnnnnnnnnnnnnnnnnnnnnnnnnnnnnnnnnnnnnnnnnnnnnnnnnnnnnnnnnnnnnnnnnnnnnnnnnnnnnnnnnnnnnnnnnnnnnnnnnnnnnnnnnnnnnnnnnnnnnnnnnnnnnnnnnnnnnnnnnnnnnnnnnnnnnnnnnnnnnnnnnnnnnnnnnnnnnnnnnnnnnnnnnnnnnnnnnnnnnnnnnnnnnnnnnnnnnnnnnnnnnnnnnnnnnnnnnnnnnnnnnnnnnnnnnnnnnnnnnnnnnnnnnnnnnnnnnnnnnnnnnnnnnnnnnnnnnnnnnnnnnnnnnnnnnnnnnnnnnnnnnnnnnnnnnnnnnnnnnnnnnnnnnnnnnnnnnnnnnnnnnnnnnnnnnnnnnnnnnnnnnnnnnnnnnnnnnnnnnnnnnnnnnnnnnnnnnnnnnnnnnnnnnnnnnnnnnnnnnnnnnnnnnnnnnnnnnnnnnnnnnnnnnnnnnnnnnnnnnnnnnnnnnnnnnnnnnnnnnnnnnnnnnnnnnnnnnnnnnnnnnnnnnnnnnnnnnnnnnnnnnnnnnnnnnnnnnnnnnnnnnnnnnnnnnnnnnnnnnnnnnnnnnnnnnnnnnnnnnnnnnnnnnnnnnnnnnnnnnnnnnnnnnnnnnnnnnnnnnnnnnnnnnnnnnnnnnnnnnnnnnnnnnnnnnnnnnnnnnnnnnnnnnnnnnnnnnnnnnnnnnnnnnnnnnnnnnnnnnnnnnnnnnnnnnnnnnnnnnnnnnnnnnnnnnnnnnnnnnnnnnnnnnnnnnnnnnnnnnnnnnnnnnnnnnnnnnnnnnnnnnnnnnnnnnnnnnnnnnnnnnnnnnnnnnnnnnnnnnnnnnnnnnnnnnnnnnnnnnnnnnnnnnnnnnnnnnnnnnnnnnnnnnnnnnnnnnnnnnnnnnnnnnnnnnnnnnnnnnnnnnnnnnnnnnnnnnnnnnnnnnnnnnnnnnnnnnnnnnnnnnnnnnnnnnnnnnnnnnnnnnnnnnnnnnnnnnnnnnnnnnnnnnnnnnnnnnnnnnnnnnnnnnnnnnnnnnnnnnnnnnnnnnnnnnnnnnnnnnnnnnnnnnnnnnnnnnnnnnnnnnnnnnnnnnnnnnnnnnnnnnnnnnnnnnnnnnnnnnnnnnnnnnnnnnnnnnnnnnnnnnnnnnnnnnnnnnnnnnnnnnnnnnnnnnnnnnnnnnnnnnnnnnnnnnnnnnnnnnnnnnnnnnnnnnnnnnnnnnnnnnnnnnnnnnnnnnnnnnnnnnnnnnnnnnnnnnnnnnnnnnnnnnnnnnnnnnnnnnnnnnnnnnnnnnnnnnnnnnnnnnnnnnnnnnnnnnnnnnnnnnnnnnnnnnnnnnnnnnnnnnnnnnnnnnnnnnnnnnnnnnnnnnnnnnnnnnnnnnnnnnnnnnnnnnnnnnnnnnnnnnnnnnnnnnnnnnnnnnnnnnnnnnnnnnnnnnnnnnnnnnnnnnnnnnnnnnnnnnnnnnnnnnnnnnnnnnnnnnnnnnnnnnnnnnnnnnnnnnnnnnnnnnnnnnnnnnnnnnnnnnnnnnnnnnnnnnnnnnnnnnnnnnnnnnnnnnnnnnnnnnnnnnnnnnnnnnnnnnnnnnnnnnnnnnnnnnnnnnnnnnnnnnnnnnnnnnnnnnnnnnnnnnnnnnnnnnnnnnnnnnnnnnnnnnnnnnnnnnnnnnnnnnnnnnnnnnnnnnnnnnnnnnnnnnnnnnnnnnnnnnnnnnnnnnnnnnnnnnnnnnnnnnnnnnnnnnnnnnnnnnnnnnnnnnnnnnnnnnnnnnnnnnnnnnnnnnnnnnnnnnnnnnnnnnnnnnnnnnnnnnnnnnnnnnnnnnnnnnnnnnnnnnnnnnnnnnnnnnnnnnnnnnnnnnnnnnnnnnnnnnnnnnnnnnnnnnnnnnnnnnnnnnnnnnnnnnnnnnnnnnnnnnnnnnnnnnnnnnnnnnnnnnnnnnnnnnnnnnnnnnnnnnnnnnnnnnnnnnnnnnnnnnnnnnnnnnnnnnnnnnnnnnnnnnnnnnnnnnnnnnnnnnnnnnnnnnnnnnnnnnnnnnnnnnnnnnnnnnnnnnnnnnnnnnnnnnnnnnnnnnnnnnnnnnnnnnnnnnnnnnnnnnnnnnnnnnnnnnnnnnnnnnnnnnnnnnnnnnnnnnnnnnnnnnnnnnnnnnnnnnnnnnnnnnnnnnnnnnnnnnnnnnnnnnnnnnnnnnnnnnnnnnnnnnnnnnnnnnnnnnnnnnnnnnnnnnnnnnnnnnnnnnnnnnnnnnnnnnnnnnnnnnnnnnnnnnnnnnnnnnnnnnnnnnnnnnnnnnnnnnnnnnnnnnnnnnnnnnnnnnnnnnnnnnnnnnnnnnnnnnnnnnnnnnnnnnnnnnnnnnnnnnnnnnnnnnnnnnnnnnnnnnnnnnnnnnnnnnnnnnnnnnnnnnnnnnnnnnnnnnnnnnnnnnnnnnnnnnnnnnnnnnnnnnnnnnnnnnnnnnnnnnnnnnnnnnnnnnnnnnnnnnnnnnnnnnnnnnnnnnnnnnnnnnnnnnnnnnnnnnnnnnnnnnnnnnnnnnnnnnnnnnnnnnnnnnnnnnnnnnnnnnnnnnnnnnnnnnnnnnnnnnnnnnnnnnnnnnnnnnnnnnnnnnnnnnnnnnnnnnnnnnnnnnnnnnnnnnnnnnnnnnnnnnnnnnnnnnnnnnnnnnnnnnnnnnnnnnnnnnnnnnnnnnnnnnnnnnnnnnnnnnnnnnnnnnnnnnnnnnnnnnnnnnnnnnnnnnnnnnnnnnnnnnnnnnnnnnnnnnnnnnnnnnnnnnnnnnnnnnnnnnnnnnnnnnnnnnnnnnnnnnnnnnnnnnnnnnnnnnnnnnnnnnnnnnnnnnnnnnnnnnnnnnnnnnnnnnnnnnnnnnnnnnnnnnnnnnnnnnnnnnnnnnnnnnnnnnnnnnnnnnnnnnnnnnnnnnnnnnnnnnnnnnnnnnnnnnnnnnnnnnnnnnnnnnnnnnnnnnnnnnnnnnnnnnnnnnnnnnnnnnnnnnnnnnnnnnnnnnnnnnnnnnnnnnnnnnnnnnnnnnnnnnnnnnnnnnnnnnnnnnnnnnnnnnnnnnnnnnnnnnnnnnnnnnnnnnnnnnnnnnnnnnnnnnnnnnnnnnnnnnnnnnnnnnnnnnnnnnnnnnnnnnnnnnnnnnnnnnnnnnnnnnnnnnnnnnnnnnnnnnnnnnnnnnnnnnnnnnnnnnnnnnnnnnnnnnnnnnnnnnnnnnnnnnnnnnnnnnnnnnnnnnnnnnnnnnnnnnnnnnnnnnnnnnnnnnnnnnnnnnnnnnnnnnnnnnnnnnnnnnnnnnnnnnnnnnnnnnnnnnnnnnnnnnnnnnnnnnnnnnnnnnnnnnnnnnnnnnnnnnnnnnnnnnnnnnnnnnnnnnnnnnnnnnnnnnnnnnnnnnnnnnnnnnnnnnnnnnnnnnnnnnnnnnnnnnnnnnnnnnnnnnnnnnnnnnnnnnnnnnnnnnnnnnnnnnnnnnnnnnnnnnnnnnnnnnnnnnnnnnnnnnnnnnnnnnnnnnnnnnnnnnnnnnnnnnnnnnnnnnnnnnnnnnnnnnnnnnnnnnnnnnnnnnnnnnnnnnnnnnnnnnnnnnnnnnnnnnnnnnnnnnnnnnnnnnnnnnnnnnnnnnnnnnnnnnnnnnnnnnnnnnnnnnnnnnnnnnnnnnnnnnnnnnnnnnnnnnnnnnnnnnnnnnnnnnnnnnnnnnnnnnnnnnnnnnnnnnnnnnnnnnnnnnnnnnnnnnnnnnnnnnnnnnnnnnnnnnnnnnnnnnnnnnnnnnnnnnnnnnnnnnnnnnnnnnnnnnnnnnnnnnnnnnnnnnnnnnnnnnnnnnnnnnnnnnnnnnnnnnnnnnnnnnnnnnnnnnnnnnnnnnnnnnnnnnnnnnnnnnnnnnnnnnnnnnnnnnnnnnnnnnnnnnnnnnnnnnnnnnnnnnnnnnnnnnnnnnnnnnnnnnnnnnnnnnnnnnnnnnnnnnnnnnnnnnnnnnnnnnnnnnnnnnnnnnnnnnnnnnnnnnnnnnnnnnnnnnnnnnnnnnnnnnnnnnnnnnnnnnnnnnnnnnnnnnnnnnnnnnnnnnnnnnnnnnnnnnnnnnnnnnnnnnnnnnnnnnnnnnnnnnnnnnnnnnnnnnnnnnnnnnnnnnnnnnnnnnnnnnnnnnnnnnnnnnnnnnnnnnnnnnnnnnnnnnnnnnnnnnnnnnnnnnnnnnnnnnnnnnnnnnnnnnnnnnnnnnnnnnnnnnnnnnnnnnnnnnnnnnnnnnnnnnnnnnnnnnnnnnnnnnnnnnnnnnnnnnnnnnnnnnnnnnnnnnnnnnnnnnnnnnnnnnnnnnnnnnnnnnnnnnnnnnnnnnnnnnnnnnnnnnnnnnnnnnnnnnnnnnnnnnnnnnnnnnnnnnnnnnnnnnnnnnnnnnnnnnnnnnnnnnnnnnnnnnnnnnnnnnnnnnnnnnnnnnnnnnnnnnnnnnnnnnnnnnnnnnnnnnnnnnnnnnnnnnnnnnnnnnnnnnnnnnnnnnnnnnnnnnnnnnnnnnnnnnnnnnnnnnnnnnnnnnnnnnnnnnnnnnnnnnnnnnnnnnnnnnnnnnnnnnnnnnnnnnnnnnnnnnnnnnnnnnnnnnnnnnnnnnnnnnnnnnnnnnnnnnnnnnnnnnnnnnnnnnnnnnnnnnnnnnnnnnnnnnnnnnnnnnnnnnnnnnnnnnnnnnnnnnnnnnnnnnnnnnnnnnnnnnnnnnnnnnnnnnnnnnnnnnnnnnnnnnnnnnnnnnnnnnnnnnnnnnnnnnnnnnnnnnnnnnnnnnnnnnnnnnnnnnnnnnnnnnnnnnnnnnnnnnnnnnnnnnnnnnnnnnnnnnnnnnnnnnnnnnnnnnnnnnnnnnnnnnnnnnnnnnnnnnnnnnnnnnnnnnnnnnnnnnnnnnnnnnnnnnnnnnnnnnnnnnnnnnnnnnnnnnnnnnnnnnnnnnnnnnnnnnnnnnnnnnnnnnnnnnnnnnnnnnnnnnnnnnnnnnnnnnnnnnnnnnnnnnnnnnnnnnnnnnnnnnnnnnnnnnnnnnnnnnnnnnnnnnnnnnnnnnnnnnnnnnnnnnnnnnnnnnnnnnnnnnnnnnnnnnnnnnnnnnnnnnnnnnnnnnnnnnnnnnnnnnnnnnnnnnnnnnnnnnnnnnnnnnnnnnnnnnnnnnnnnnnnnnnnnnnnnnnnnnnnnnnnnnnnnnnnnnnnnnnnnnnnnnnnnnnnnnnnnnnnnnnnnnnnnnnnnnnnnnnnnnnnnnnnnnnnnnnnnnnnnnnnnnnnnnnnnnnnnnnnnnnnnnnnnnnnnnnnnnnnnnnnnnnnnnnnnnnnnnnnnnnnnnnnnnnnnnnnnnnnnnnnnnnnnnnnnnnnnnnnnnnnnnnnnnnnnnnnnnnnnnnnnnnnnnnnnnnnnnnnnnnnnnnnnnnnnnnnnnnnnnnnnnnnnnnnnnnnnnnnnnnnnnnnnnnnnnnnnnnnnnnnnnnnnnnnnnnnnnnnnnnnnnnnnnnnnnnnnnnnnnnnnnnnnnnnnnnnnnnnnnnnnnnnnnnnnnnnnnnnnnnnnnnnnnnnnnnnnnnnnnnnnnnnnnnnnnnnnnnnnnnnnnnnnnnnnnnnnnnnnnnnnnnnnnnnnnnnnnnnnnnnnnnnnnnnnnnnnnnnnnnnnnnnnnnnnnnnnnnnnnnnnnnnnnnnnnnnnnnnnnnnnnnnnnnnnnnnnnnnnnnnnnnnnnnnnnnnnnnnnnnnnnnnnnnnnnnnnnnnnnnnnnnnnnnnnnnnnnnnnnnnnnnnnnnnnnnnnnnnnnnnnnnnnnnnnnnnnnnnnnnnnnnnnnnnnnnnnnnnnnnnnnnnnnnnnnnnnnnnnnnnnnnnnnnnnnnnnnnnnnnnnnnnnnnnnnnnnnnnnnnnnnnnnnnnnnnnnnnnnnnnnnnnnnnnnnnnnnnnnnnnnnnagaaccacggcagcctgcgttgccaccacgccgcgcatgcgccgctgtccgaggaatggttcgccgcgctcaagcagagtatcgcgaaggcggcgcgaccctgcctcgtcgtcaccgcggacgagcagcaggcccgggccatcggcttgctgacgcccgaggcgtcggtacgcctttcaggcgactcgccgtcacccgaatcattgacgtccgctggagccgtgctgatcgctgcggcgaactggccgggactcgacgcgccgcgggagtggcgcagcatcatcatcgcccgcgtacccatcgacgccgaatggggtcaggacgaggatgccgacgaacacttcgtcgatccccgcaatcaggccgtcaggctgctcaagaacatcatcggctggggagttcgccgacccgatgccgaatgtgatctttatgtgctcgactatcgcccggggttggtggagtcgctgatcccggctcgattcaagggtgattgggcacagcggcgcgcgatgacgggacgcggggcggcggaggacagcgcgatcgaacgcctcatcgctgccgagcagcctggcaaggcgctgcgtgacgaggtgttccgggtgcttggcaagcgctgcatgacctgcgatctcgtgccgaagccggggataccgctcgagatccatctgctcgggccagtctcggtcagcgaagacgatcgatcgctggccgaggagatggcggtgctctgccagtcatgccaccggctcgcgcattcggtcacgccgccgctctcgatgcccatgctgcgcggcttccacgaacgcaagcgcgcgcgaacctgagtccgtcgccgttgcggcgcaaggcggcttccgtcagatcgccaccgcgtgcacggggctgtccgtggcggcgctacggcgccgcagcgcgaacatgcgcatggttccgtagcctttggcggcagccgtcagaccgacgtagtcgcagcagaactcgtccgcgtgctcgagttcgagcgccgcggcaaaagtttcggtgacatagacgagaccgggtggcgtcaccggctcgatgcgcgccgcaagactcacgtgcgcgccgaagaagttctgtttcagcagcagaggatcgtcggtttcgaacaccggaccgagatgaccgccgagtcgcaaggccaggggttcggcgaaagcgccgctgtcggcagccaacgcctgcatcgcgacctgcaggtcgagggcgcattccgccgcttcgcgggtccggcgaaaaacgaggaacatgccatcgccccaggtgttgaggctgagcacgcgcgcgcgatggctctcgatggcacgtgcgaccccgcccaggacaccatggacgaactgcggcatttcccgatccgatatggtgctgaagcgggtgaagtcgccgaacagcatggctcgcgcccgtcgccggttcctgcgctcgtccgcaggcgccgcagcgttggtttcttgcgcgtcttgcggtgcgttgccgggatccggcaacggaatgatgcgctgcggccttccggattcgcgccacagtccgacgtcgacggccgttccggccacgccgcgagcgggggtgccgtcccacaccgcaagttgcgccacgctcgtgaaaaggtgttgggaggcgagcacggcaaggcccatggcgatccggctcgagtaggtgaacaacgtgtcgtcgccgagcccggcgccatcggtcgcgtaacggaccgattgcgcggcggcgaggcaacgccgcatccgggtcacccattgcccgccggcgggccgcaccgaggtttcaatgaaatcgtccagaaggaacggcagtaccacatgcagctgcgcaccgcgatcgagcagcgcttcggcaaagaggatgtctgcacctgaggcgagcgaaccatagccgaagcccgctgcgtgctcgtccagtgtctcaccgatggcggcggcgatcgtcgcttcggccgcggccgggaagcgacccgggactccgggtgcggcgatcatgtgacccgtgtagtggatcaccgcgggcggcgtcagggacgccacccacgatggcggcagacccttggcctcggtcgcgtgcttgatcgaacgcgctgcggtggcgagcatggtgtagtcaccattgctcgcttcgcgtgcggcatcgagccttgcctcggccgacacgagatcgccattgatgatatgcgcttcgatcagggttgcgagggaccagaaccgatcttcgccctctgccgtgtccaccatcgtctcgagcgaggcgatcaggcgccgcgccactgcagccgcacgctccggctccccggcaagcagcagcaggttcgcgaaattgatcccggggtaatagtcgccgcgctcgaggtaggccgcttcgtactttgcggccgcggtgcgcagcagggcgagcctctcggcttcatcggtgctggccagggcgagatccttgtccagtcgggcatcgagttcacgcagaccgcgttcgcttcgaccttcgagtcccagtgaaacgaaccattgtcttgcctgccgcgtggcccccgagcgggcgagggcgaggacggctcggtgtttaagcctggtgctgtcgggatgttcgcccagcccgcggcgggcgatgtcgaacgcccggaacgcctcgcctgcacgctcggcttcgcgcaccagcgcataccagtccgcttcgttgcgaccgaccgtcggtgcgtggcgcagatcacccatggtgcgttgtttactcgacccgggtccagatcgacttgctgtagaagaagcccctcgattgcttcacttcgagtttgcgacctcccggcagttgcaggatttcggcgcggctgagggatccggtttccggatcgagcaatatcgcctcttcccagacgttctctgcggcgttgaatcgggcgttttgcaagatcgtcagccccatgaacaactgccccttgcgcgaaccgggacagtccttgcagcgcgctgcacgctgcgccgggtcccgaacctcctcgattcgtccccagagttttcctgacagcaatgaaatgcgcacgaggaagccgcccgggtcgctctcggcttcgtgggtcagccagagtcccgtcggcggtggcggcggggtcgcgaaggaaaatgttgatacaccgatcaggaggatggaaaagagaagctttacacgcatgttccgttcacctccgccagctgtggagcgcccgcgatgcgcctgcgtcaccgatcctcaaaccgccctttcaacgcgaaccagtcgcccgacgcccgcagcccggcccgcttcgatgtcgcgctcgctgtcgccgatgaggatcgacgctgcagggtcgatgccgagctcgcggatcgcacgcaggatcattcccggtgccggcttgcgacagtcgcaggatcgcgtgaattgcgcaacggtaccctgcgggtgatgcgggcagtggtacaccgcggcgatacggatgccctgcgccgccaaggcttcgcgatagcgatccgtgagcagttcatagtccgcctcggagaagtagccccgcgcgatgccggactggttggtgatcacgaccagcagataaccctcgtcggccagccgctgcaacatcgcgacagcgtccggtgcgaacctgaagtcctcccagcgaccgacatacccggagtcgacgttgatcaccccgtcgcggtcgatgaacgcggctttgcgcaggccggacatggagcctccggtcagcgggccggatcgcccagtttcgagaggatgcgggtggtggacaggccgggcacgaggtcgaggatggccacctggccgcccgctgccgtgacacaccgtccgccggcgacttcgccggcgatgtagtccccgcctttcacgagtacctgcggcaacacctcgcagtagagatgttccggcgtgtcttcctcgaaggcgacgagatagtcgacgcactccagcatgccgaggaccgtgagtcggtgctcgagcggattgaccggccgcgtcggccccttgagccgacgtaccgaggcgtcgtcgttgacggccacgaccagcaggtcaccgagctcccgcgctcgccgcaggaggtcgacgtgtccggcgtgcagcacatcgaagcaaccgttggtcatcaccgtcgcccggcccgccgccttcgcggcggcgacgatttctttgagtgcgcgccggtcgacgaccttgcgcagcaggcccgaagcgggtgatgaggatctcgcgtggagaatctccgctacggtggtggtggccgttcccgacttggcgacgacgagaccggcagcgatgttcgcccagtcgaccgcctcgcgcagcggtacgcccgaccccagcgccgccgccagagtcgcgaccaccgtgtcgccggcaccggtgacatcgaagacctcgcgggcgcgactggccagatgcagcggctccgcattgcgctcgagcagggtcatgccatgttcgccgcgggtgacgagcagagcttcgagacccagccggtcgcgcaggttgacgccgcgttcgacgatgctgcgttcgtccgcgcagcgacccaccaccgcctcgaactcggcgagattcggcgtgatcaccgtggcgccgcaatagcgcatgaagtccgttcccttcgggtcgaccaccacgggtttgccgagagcgcgggcagcctcgatcatctgcggcgtctcgctgccgaggaagcccttcgcgtaatccgagagcaccagcacgtcggcaccttcgagacgagcgcggatgccatcgaccttgctcgcgcccgaaagacccgccagaccgtgctcgaagtcgagtcgtaccagttgttgccggcgcgacatcacccgcagtttgcggatggtctgcgcgcctgcgacctgcatcaggccgtgggcgatgccgcgctggtcgaggagccgtccgagttccgcgcctgctgcatcgtcaccgatgagtccgaccagcgtcgcccgcgcgcccagcgccacgatgttgagcgccacattggccgcgccgccgggacgtgtctcctcgaagtcgaccagcaccaccggcacgggcgcctcgggggagatgcgcgaggtcgttcccacccagtaggtgtcggccatgacatcgccggcgacgagtacctgcgccgcaccgaagtcgagtactccctggattttcatcggccggacgggggtgcaacgagcccaagggcaatctcgacatctgcgcacagcgtatgtgcgaggaagatgtgcgcttcctggatcctcgcggtgtcgtccgacggcacgatcaaagaaatatcgcagagcggtggcatcttgccgccatcgcggccgagcaggcctatccgggtgatgccgagctcgccggcggcctgcagtgccacgagaacgttgggggaattgccggatgtggaaatgccgagcaggcagtcgccccggcggccgatggcgcggacctggcgcgcaaacacctgttcgtagccatagtcgttgccgatgcaggtgagcgccgaggtatccgtggtcagggcgatcgcagcgagcggatcgcgctctgcacgaagccgtccggtcagctcggcggcgatgtgctggcaatcggcggcggaaccgccgttgccgcagagcagcagcttgcctccgccgcgcagcgaatcggcgatcgcgcgggttgctgccgcgaggacaggctgcagcccggccactcgttgaaaggtttcaaggtgcgcctgcagcgcatcggggaacgtactcatcctcgggtcacctctggcgaattgtagatcacccgcgcgctcttcgctgccgatcggccatgacagtggcgggggtattggatacccttgccggcaatgtcgaaaagcttccgaaacgggtcgtcgggacgggcgaacaagccgcttcccccgtccctccaggggctcttcagccaggctgtggcccgtcatcaggccgggcgtatccacgaggcgctcggcttctatgaacgcgtgctcgaaggttcgccccggcacttcgacagcctgaatctgggcggcctcgccagtcttcaggcgggtgatccggggcgcggcgcgcgctggctcgcggctgcggtcgaactcaaccccggcaacgtggcaacccggaataacctgggcgtcgccttgctcgatctggggcgcagtgccgaggccctggctgcgttcgacctggccatcgggctacagcgcgatttcgtcgatgcccacttcaatcgcggcaagaccctgcttgcgctggcgcggttcgagcaggccgtggacgccttcgatgcagcggcgcgcctcaagcccgcgcatgccgaggcgctgcagtaccgcggcgtcgccttgaagatgctcggccgcaacgacgaggctctcgccagtttcgaggccgccctcgcgatccgcgccgactatccggatgcgcacaacaaccgcggcgtcacgctgttcgaaacgggccgatacgaggaggcgatcgcggcgtttggcgaggtgctgcgcctgagcggcccgcatcccgatccgtacaacaacctcgggcgcgcgttgcaggagttgcgacgcccggccgaggcgatcgatgcattcgatgctgcgctcaaactccgccccgattacgccgatgccctgaacagccgcggaaactcgctgctcgagttgcgacgtctcgaggaggccctggcgagcttcgaagcggcgatccgtcatcgtccggggtatgtcgaggcgatcaacaatcgcggcaacgcactgttggagttgcggcgcttcgacgcggcgatcgtcgagtacgacctggcgctgcgcttgcggcccgacttcgccgaggcgcacgtcaaccgcagcaatgcgctgatgcagctggctagacccgtcgcggctctggcggatctcgatgcggcggtccgcctgcagcccgaacttgccggagcccacctcaaccgcgcgcatctttggctgaacaccggcgactatccgcagggctggcgcgaattcgagtggcgctggaaggtgcagggtcgtgccgtggtcgccttgcgcagcgccgcgcatggcctttggctcggacaggagcctattgccggatccactctggtcatctgtcacgagcaaggcgtgggcgacacgctgcagttctgccgttacggtcttttggccgccgcggcgggtgcacgcgtcgttgcgctggtgccgaaaccgctgacgcgcctgatgtccgcgcagccgtgggtgtcgcaagtggtggaaaccgggcagaccctgccgcccttcgacttccactgtccgatgatgtcgctgccgctggcattcggtacgacgctcgagacgattccgttcggtgacgcgccgtacctgctggcgccaaccggcgacgtggagcgctggggccagtggctggccgaacgtctgccgggctcctccgcagtcgccgacggcggccggcagctgcgcgtgggtctcgtctggaacggcggctttcgtgccgatcagcccgaactctgggcggtcaatgaacgtcgcaacgtgccgctgggccttttcgccgcggccctcgatctgccgggtatcgacttcgtcagcctgcagaagggcgacccggcggagtccgagctgcgtggtcgggagcgcgagttctggaaagttgcgaccttgctgaacccggcgtcggaactcaccgacttcgccgacacagccggcttgatcgcgaaccttgatctggtgatcagcgtggacacctcgacggcgcatctggccgcggcgatgggcaagccgacgtggatcctgaaccgctacgacacctgctggcggtggctgttcgatcgggaagacagtccgtggtatggatcggtgaagctgttccggcagggcgcggatcgcgactggcgacccgtgctcgagcgagtgtccagcgccctgcaatacgttgtcggaggtgcgtgatgagacgtggttttcgcgagcctggcgggcgcaccacccagcaacgcctcgaggccgccgtcgaactgcatcgcgccgggcgtctggaagaggccctgaaggcctacaggaatctcgcgcaggccgatccgacgaacttccacgcgctgcatctcggcgggctcgtcagcgtgcagctcggcgatcgcgcgcgcggcgtcgagatgctcagggcggcgatcaagatcaatcccgacgtgcccaccgcccacaacaactgtggcgtcgccttgctgggtctcggtcggcacgaggaggcgctggcgagtttcgacagcgccattgcactgcagcaagactacttcgacgccatcatcaaccgcggcaacgccctgaaggaactcggcaagctcgaggatgcgctcgcgagcttcgatcttgcgatcaagctgcagcgcgacaacgccgatgcgcacttcaaccgcggcaatacgctggtgcagctgcgacgcttcggtgaggccatcaccgcgttcgacgccacgctgcgtttgcagccgggcaatctcgatgccgtccagtcgcgtggcgcggcgctgcagggcctgcagcggcaccgcgaggccatcgcggcgttcgacaccgtgctcgcgcagcgcgcggacagcgtcgacgtcctcaccaatcgcggcgtcagtcagctcgaactcggcaaccacgaggatgcgctggccagtttcgatgcggctctcgcgttgcgcgccgaccaccccgaggctctcaacaaccgcggttcggcgctgcaaaagctcaagcgattcgcagaggccgtggacagttacgacgcggcgatccgccaccgacccgactaccacgaagcgtggagcaatcgcggcggcacgctctgggcgctggggcgccacgacgaggctcttgagagtttcgacaccgcactgcgactcaagcccgacgccgtggagatcaggacgacccgcggcaatgcctgcctcgaactcggccgctacgccgaggctttgtcggagtacgacaaggccatcgagacccagcccgattgcgccgaagcgcactgggacaaggcgaacgccatgctgcgttacggcgactacgaccgcggctgggccgaatacgaatggcgctgggagctgaagtccggcaaaccgctcggcacgcgcggtccccgcgaaaccctgtggacgggccgcgagcccgtgagcggcaagaccctgctgctgcaggccgagcagggtcttggagacacgttgcagctggtgcgctacgtatccttgctggcgcgaatgggcgcacgagtggtgctgcagctgccacagccgctggcccggttgctgcaggatatgcccggtgtagcgcaggtggtcccgacgggccagctggctccgcgtcacgacttgcattgctcgatgatgtcgctgccgctggctttcgggacgacgctcgagaacattccgttcgccaaagaggcgtacctgcaggcgctgcccggtgacgtggaacgctggggcaagtggctcgaggaacatctttcgggttcgtccgcagaagcggcgacggccggcggcggcaaccgccgcccgcgcgtgggcctggtgtggaacggcggcttccgcgccgaccagcccgatctctgggccgtgaatgaacggcgcaacatacccttggcgctgtttgccgcggcgctcgatctgcccgacatcgacttcgtgagtttgcagaagg

SEQ ID NO: 46 - DNA, 19673 bp, Artificial Sequence; identical to SEQ ID NO: 5
  Synthetic Oligonucleotide
  misc_feature (1)..(4565): n is a, c, g, or t

SEQ ID NO: 47 - DNA, 19645 bp, Artificial Sequence
  Synthetic Oligonucleotide
  misc_feature (1)..(8628): n is a, c, g, or t
nnnnnnnnnnnnnnnnnnnnnnnnnnnnnnnnnnnnnnnnnnnnnnnnnnnnnnnnnnnnnnnnnnnnnnnnnnnnnnnnnnnnnnnnnnnnnnnnnnnnnnnnnnnnnnnnnnnnnnnnnnnnnnnnnnnnnnnnnnnnnnnnnnnnnnnnnnnnnnnnnnnnnnnnnnnnnnnnnnnnnnnnnnnnnnnnnnnnnnnnnnnnnnnnnnnnnnnnnnnnnnnnnnnnnnnnnnnnnnnnnnnnnnnnnnnnnnnnnnnnnnnnnnnnnnnnnnnnnnnnnnnnnnnnnnnnnnnnnnnnnnnnnnnnnnnnnnnnnnnnnnnnnnnnnnnnnnnnnnnnnnnnnnnnnnnnnnnnnnnnnnnnnnnnnnnnnnnnnnnnnnnnnnnnnnnnnnnnnnnnnnnnnnnnnnnnnnnnnnnnnnnnnnnnnnnnnnnnnnnnnnnnnnnnnnnnnnnnnnnnnnnnnnnnnnnnnnnnnnnnnnnnnnnnnnnnnnnnnnnnnnnnnnnnnnnnnnnnnnnnnnnnnnnnnnnnnnnnnnnnnnnnnnnnnnnnnnnnnnnnnnnnnnnnnnnnnnnnnnnnnnnnnnnnnnnnnnnnnnnnnnnnnnnnnnnnnnnnnnnnnnnnnnnnnnnnnnnnnnnnnnnnnnnnnnnnnnnnnnnnnnnnnnnnnnnnnnnnnnnnnnnnnnnnnnnnnnnnnnnnnnnnnnnnnnnnnnnnnnnnnnnnnnnnnnnnnnnnnnnnnnnnnnnnnnnnnnnnnnnnnnnnnnnnnnnnnnnnnnnnnnnnnnnnnnnnnnnnnnnnnnnnnnnnnnnnnnnnnnnnnnnnnnnnnnnnnnnnnnnnnnnnnnnnnnnnnnnnnnnnnnnnnnnnnnnnnnnnnnnnnnnnnnnnnnnnnnnnnnnnnnnnnnnnnnnnnnnnnnnnnnnnnnnnnnnnnnnnnnnnnnnnnnnnnnnnnnnnnnnnnnnnnnnnnnnnnnnnnnnnnnnnnnnnnnnnnnnnnnnnnnnnnnnnnnnnnnnnnnnnnnnnnnnnnnnnnnnnnnnnnnnnnnnnnnnnnnnnnnnnnnnnnnnnnnnnnnnnnnnnnnnnnnnnnnnnnnnnnnnnnnnnnnnnnnnnnnnnnnnnnnnnnnnnnnnnnnnnnnnnnnnnnnnnnnnnnnnnnnnnnnnnnnnnnnnnnnnnnnnnnnnnnnnnnnnnnnnnnnnnnnnnnnnnnnnnnnnnnnnnnnnnnnnnnnnnnnnnnnnnnnnnnnnnnnnnnnnnnnnnnnnnnnnnnnnnnnnnnnnnnnnnnnnnnnnnnnnnnnnnnnnnnnnnnnnnnnnnnnnnnnnnnnnnnnnnnnnnnnnnnnnnnnnnnnnnnnnnnnnnnnnnnnnnnnnnnnnnnnnnnnnnnnnnnnnnnnnnnnnnnnnnnnnnnnnnnnnnnnnnnnnnnnnnnnnnnnnnnnnnnnnnnnnnnnnnnnnnnnnnnnnnnnnnnnnnnnnnnnnnnnnnnnnnnnnnnnnnnnnnnnnnnnnnnnnnnnnnnnnnnnnnnnnnnnnnnnnnnnnnnnnnnnnnnnnnnnnnnnnnnnnnnnnnnnnnnnnnnnnnnnnnnnnnnnnnnnnnnnnnnnnnnnnnnnnnnnnnnnnnnnnnnnnnnnnnnnnnnnnnnnnnnnnnnnnnnnnnnnnnnnnnnnnnnnnnnnnnnnnnnnnnnnnnnnnnnnnnnnnnnnnnnnnnnnnnnnnnnnnnnnnnnnnnnnnnnnnnnnnnnnnnnnnnnnnnnnnnnnnnnnnnnnnnnnnnnnnnnnnnnnnnnnnnnnnnnnnnnnnnnnnnnnnnnnnnnnnnnnnnnnnnnnnnnnnnnnnnnnnnnnnnnnnnnnnnnnnnnnnnnnnnnnnnnnnnnnnnnnnnnnnnnnnnnnnnnnnnnnnnnnnnnnnnnnnnnnnnnnnnnnnnnnnnnnnnnnnnnnnnnnnnnnnnnnnnnnnnnnnnnnnnnnnnnnnnnnnnnnnnnnnnnnnnnnnnnnnnnnnnnnnnnnnnnnnnnnnnnnnnnnnnnnnnnnnnnnnnnnnnnnnnnnnnnnnnnnnnnnnnnnnnnnnnnnnnnnnnnnnnnnnnnnnnnnnnnnnnnnnnnnnnnnnnnnnnnnnnnnnnnnnnnnnnnnnnnnnnnnnnnnnnnnnnnnnnnnnnnnnnnnnnnnnnnnnnnnnnnnnnnnnnnnnnnnnnnnnnnnnnnnnnnnnnnnnnnnnnnnnnnnnnnnnnnnnnnnnnnnnnnnnnnnnnnnnnnnnnnnnnnnnnnnnnnnnnnnnnnnnnnnnnnnnnnnnnnnnnnnnnnnnnnnnnnnnnnnnnnnnnnnnnnnnnnnnnnnnnnnnnnnnnnnnnnnnnnnnnnnnnnnnnnnnnnnnnnnnnnnnnnnnnnnnnnnnnnnnnnnnnnnnnnnnnnnnnnnnnnnnnnnnnnnnnnnnnnnnnnnnnnnnnnnnnnnnnnnnnnnnnnnnnnnnnnnnnnnnnnnnnnnnnnnnnnnnnnnnnnnnnnnnnnnnnnnnnnnnnnnnnnnnnnnnnnnnnnnnnnnnnnnnnnnnnnnnnnnnnnnnnnnnnnnnnnnnnnnnnnnnnnnnnnnnnnnnnnnnnnnnnnnnnnnnnnnnnnnnnnnnnnnnnnnnnnnnnnnnnnnnnnnnnnnnnnnnnnnnnnnnnnnnnnnnnnnnnnnnnnnnnnnnnnnnnnnnnnnnnnnnnnnnnnnnnnnnnnnnnnnnnnnnnnnnnnnnnnnnnnnnnnnnnnnnnnnnnnnnnnnnnnnnnnnnnnnnnnnnnnnnnnnnnnnnnnnnnnnnnnnnnnnnnnnnnnnnnnnnnnnnnnnnnnnnnnnnnnnnnnnnnnnnnnnnnnnnnnnnnnnnnnnnnnnnnnnnnnnnnnnnnnnnnnnnnnnnnnnnnnnnnnnnnnnnnnnnnnnnnnnnnnnnnnnnnnnnnnnnnnnnnnnnnnnnnnnnnnnnnnnnnnnnnnnnnnnnnnnnnnnnnnnnnnnnnnnnnnnnnnnnnnnnnnnnnnnnnnnnnnnnnnnnnnnnnnnnnnnnnnnnnnnnnnnnnnnnnnnnnnnnnnnnnnnnnnnnnnnnnnnnnnnnnnnnnnnnnnnnnnnnnnnnnnnnnnnnnnnnnnnnnnnnnnnnnnnnnnnnnnnnnnnnnnnnnnnnnnnnnnnnnnnnnnnnnnnnnnnnnnnnnnnnnnnnnnnnnnnnnnnnnnnnnnnnnnnnnnnnnnnnnnnnnnnnnnnnnnnnnnnnnnnnnnnnnnnnnnnnnnnnnnnnnnnnnnnnnnnnnnnnnnnnnnnnnnnnnnnnnnnnnnnnnnnnnnnnnnnnnnnnnnnnnnnnnnnnnnnnnnnnnnnnnnnnnnnnnnnnnnnnnnnnnnnnnnnnnnnnnnnnnnnnnnnnnnnnnnnnnnnnnnnnnnnnnnnnnnnnnnnnnnnnnnnnnnnnnnnnnnnnnnnnnnnnnnnnnnnnnnnnnnnnnnnnnnnnnnnnnnnnnnnnnnnnnnnnnnnnnnnnnnnnnnnnnnnnnnnnnnnnnnnnnnnnnnnnnnnnnnnnnnnnnnnnnnnnnnnnnnnnnnnnnnnnnnnnnnnnnnnnnnnnnnnnnnnnnnnnnnnnnnnnnnnnnnnnnnnnnnnnnnnnnnnnnnnnnnnnnnnnnnnnnnnnnnnnnnnnnnnnnnnnnnnnnnnnnnnnnnnnnnnnnnnnnnnnnnnnnnnnnnnnnnnnnnnnnnnnnnnnnnnnnnnnnnnnnnnnnnnnnnnnnnnnnnnnnnnnnnnnnnnnnnnnnnnnnnnnnnnnnnnnnnnnnnnnnnnnnnnnnnnnnnnnnnnnnnnnnnnnnnnnnnnnnnnnnnnnnnnnnnnnnnnnnnnnnnnnnnnnnnnnnnnnnnnnnnnnnnnnnnnnnnnnnnnnnnnnnnnnnnnnnnnnnnnnnnnnnnnnnnnnnnnnnnnnnnnnnnnnnnnnnnnnnnnnnnnnnnnnnnnnnnnnnnnnnnnnnnnnnnnnnnnnnnnnnnnnnnnnnnnnnnnnnnnnnnnnnnnnnnnnnnnnnnnnnnnnnnnnnnnnnnnnnnnnnnnnnnnnnnnnnnnnnnnnnnnnnnnnnnnnnnnnnnnnnnnnnnnnnnnnnnnnnnnnnnnnnnnnnnnnnnnnnnnnnnnnnnnnnnnnnnnnnnnnnnnnnnnnnnnnnnnnnnnnnnnnnnnnnnnnnnnnnnnnnnnnnnnnnnnnnnnnnnnnnnnnnnnnnnnnnnnnnnnnnnnnnnnnnnnnnnnnnnnnnnnnnnnnnnnnnnnnnnnnnnnnnnnnnnnnnnnnnnnnnnnnnnnnnnnnnnnnnnnnnnnnnnnnnnnnnnnnnnnnnnnnnnnnnnnnnnnnnnnnnnnnnnnnnnnnnnnnnnnnnnnnnnnnnnnnnnnnnnnnnnnnnnnnnnnnnnnnnnnnnnnnnnnnnnnnnnnnnnnnnnnnnnnnnnnnnnnnnnnnnnnnnnnnnnnnnnnnnnnnnnnnnnnnnnnnnnnnnnnnnnnnnnnnnnnnnnnnnnnnnnnnnnnnnnnnnnnnnnnnnnnnnnnnnnnnnnnnnnnnnnnnnnnnnnnnnnnnnnnnnnnnnnnnnnnnnnnnnnnnnnnnnnnnnnnnnnnnnnnnnnnnnnnnnnnnnnnnnnnnnnnnnnnnnnnnnnnnnnnnnnnnnnnnnnnnnnnnnnnnnnnnnnnnnnnnnnnnnnnnnnnnnnnnnnnnnnnnnnnnnnnnnnnnnnnnnnnnnnnnnnnnnnnnnnnnnnnnnnnnnnnnnnnnnnnnnnnnnnnnnnnnnnnnnnnnnnnnnnnnnnnnnnnnnnnnnnnnnnnnnnnnnnnnnnnnnnnnnnnnnnnnnnnnnnnnnnnnnnnnnnnnnnnnnnnnnnnnnnnnnnnnnnnnnnnnnnnnnnnnnnnnnnnnnnnnnnnnnnnnnnnnnnnnnnnnnnnnnnnnnnnnnnnnnnnnnnnnnnnnnnnnnnnnnnnnnnnnnnnnnnnnnnnnnnnnnnnnnnnnnnnnnnnnnnnnnnnnnnnnnnnnnnnnnnnnnnnnnnnnnnnnnnnnnnnnnnnnnnnnnnnnnnnnnnnnnnnnnnnnnnnnnnnnnnnnnnnnnnnnnnnnnnnnnnnnnnnnnnnnnnnnnnnnnnnnnnnnnnnnnnnnnnnnnnnnnnnnnnnnnnnnnnnnnnnnnnnnnnnnnnnnnnnnnnnnnnnnnnnnnnnnnnnnnnnnnnnnnnnnnnnnnnnnnnnnnnnnnnnnnnnnnnnnnnnnnnnnnnnnnnnnnnnnnnnnnnnnnnnnnnnnnnnnnnnnnnnnnnnnnnnnnnnnnnnnnnnnnnnnnnnnnnnnnnnnnnnnnnnnnnnnnnnnnnnnnnnnnnnnnnnnnnnnnnnnnnnnnnnnnnnnnnnnnnnnnnnnnnnnnnnnnnnnnnnnnnnnnnnnnnnnnnnnnnnnnnnnnnnnnnnnnnnnnnnnnnnnnnnnnnnnnnnnnnnnnnnnnnnnnnnnnnnnnnnnnnnnnnnnnnnnnnnnnnnnnnnnnnnnnnnnnnnnnnnnnnnnnnnnnnnnnnnnnnnnnnnnnnnnnnnnnnnnnnnnnnnnnnnnnnnnnnnnnnnnnnnnnnnnnnnnnnnnnnnnnnnnnnnnnnnnnnnnnnnnnnnnnnnnnnnnnnnnnnnnnnnnnnnnnnnnnnnnnnnnnnnnnnnnnnnnnnnnnnnnnnnnnnnnnnnnnnnnnnnnnnnnnnnnnnnnnnnnnnnnnnnnnnnnnnnnnnnnnnnnnnnnnnnnnnnnnnnnnnnnnnnnnnnnnnnnnnnnnnnnnnnnnnnnnnnnnnnnnnnnnnnnnnnnnnnnnnnnnnnnnnnnnnnnnnnnnnnnnnnnnnnnnnnnnnnnnnnnnnnnnnnnnnnnnnnnnnnnnnnnnnnnnnnnnnnnnnnnnnnnnnnnnnnnnnnnnnnnnnnnnnnnnnnnnnnnnnnnnnnnnnnnnnnnnnnnnnnnnnnnnnnnnnnnnnnnnnnnnnnnnnnnnnnnnnnnnnnnnnnnnnnnnnnnnnnnnnnnnnnnnnnnnnnnnnnnnnnnnnnnnnnnnnnnnnnnnnnnnnnnnnnnnnnnnnnnnnnnnnnnnnnnnnnnnnnnnnnnnnnnnnnnnnnnnnnnnnnnnnnnnnnnnnnnnnnnnnnnnnnnnnnnnnnnnnnnnnnnnnnnnnnnnnnnnnnnnnnnnnnnnnnnnnnnnnnnnnnnnnnnnnnnnnnnnnnnnnnnnnnnnnnnnnnnnnnnnnnnnnnnnnnnnnnnnnnnnnnnnnnnnnnnnnnnnnnnnnnnnnnnnnnnnnnnnnnnnnnnnnnnnnnnnnnnnnnnnnnnnnnnnnnnnnnnnnnnnnnnnnnnnnnnnnnnnnnnnnnnnnnnnnnnnnnnnnnnnnnnnnnnnnnnnnnnnnnnnnnnnnnnnnnnnnnnnnnnnnnnnnnnnnnnnnnnnnnnnnnnnnnnnnnnnnnnnnnnnnnnnnnnnnnnnnnnnnnnnnnnnnnnnnnnnnnnnnnnnnnnnnnnnnnnnnnnnnnnnnnnnnnnnnnnnnnnnnnnnnnnnnnnnnnnnnnnnnnnnnnnnnnnnnnnnnnnnnnnnnnnnnnnnnnnnnnnnnnnnnnnnnnnnnnnnnnnnnnnnnnnnnnnnnnnnnnnnnnnnnnnnnnnnnnnnnnnnnnnnnnnnnnnnnnnnnnnnnnnnnnnnnnnnnnnnnnnnnnnnnnnnnnnnnnnnnnnnnnnnnnnnnnnnnnnnnnnnnnnnnnnnnnnnnnnnnnnnnnnnnnnnnnnnnnnnnnnnnnnnnnnnnnnnnnnnnnnnnnnnnnnnnnnnnnnnnnnnnnnnnnnnnnnnnnnnnnnnnnnnnnnnnnnnnnnnnnnnnnnnnnnnnnnnnnnnnnnnnnnnnnnnnnnnnnnnnnnnnnnnnnnnnnnnnnnnnnnnnnnnnnnnnnnnnnnnnnnnnnnnnnnnnnnnnnnnnnnnnnnnnnnnnnnnnnnnnnnnnnnnnnnnnnnnnnnnnnnnnnnnnnnnnnnnnnnnnnnnnnnnnnnnnnnnnnnnnnnnnnnnnnnnnnnnnnnnnnnnnnnnnnnnnnnnnnnnnnnnnnnnnnnnnnnnnnnnnnnnnnnnnnnnnnnnnnnnnnnnnnnnnnnnnnnnnnnnnnnnnnnnnnnnnnnnnnnnnnnnnnnnnnnnnnnnnnnnnnnnnnnnnnnnnnnnnnnnnnnnnnnnnnnnnnnnnnnnnnnnnnnnnnnnnnnnnnnnnnnnnnnnnnnnnnnnnnnnnnnnnnnnnnnnnnnnnnnnnnnnnnnnnnnnnnnnnnnnnnnnnnnnnnnnnnnnnnnnnnnnnnnnnnnnnnnnnnnnnnnnnnnnnnnnnnnnnnnnnnnnnnnnnnnnnnnnnnnnnnnnnnnnnnnnnnnnnnnnnnnnnnnnnnnnnnnnnnnnnnnnnnnnnnnnnnnnnnnnnnnnnnnnnnnnnnnnnnnnnnnnnnnnnnnnnnnnnnnnnnnnnnnnnnnnnnnnnnnnnnnnnnnnnnnnnnnnnnnnnnnnnnnnnnnnnnnnnnnnnnnnnnnnnnnnnnnnnnnnnnnnnnnnnnnnnnnnnnnnnnnnnnnnnnnnnnnnnnnnnnnnnnnnnnnnnnnnnnnnnnnnnnnnnnnnnnnnnnnnnnnnnnnnnnnnnnnnnnnnnnnnnnnnnnnnnnnnnnnnnnnnnnnnnnnnnnnnnnnnnnnnnnnnnnnnnnnnnnnnnnnnnnnnnnnnnnnnnnnnnnnnnnnnnnnnnnnnnnnnnnnnnnnnnnnnnnnnnnnnnnnnnnnnnnnnnnnnnnnnnnnnnnnnnnnnnnnnnnnnnnnnnnnnnnnnnnnnnnnnnnnnnnnnnnnnnnnnnnnnnnnnnnnnnnnnnnnnnnnnnnnnnnnnnnnnnnnnnnnnnnnnnnnnnnnnnnnnnnnnnnnnnnnnnnnnnnnnnnnnnnnnnnnnnnnnnnnnnnnnnnnnnnnnnnnnnnnnnnnnnnnnnnnnnnnnnnnnnnnnnnnnnnnnnnnnnnnnnnnnnnnnnnnnnnnnnnnnnnnnnnnnnnnnnnnnnnnnnnnnnnnnnnnnnnnnnnnnnnnnnnnnnnnnnnnnnnnnnnnnnnnnnnnnnnnnnnnnnnnnnnnnnnnnnnnnnnnnnnnnnnnnnnnnnnnnnnnnnnnnnnnnnnnnnnnnnnnnnnnnnnnnnnnnnnnnnnnnnnnnnnnnnnnnnnnnnnnnnnnnnnnnnnnnnnnnnnnnnnnnnnnnnnnnnnnnnnnnnnnnnnnnnnnnnnnnnnnnnnnnnnnnnnnnnnnnnnnnnnnnnnnnnnnnnnnnnnnnnnnnnnnnnnnnnnnnnnnnnnnnnnnnnnnnnnnnnnnnnnnnnnnnnnnnnnnnnnnnnnnnnnnnnnnnnnnnnnnnnnnnnnnnnnnnnnnnnnnnnnnnnnnnnnnnnnnnnnnnnnnnnnnnnnnnnnnnnnnnnnnnnnnnnnnnnnnnnnnnnnnnnnnnnnnnnnnnnnnnnnnnnnnnnnnnnnnnnnnnnnnnnnnnnnnnnnnnnnnnnnnnnnnnnnnnnnnnnnnnnnnnnnnnnnnnnnnnnnnnnnnnnnnnnnnnnnnnnnnnnnnnnnnnnnnnnnnnnnnnnnnnnnnnnnnnnnnnnnnnnnnncctgtaccacgccagcgccgccatttatgaacccgttgccatcggggcattggctattgtgcaagccatgcgtcccgacgacctgtggcttgaccaccagtggttaaagaagaacaagcgcggcgctgtgcacaccaagttcgacaacctatccgacaacatactgaccacctacaagaccatagcggcaccgaccatgacctggtacggcgaaggtgatgcagaccgcattcgtgtcttactagcgcatctacccctcattggtaaaaagcgggtttgctccgtgacccagtggaccgttgaggcgggcgagcttgacggtctgcatggctatgccgatgagccactgcggcctgtacccgttgagctgtgggatggtgacaagagcagccccatcgtggacgcggcatggcgtcccgcttattgggatgcgactgggcgcaccgcttgttttgtgaactgagggcacaccatgacgacgcttgaatttttaatcagtacttcggtcgccacctcgttgcgcaaaccggtgatgcgcaggccgatgcaacgcgcacgctgtcgtctggccacaaaatggccaagggtggcacagcacaacgcattgcatcgggttgggcggtgatctcagaagatgtcagcacgcttcaattcaagctggcggccaccggcttaagttacggcggacagacgcgttacgaggcttggctagatgcgcttgaggcatttagcggcaagcccatcatgcttattgagtttgataagaagcctgtaccagttaccaacctgtttcgtacgcatgatttacgagcggtacaggtgtgttcgcccggcggggcggcgctatttgactttacgcaagaacccaccgctgagagtggtaaagcgcacaaagtgctgtggaaattaaaactagaaaggctaaaaagcgctgttgaatcaagcgcttgagccacatgagatcaagccaccctctaaatgggtggttactagaactcaccggtcagccactcgtttgttttgcggatcaagccaccgtctaaatgggtggttactagaacatgtcgctagttgcgctttacgaaggcaaagatcaagccaccctctaaatgggtggttactagaacgacgtgcttggtgacatacaacgcgtgcgcagatcaagccaccctctaaatgggtggttactagaactatgccgtccagcccgttcgtttcaagccttgatcaagccaccctctaaatgggtggttattagaaccaatcaaatatctacgcctaccgtaaaaatgatcaagccaccctctaaatgggtggttacttatttacagacataccatgggccgccgtgcccttattaggagttcaccgatgtttcgttcctcagagcagcagcatttctgcaatgtgcttattaagcatttgaaacgcgtcgatgcgcccatattgctggaaggcggggtgggtcttgggaagacgcgtgcctacctggccgcactggcaactacgacgcaaacggttgccattgtgttacccacacaccaactgattgaccagttgctggctagcgctgacttgtcagccgttgccttgccattggccgtgttcaggccagccagtcggtttgacacacgggaggcgtaccaagcgcagcgagaggcggcccgtgctgcgcgtgtcatgctctgcaccgctgcaagcgtgattattgaccaacgccttgcgggggcttacaacggcgcaacacagcgtgatgtggtgttatttgatgaagccgaccagttacccgatatggcggcattgcagagcgactttgtgattgaggcggcgctactgcagggccagccgctgcacgcggccttagagcgcataagcaccacccgttcacagtcggttgaggccgagcaaaaggctgctgcgcgggtcatgcttgagatattggccgaaccggtgggctacgcatccgtcgggcttgatgatgatggcaatgcgcggctacaccacgccctgccaggtcgcttattaaagaaaattagcaatcgcggtagcacggtgtttctttctgcaacgctgacccacaacgataagtttgatgacttcaagatcgccatgggcctagacgcggtgagtagcctgtcaacaagcattgagccagaacagcatggcacgctcgacttcaccgtacacgcgcacgaggtggacacgcctgactggtttgcggccaccgttcagtgcatacaaagcgcgcagcgccccacgttggtggtcacacctagccatgacctcacagagcggctacaaaccgccgtgggtgagcaagcagacttgcttatacgtgcgggtgcatgggcgggtcttgacacgccaacgcgctggcgtaccgtggttattccgcgcgtgccatttggcgcaccagtcattgttgacggggtggcggtcacgtcttacttggccgccaaggtgacggccagtcggcggatgcgccaagcaattggccgtgggcttagaacacctgaggcggtgtgcacggttgtggttttggatgcgcgggcacacaacttaggtcgctttgtgccagagcgttttgcggcagattggtcgtctcggcaagtgtttgaggagggtgcccgccatgcggtggtgctgtccaaagcggagcgcgaccccgctttggccaaagccgcgctcagacactacggcgctcaatgccaacaagcgggttgttccgtgacagaggcgtgtcagctggacgtgcaccaccttgaccccgtaagcgaaggcgtgcgccgcacaaccttgaaggatgtgaccgtgctgtgtgcaaaccaccaccgacaggcccaccacgacatgaaaatggggctgaacgtgtcgtagcgcaacaaaaaacccgccatacctttgggtacgcgggttttgggagttctggcaaggcctgaaacctaaatgtggtggtgataggtggacttgaaccaccgaccccagcattatgaatgctgtgctctaaccaactgagctatatcaccgagcctgaaattatagccaaaattctcagggctttggcttgccgccaaaagtttttgttagccattttgtcgcgcccgtacgacgcgccaagcccttggttattggtgtttgaaggcgggtttgcgcttgtttatgaacgcatccatgccctctttttggtcttcggttgcaaacagcgcgtggaacagacggcgctcaaaacgcacgccttcgctgaggctgccttcaaacgcttggttcaccgcttcctttgccgccatgacactggggagggagtagttgcaaatcatcagggctgcgcccaaggcctcggtcatgagttggtcatcggcgaccacgcggctcaccagtccgccgcgctcggcttctgcagcgtccatcatgcggcctgtgagggccatgtccatggccttggctttgccaacggcgcgtggcaggcgctgcgtgccacctgcgccagggataacgcccaacttgatttcgggttggccaaatttggcgctctcgctggcaatgatgacgtcgcacatcatggccaattcacagccgccgccgagggcaaagccgctgacggcggcaataacgggcttgcgaacgctgcgaatggtttcccagttgcgcgtgatgtagtctgacttgtagacgtcagcaaaggtgtaggtcgccatagcgccaatgtcggcacccgcggcaaaggctttttcactgcctgtgagcacaatgcagccaatgtccgggtcggcgtcgaatgcggttagcgccgcgccaagctcgtccattagcgcactgttgagggcattgagttgtttggggcggtttagggtgagtatgcccacgcggccttcgatgcggattaaaaccagttgctcactcatgtctgtgttctccaatgtggtgcgaaaagttgcttagaaaaagttgtttcgaaagttgcttcgacgtaagcggttgatcatagccaagcggtgagcttgctagggtctttcaccaccagttcggcgatctggttggcgtgggtcgatggccagatgagggggcacgacaacatgcggccatcgcgcgcgacaccggcaaccaatgggtgctgggctacgtcggcgtggcgtctcgcaatgttctccacatcgctcagtgactttacccgccattgatcggtgccatcaaatagtgtcacccattcgtcacccgccgccatgcccgcttgttcgcctgcaccgcctcttgccacgtgggtgatgcggatgccgtctcgctcaacgacacgcatgcccaagcgctgggcgagggtgccgctcttggccgccacggcgacaccgtaatgactaagcagtgcgtgtaccggcaggtcttcggtgctgtgtacccagtgcgcgagctgtgtggcgacgttggcgtgcccttgctggttgagcagggcgtagatgtcggcctcactgatggtgccgcctttgcttttgacccataggccgcgcatgagggtgtcgagatcgccgccttgttggcgcagcatgaggtcggtgcacagcgctattagcgcccctttggtgtagtagctaacggtggcgttgggcgtgttttcgccaatgcggtagtacttgacccacgcgtcatagctagactgggcaacgctttgcagatgccgccctggggtggccgcaacgtggttaatggatttggccagcagcgtgagataggtgggcgtatcaatgagtttggcgcgttgcagaaacaggtcatcgtagtagctggtaaagccttcaaagaaccacagcagctcggtgtagttctcttggttgaagtcgatgcttgcaaactcggatgggcgcaggcgcttgacgttccatgtgtgaaagtactcatggctaatgaggccaagtaattggttgtagccagcgccttgtgcatgggggggcgctgcctcgccagcgacggccgttaggggcaagtcggcacgctggcaaatgagtgcggtgctggcgatgtgctctagcccgccgtagccgttttcagtggcgtgaagcatgaagacgtagcggtcaaagggtagttggcgttgcggttgtttgccgtgccaaaacgtgatctctgtttcgcaaattcggcgggtgtcggcaactaattttttgacatcaaacccgggcgcggtgtggttgccaatgcccgtgacaacgagttcatgcggtacgccagagaccttaaaccggctgacgtaaaaatcacccaaggtaaagggactgtcggcgagctcgccgcagttgcgggcggtgtagcgcccgaagccacgcgcgtcgatttgccgcgcgggcaatgcggtagacagccgccacgcattgaacgcgggcgcggtggggcgctcgacggagatggtttgtatctcgtcttcgcccccgaccacttgcaaacacaggctggtggggttaaagaagccgcgggtgttgtccaaaaaggcggttcgcaccgaggcgtcaaaggcgtagatttggtaattgagctccagcgggcgtttgccgtcggattccactagccactcatttttactgcactgcgtgatttggcaaggcgtgcggccttgcttggctgtgagcgcttgcaggtgttgcgaaaattcacgcaccaaataactacccgcaatccaaacgggtagacgcaggcgctgttgcttttttgggcttgagatgcgcagatgcacaccgaacaggtgcgcttccgcgctgtcaacgcgaatgttgtgatcgatgcgcatggtgttacttgatggcggccagacgcttctcaacttcggcggcagaaatggcgccggggacacgtgtgccgtctgagaagaaaagggcaggcgtgcccgagatacggtgcttttgaccaaacgcgatgttgcggtcaagcgcgctggtgtcgcagctgatggcggcggcgctggtggttagagggacttcattcaccatccagtcttcaaaggctacgccggggtttttgtcgcaccaaatggccttggacttgagcgttgaatccgcgccgagtatggggtacaaaaagatatgcagggtgatgttgtcgacattcatcatgtcacgttcaaagcgcttgcagaagccacagttggggtcttcaaaaaccgcgagttgacgcttgccgttaccgcgtttgatggtgaaggcatctttaaagggcagggcctcaaagggtattgcgctcaatttatcgaggcgctcctgcgtcaggttgcgtttgcccttgaggtcaacgagtacgccttgcagcaaaaattcaccgttggcatcggtgtacaaaatttcggtttcaccaaagcgaacttcgtagaggccggccatgggggtcttggtgacgctgttgatagcgggtaagttgggtagttgcttgggtagcatctcgcgaatcttggcttcctgtgcccagcccatgcttgccatgagagtgaatgcgatgcccacggccaagccgcgcaataaagagcgtgtgggggtgggtgcgagaggtgacgtgtggtgaagcatggtgtggttcgctaggtaggcgttgtttgggggtaagagggtgggtgggttggttcgtgggagggggctgttgggtagcggatgctcgctgttggagcaccatcgtggcaatcagttccccatgccaacacgctgtacccacgacttgagtgggcccatggcattaaagcccgacatgcctgcattgcgtagccaactggcggcggggttgcggcccaaggggttgttgaacaagtgaaagagtccgtgcgtgacccattgcatgggttcggtggcggcgcgtcgacgccgttggtagcgctgaagcacgcgtgaggcacccggagactcacctcgggcgcgtgccgcaacgcagtcactgagcgtttgtacgtcggccaagccaaggttgagaccttgccctgcgagggggtggatggtgtgcgccgcatcgccggctaacgcggtctgctgggcaacccattgcgtggttaagccgacgctcaaggggaaggcaacaggcccgctggtaagggagaggtgccctagcgcgccctgactggcttgggtgagttggtcttctagggcggcggtttgggcggtggtctccatgtccagccacgtctggtgcgcagcgtctggtagcgaccagacaacggccaggtcgtgcccgtcagcgccgcccatgggcagcagggccaaaatatgtgtgccgttaaaccactggtgggcgacgccgccgtggctgtgctcggcgcgcatgcgcaacgccaaggcacggtgggggtagtgcttacttaccatgtcaatacccaaggcggtgcgcgcgataccgctcttgccttcgcaaatgatggtcaatgcgctaggcggtgtctgggctgatggtgacgcgtggtcgtcaaattgcacgcgtgcatggcgtgtgacggcttcggcaagatggtcctctaggacaggcacatcgaccatccacgccaagggctgcgcttgctgtgggggtgcgtcgaattgcagcgcgcctgacgcatcgccaaacacccgcatatgggtcatgggggtcagccacgcggcctgatcgtcttgaggccagacaccgcatgctttgagggtgtctctcgaggtgtggttgatggcgtaggcgcgaatgtcgcgggtgtgcggtggcgcttggggcgcgggcaggctgacggaaaagccttgctctgccaataacaatgccgccgcgtgcgcggtgatgccagcgcctaaaacggtgatgtgccctgattgagtcatggcgttattctattgggacacccacttggggggccagcgatgaccctgccccggaagtgccttaaactctgggtcttgctttttgaggattgtcatgagtttgaaatgcggcatcgttggtctgcccaacgtcggtaaatctaccctgtttaacgcgcttaccaaggctggtatcgccgctgagaactaccctttttgcaccatcgagcccaacgttggcgtggtggaggtgcccgacacccgcctagcgcagctcagcgatatcgtgacgcctgagcgcattgttcctgcgattgttgaatttgtggatatagccggcttggtggcgggtgccagtacgggcgagggcttgggtaacaagtttttggcccatatccgcgaaaccgatgccacggttaacgttgtgcgttgttttgaagatgacaacgtggtgcacgtcgcgggcaaggtggatccgatttctgacattgaggtgattcaaacggagttgtgccttgccgacttaggcgcagtagagaaagccctgcaccgggtctccaagaccgcgcgttctggcgacaaagagtcggtgcgcttggtgtcgattttggagcgctgtcaggcggccttaaacgagggcaagcctgttcgcacgctagatttcagcaaagaagaagcgccgctgcttaagcagtttttcttgattacggccaagccagcgatgttcgttgcgaacgtgtctgaggatggctttgagaacaaccccctgcttgaccgcttgaccgcctttgccaacgagcagaacgcgcctgtggtggcgatctgcgccaagctagaggccgagatgagcgagatgagcgacgaggaccgcgatatgttcctggaagagctggggcagtccgagccgggcttaaaccgtctgatccgtgccgcctacagtttgttgggtttgcagacctacttcactgcgggtgtaaaagaggtgcgcgcttggactatccacgttggggatacggggccgcaggcggccggtgtgatccacactgatttcgaaaagggctacattcgcgcccaaaccattgcctttgatgacttcattgcattcaagggcgagcagggcgctaaggacgcgggcaagatgcgcgcagaaggcaaggagtatgtcgtgaaagacggcgatgtactcaacttcttgttcagctcataagccactgcgcactcgcggcaatggcaaggtagcgggcgaacttgccaatggccatgtacaccgcgcaggccagccagggcattcttagccagcctgcgagggtgcacaccacatcgccgaccacgggtagccaagccagcaaacacgccttgggtccgagtttttccagttgagccaaagcccacgcggcgagcctgccagccgttggggtggcctgagcatccgcgcgtcggtgcgggtgcgcacggttttggtaggcgcggtgcgctgattgcaggccaacgcccatcagccaactcaccatgccacccaaggtgttgcctaccgtcgctagtaacaaggcgggccaaaatagatggggtgagatggcgatgagacccattaatgccgcctccgaccccatgggaagccacgtcgcggagacgaatgccgtgacaaaaacggtagtcaacccccattcgggcagactgaaccagtgaagtaagctcgcaaaaaaggcatccattggcttgagtataggtacaatcatgcttaaattttcagcaagcaccgacgcgtcaatcggtgcttttttgtctctaactgccgtccaacgtgcatatcggtccctaccacctccgcaataacctgttcgtcgcgcctatggctggcgtgacagaccgcccgtttcgccagttgtgtaagcaactgggcgcgggctatgccgtgagcgaaatggtgacatcgcggcgcgatttgtgggactcgcttaaaacctcacgccgtgcaaatcacgccggtgagagcgggcccattgcggttcaaattgcggggaccgacgcccagatgatggccgatgccgcggtgtacaacattgaccgtggcgcacaaattattgatatcaacatggggtgccccgcaaaaaaggtgtgcaacaagtgggccggttctgcgttgatgcaagacgagaccttggcgatcgccattgtcgaagcggtggtgaacgcctgcgcctctaaggatgtcccggtgacattaaagatgcggacgggttgggcggcgcatgcgaagaatgccacgcggttggcgctggcggcggagcaagtgggggtgcagatgttgacgattcacggtcgcacgcgcgagcaaggctataagggttttgcagagcatgagacggtggcggacattaagtcgcgggtgcgtattcccgtggtggccaatggggatattgcatcgcccgaggcggcgcaacgtgtgttgcaagccacgggggccgatgcggtgatggtgggacgcgccgcgcaagggcgcccatggatatttagtgagatcgctcattttttagccaccggacgccacgcgccaccgcccaccgctgtggatatgcgggcgtggatggtggagcacctgcacgcgcactacgcgctttacggcgaatttacaggcgttcggtctgcgcgcaagcaccttggttggtatgcgcaacacttgcccatgggtgagcttttgcgtcagcgcatcaatgccttaaccgattgcgcggagcagttggctgcagtcgaggcgtatttcgcagcgtgggacagtgatgatctggccgcgcttggtcgggcatggcaaccgacacagataccgggcagcgcgcagagccagtctgtgcgagagatgcctgtcgacatgacattggccccccttcattgagcgttatatgagccgtaaagacattgaaaagggcgtgcgtgaaagcatgcaaacctacttccaagacctcgccggtagcgagccacatggcctgtacgacatgatggttgatgttgtggagaagcccttgctggaggtggtgatggcgcaagcaggcaataaccagtctcgcgcggcgcagtggcttggtctcaatcgcaacaccttgcgcaaaaaattacttcatcacaagttactcagttaacgctgcaaacgcggcggcctaactcgtcatttccccctttatttttcacgactaccaagcaccatgaacgcactcttatctgtatccgacaaaaccggcattgtggcc

SEQ ID NO: 48 - DNA, 19331 bp, Artificial Sequence
  Synthetic Oligonucleotide
ctttgcagccgtctgacagtttgtcatacagggctttataagccactgcatgcatatgcatcttataaagattctgcaagtcagtatcggtgattatgttgccatcaataaatcgtgccatggtaatttttccttgtttggtttgttgaataaatcttgcaaggaggtatggtgtgcgtggaataagaatccaatatggaaacgcacagcttaacagcgcagggcaaagagaaaagtctgtgaggcgaaggcgttgaggcggatcgcgaatcgcaatcctgtgaaaattcagcctggcggcttcacgggtgattcgttctgcgtgtgccgaaacagatgtttgcggctgccgggatggtcatccgattaatcacgatagcacttgcagttgcaaccagaataatcgcgatgacacaaaaacatctctatctaagtatgatttagatgcggttgattactgctgcccccaaaccttaaacgcgtgagcaggctttttcagatcgtatttagccttattttcatcgctaagtttgtcatagcgagactgagacattttgccattcaggtcgtgagatccggtcgatgacttgagtttgcgctcgtaagccgctgtcaccctgaccaacgcctcataaacaatctcgcgagacattttgaggttgtttgcgttccctttgattgactcgattgcattcaacagatccaggcgatccgcctcgacaagactgtctttcaggcgttgaatttcagcctcgattgcatggcgagatgtcggtgtattttctggcaagttcatggtcgttccttttatgattaatggaagaggcgcatattaatctcgttttcagcgagtagcaatcaaatgagcgttgattggtgtaggaataagcgttattctgtcgttaattgagcgtttgttgagttgctgtaatttgactccatatttacgactgcgtatactcaaagcatgaaataagctcacttcacagcctctgtttggcaatcaccctcgagacgcagacacctgtcgcgtgatttctatcgaggtgaaaaatgaatgacaacacgatcctgaatcaatcaacccgcaaagtaaaagatcataaaattttcacctgcagtcggtgcaaaaaaacattacacccagaagaacacataatggactggcaagagcggcttgttatctcattcaggggcggttatgggagtgtgtttggtgatggaaattatatcgagggcgtattctgccaggaatgcgttgatgaaacgctaggcccctggttgcgagtcacgaaagatgatccttttgaccctagatacaagtcagatcatctcgcagaaaagtcacttcaagattatcaaattaaccgaaataaagagtcgaaaacttgaatttcaccatctcagcctgtataatcaacacatgagatgaacaatctcttcctcctgagataaacccgccgatgcgggtttgaatggacatatcaaatctgaggagattcaaaatgaaagtcgcaaaaataaagcaaaaaaaacaccttgaacaggatgttaaaatactaaatatctacaaaagactcaatgcaagatacgagcgaaagcatggcggtgaagttgtcgtgagatcggaatctttgttggagttttttaaacaaaacggcccgaggccggaataacaaaaaacaaccaggtccgttaggatctggttgttgtactaattggcattcatcattgccttgcgcagtgcattaaatgcggctggagatatgtctgtatctatccttccaacaacctccagttcgctaatttccatcattgccgtcctattgcattgaaaccttgttccgaccatgccgtgcttcagcttcaatccagtcttatcccaaaacttagatccaaaatttgtcggggttacgacaaaatcaatacctttgtggtctttgttagcgtttacgtcaatttttttacttgttgcgtaaacgatttgggccataacgtgtccgttaattcccttttgaatgccggtaactagcgcgtagtgaggcaatgatccgccttcgtctgttgggaactggcagtaaacaatatctaaaatatctgggctcgcgctcatattaatctccattctatgtcgtaaaaggataggtaaaacatcacgcgtggacacccggggtcatgactccccagcacgcgtgatggcgccgtttctcaactttgcaaagggatatgctgtgcgaaaaataagaatatggaagaatagtttgcgtgaataaaattcaatctgtataataaacccgtcgaacatgattccctcctgatcggtagcaattttcccttaagttaattgctttttgcccaccacgccaatggtgggcttttttttgtccaaaatttgaacttggtaaatacgctctgtataatcaaaatatacaattaaatcaggaaaatgagcgtgattactcaagtcgaaacatttgccgagggccttgttcggattattcgtcagcagcgtctggatctttcaacagaaaagcgattgcaatcagggcttgctgacgtgttcttgaatagcaatatcgccttcagtcgggagcacgcattgtcacccggggatatcccggatttcttcatggatcacggtgtgctgattgagtgcaaggtgcacggggccaagaaaatggacgtgtacaagcagctgtgccggtacgctgagcacgacgaggtgtctgcaataatccttgcatcgaacattagtatgggcatgccggcattgatcaacggtaaaccggtgttctgtgcgtcgctaagtcggggatggttgtaatgagaacctacggcaccttaaaactgaccgagaacggcgaatcatgggaggcctccagtctcgaaccgcatgtatctattcggctgaaacaccttttcccaaaagttcctaagcaatcgaccgggccattcattttcccccgcgacctgatcaccgcggcggacttgagttggtttgagtcgcgttacaaactgaaaatgtccaaaaaggatcggtcggcgctcaaagatggcgaacgttctttcggcttacaacaagctgagatggagcggatactgttacctaattatgtgccgccggggattgttggtctgcgtgacgggcaggcgatccggcattaccagtctcaggcgatcgagcttctgcgccgccgaaaatcccttttgttgggagacgaaggcggattgggtaagacttatacggcgggcgcgttcatgtgtgcagagccaggatcattgccggccgccgtggtttgcgaccctcatatgcagaagcaatggctggagaagttgacggcttttacgactttgcgtattcatgtgatcaagaagaccaagccgtacgatctgccgccggccgacgtgtacatcttccggatctcccaaatttttgggtggacggacatattcgcgaccaacttttttaaggctgcgatttacgatgagccacaatcgttgaggaccgggaccgagaccgcgaagggtgccgccgcgaaggtgttatcaaaccatgtcatataccgacttggccttaccgccactccgatttacgggtacggcgtggaaatgcacaatgttttacagtacatagacgagacgattttaggctcctacgccgactttggccgcgaatgggtaaaccacgcgggccgcatcaccgaccccaaggctcttgggtctttcttgcgtgagcagcacgtcatgctacgtcgattaaaggcggatgtggggcaggagcttcctaaagtctcaaaaatcgttgaatacgtcgattacgacgtaaagacggtgcaatcaatcgaggatctcgcgcgtcgactggccatccgagctactgaaggctcgttcgttgagcgaggtgcggcatcgagagaattggacatgatggtgcggcaggcgacgggcgtgtcaaaagcgcgcgcggttgcccagttcgttcgtctgctggtcgaggctggcgagtcggtcctgctgcttggctggcatcgcgctgtctatgacatctggcaagaggagctaaaagacctgatgcccgccatgtacacgggatccgaatcagcgactcaaaaatccagtgagatcgatcgatttaaagcaggagaaacaaaagtcctgatcatgtcacttcgttctggcgctggtgtggacgggctgcagcattgttgttccactgttgtgtttggtgagctggattggtcgcccggcatccatcagcaagttatctggcgcgttgatcgtgaggggcagatgtacccggtgaccgtattcttcctggttgttgatgagggaagcgacccgccaatcatggacgtgttgggtatcaagtctagcgaggcgtgccagatcgtggatccgagcgttggcgtgcagacgagcgttgaagacacgacgaatttgaggaagttggtggatcgttatttggataaaaagaggggtgcgtaagtgagcggaagtgtattgacattaacgccgccgaatggaggtaactgcgttccataacttttttactgcatcgcaaaaaagagcggccagcgttgttcatgtggccacggctgcctcagtaacgcacgggccttacattaccgcagacaacgataatgtgatcaatctacttcgtgtcgtgccgggtaacaaaataccatgggagaatgtatctattcctggtgcaattgatcgtccggctggcgctgatggaagccgcgattttatgggtcatggattccttgctgtgtatatgggcaaagacatgaagccgtctggtgaaattgacaaggcagttcgtgaggctatcggtagcgacggtgaggtgcgataattctcgttgcttttaacgttatcgccttgaatttgctgtatcagcaacgtatacttctcgtatcaaaatcatgaggtgccgataggaatacctgggcgacaccccggtgatatcgtgagtaactacgcgcaaaagaaactgaagttttttgcaaccaacgaactcttctcgtatcaagcgggatggaaataatggagatattatgggtagtgattattcaatgaaagaagtccagctttttggaaaaacccaaacgttttgctctctgagcggcgttgtcgttaaacgtgaacagcgtagcgacacaatcgtcagcgggtcaggaaaaagcggctcttacggcggctacggcggtggtagtgtgtcgatcggttcaagcatcaggataacgacaaatctttggatcaagtgcgcgtcaggggttgaacatcacatccagctggatggcgactatccagcgatcgagggtaatgtggtgcatatgatcgacatggttgagagccgcccgagttctgaggactacgtcttcgacgaggcaacgaggacctcaaagccggcttcctatacttatcataaaattgataaaagcccggttatcttttacaacggcacccagaagaatatgtttttcatcggcggcctaaagttgcacgaaggtatcgttggtaaaaacaagataaatccaatgtggtttctcgccaatctcttgctctcaggctcgattggctacatgttctatttcttcaatattgatccacaatatccagctagatcatcggttccgattggtctaattacaggttttggcacgtcctttcttatgatgattattacggccgtgtgcaaccccaaagaaatctccagggacgcggccaataaaatgttttcagaagcctgctgggatcatgctaatcatcttgatctgatgtccccggcggtttttctgaaggcagatgagccggttttgattggcggttaggtgatgcacagcgcagtgtagggagggcattttgggcgcgtagaaataccaattaaaacacaattccatagagattccattcatcaaattaccaagccgccacccagcggctttttcttcgcaaaaaactcaataacctaaaaaatcctgctcgcgagattgccagtctttcttatttaacaaaattatcgcactacacgtagtaagtgctagtttgtattgataaataacaaataaagatgtacaaaaacttgtaatataaattccagttgtatataataaattcacaagtaggaggtgctgaaaagcgtttcaatcgatattaaatgtatcaaaagaaaaggagtcattttgacaaatagaaattacaagatggacaggattcgagtaacggcaaacatgctgtctccgatcgttactggcgggggttatatgacgcttgatggtttgctcggagctttgttgtttgatgagttgcaggatgtggaagcggctcatggcgcaatcccaatcaagtgtaaagacggtctgttttcggcaagcgcggcgatcatggaagcatcgcgggatcgaattacgtttattgcctcattgcgtcccggtcatagtattgatccggatttgattctgaagaacaaaaaaggtctattgcatcgaaaattcgacacctcattgaccaacgtaatgaacacatacacggagttgtcggcgaactctgtgacgtggttcgcggaaggggatgccgatcaaataatcaagctggttgagtctgttcaattcatcggaaagcgacgagcgtctggatttgggcgggtggccgggtggagtattgataccgataatcttgatggtattgaggggtattttggcggaccactgcgcccagtacctgctgaaatgttcgccggagataggtctcacccggtaattgatgcggcctggcgtccggcctattggaatccgaatcatcgcgctgcttgttttgcaccagaataaggagggacaaatgttgaacttttttaatgaaaattttggacggcacctggttgagcagggcgccgacccggtggcgaatgccagaagcgctttatcgtccggacaccggatgaaaaaagagggtggaatacctcaacgtattgcgtctggatgggctgtaatcagagccgggcgttcaaccttgcagtttgaactcgccgccacgggtcttgaatacagcaaaaagacgagatacgaggcgttccttgctgagttgagcgatggggattttgaagatccgaagatgtttattgaattttcaaaaaaaccggtgcctgttggcaacttgttcaggacgttcgacttgcgccatattcgtgtgtgctcttctggcggcgtcgagacttttgacttcacagttccgccagagaaggacggcagcaagactcataaaattttatggaaactaaaggagggtcagtgatggaatatgcatttcagaagccattgagcctgagcgggtacccgcttcatcgaattgccgctgatatggctgatggtgagaaggttattttcgcagatcgtggcgatcatatgttgttaagaacgagcaagcgtcttgagcttcaggaggttgctgctaaatcgattcgggttggaggtatttttggatttgagctccgcgcttgcgtcgggaaaaaggtgaaagggtgccaccgctacttcaaagtagaggactggcgttcgcgtcacgagtggcttgagcggcaaggggttttaggtggattttcgcttatggcaattcactgtgtagctggtatgacatcaattatcgataacgagcgtaattttaaagttgatcaaacagattttacgggcgtattgaaaattgaagacgagtcgcttttttttaaggcgatggagaatggtgttggaaataaagccagagcgttcggttttggcatgcttattatttaattttaaagagaaaaaacatgaaaactatcgtaattaatgcaacgttaacaactgttggtcctttgtctatcgcaatgcctgtcgcggaaggccaaatgggaaataagttcaacaacttcccaattatgacgcgagggattgatgatgagggaaataagcagcagaccggctatctcccgtctacaacgttgcgtggtttctttcgtcgttcaatcgttaccgatcaaatgcgtgtggcagcggaaagcggtaatcattacacgctgcaaaaagcatattccgatttgattggacaggatgcatcttccgaatcaaaagatgatatcgatttgatcaagttgcgccagctgcgcgatgagaactctgtgattgatctgtttggttgcggcctcggggttaaatctcgcctgcttgtttctcacttcatgccggatcacaacgtattgcctgaaacaatgacggggtgccgtaaagaccttgaggatacagaaggcgtcctggagttgatctccgatagtgaccgcgaagtctacctcggtcgatccggtgcaaacggtaagcgctcggcggccgcctcggtgattaaatcgctcgaagggaagatccgtaaagcgaaaaaagcaaacgagaaagaggatgttctcgctaatcttgaaactgcgcttaaggcggcccaggatgttgttgatcgcttcaaggacgacatgggatcaatgacgaattcatctcgaacgttgttgagttacacggctttccctgctggaatcgagttgaaagggcgcttgattgttgagcgattccgcgaacgcgatttgccgatgatcgaattggcgttaaacgaactgtcgaatcgcccgattctaggagctcaaagcgcacgcgggtgtggtgaggttgagggcgtatttgaagtctcgatcgatggtgttattgttaaaaaaatcagtatcggtggatggaaaaacgccattgttactgatttatctaaggcgatttgattgattttgttttgtaatcaataggttcttgattggctggtggagccaccctgcaaatgggtggttactagaacagccgctgcgattgtttccatgccgatttgggtggagccaccctgcaaatgggtggttactagaactaccggcctgttgctgacacaggcgacgggggtggagccaccctgcaaatgggtggttactagaaccaggagggagtttgtgccagagaaattgacggtggagccaccctgcaaatgggtggttactagaacaatggggaccaagacacacttcgctggtcaggtggagccaccctgcaaatgggtggttactagaacgttttgatacggtagtgcgctcagcgatagggtggagccaccctgcaaatgggtggttactagaactgcacacgacgagcgccgacggtttatctcggtggagccaccctgcaaatgggtggttactagaacaaagagtaatcagaccgcgctgccgcgcccggtggagccaccctgcaaatgggtggttactagaacggcgcgccactcaacaaaaaactgcgagttggtggagccaccctgcaaatgggtggttactagaactacagcggcgcactgccaaacgttcggagaggtggagccaccctgcaaatgggtggttactagaaccttgtaacgcttcaaaaaacctgctgatggtggagccaccctgcaaatgggtggttactagaactcggtaacaaaaggatggtcagacacgcttggtggagccaccctgcaaatgggtggttactagaacccgcacagcgacattatcgatttaagccggggtggagccaccctgcaaatgggtggttactagaactatgcgacggtgcctgcaaagctcaacgacggtggagccaccctgcaaatgggtggttactagaactcgggtatgtctttgctcaaatctctcgcaggtggagccaccctgcaaatgggtggttactagaactggataaaaactcggtcgcacgtcttgcccggtggagccaccctgcaaatgggtggttactagaacaccggaacgatcttgccgcccgcctcatttggtggagccaccctgcaaatgggtggttactagaaccttgctgaacttcagtacgcagatgggacgggtggagccaccctgcaaatgggtgcttgctaaaaaaacggctcgggtaaaaagtgcatgacgaaagattgagccaccacaggtggttattaaacaaacccaacaggaccttaaaaatgtttcgctcaaaagaacagcagaatttctcaaatatcatcgcggctcacatagccgacggcgatgctcctttgctgttggaggggggaacggggattggtaaaacccgcgcgtatctacactcgctaattcaatctggactgcgtgtcgccattgtatttccaacacaccaactgattgagcaaatgttaaattcggcagacctgattgcgacgcgtgggtcagcgactgtagccgcctttaagcccgcgcggatgtttgaatcgcgatccgattacgagatcaatcgacggttagcgatcgacgcgcaggttatgttttgcacggcggcaagcgtgattattgatcaacgggccggcggtgaatacaacggatcgacaggacgtgcatatttgctgtttgatgaggctgatcagctgccggacatggcagcgctgcaaagtgattttttgatcaagaaatctgacttgatggatattggcgtgaagatcaccaacgagcgagatgccttgatggcaatattggcgctgaagatacccatcgacccagaaatcaaggcttcagcgcgaattattcttgaagcgattgaaaaccccgcttggtataaaacaaccggcataaacgatcatggtgatatcgagctgaagcataaactgcccgggcgacttttgaagaagatcagtaatcgaggtaatactgcctttgtgtcggcaacgctcacaatcggtgggcggtttaaagactttcaggtgtcgatgggtattgaaaacacgagccacttgtcaggcgttattgatcctgaaaaacatggcgacctaaaattttccattgtaaattgcaagatcgatactgatgaatgggttgatgagatcgttaaggcggcggctggcgcaccaaagccagtgcttatcgcaacaacatcatacgcccttaccgagttgctgggcgagcgtatccccggcgctattatgcgctttgaagaagaaacgacatctcaagctgccgcgagagtaggtccggaaggtttgcttatttctgccggcgcctgggccgggctggatacgccgatacgatggaggtctgtcatcatccctcgcgtgccgtacaaacgtcttgatgtaatcaacgaagaggtcacgacaagttattttgattcgcgtaatacagcaataaggcgtcttcgccaggtttttgggcgcggactgagatcgccggatgcagtttgcgacgtctatatattggacgagaggatcaatgcattaaatggatttgttccatcacggttcgatcggcgatggagtgaccgatcaataactggcgatgcaaagacgttcttggaaggagggcgcagagagattgttctgtcaaaatcagagcggtgcccatcaatacgcaaaagcgcactaaagcactatggaaagaagtgcatgggaggatgtggtctggtcttaaaaagcgactcgcagcttgacgtccatcacacaaatccgatttctgatggtgttcgccagacaaggatggaagacctttctgttttgtgtgccaactgtcatcgattggctcactcagaagatccgccgttgtcgattgatacgctggtcgctattaatgcgtaattgcattggatgaataataggcgatatattgcctattgcagacttagccgtcaacagaaccaacctacacacaccccacacaacaacccgcttccacacaccatcaataaattcaacgcaatagaccacctaaaacttgaattttataaattcaatccgtataataaaaactccaaaaacacacaggagttgatcatgaaatattggtttgaaaacaagttcgaaaacaaaaaagccgctttgaccttcatcgccgaccgcgtcaataaggcgcttgcagatacgattctcgacttttgcgaaaagacgcatgagtctgcaatttcttgcaagaaagcagaagaagttgccggtgtctatctggctccgtttaacaaggataaaacgcattggatggctggcgttgagctcaaagcgcttgacgcctcttttatgcagcgaagcaagctgagccaaaaggggttgagggtcgatttcagtgacgccggggctgcggaagctaaaacgcgtgcggtctggcgtgctgaggtggagggcgcgaagaaggccaaacacttcgctgagaagatttataccgggatgagcatctcgcgcgggcaagagcttgctgtcgagcactgttaatcctttgttctagtgccggggcgcggatttaattggcgcccggcacttattcattgcaggagggaaatatcttgagtacagatcaaaaggaattgccgtccaccatgtgggttgtgacaagagcctatgttcgcgctggcaagccgccggtcaaaatagcgccttatgcctgggcttgccataacggaaagataacgggtgtaaagtcggcaagcggccatggctgcaaagaaatgctttacctgccgagcgattgctacgaaacccttggtggggctatagacgcaatgaatgcaatcatcaagaatgaaattgagtatgaacagctcaggctcaacaagattcgagggaggctgctctcggcccgaaagttgtctgccatgctggtcgcttaacgcattggagaaataatatggaatcatccacgcgagtcgaaataaccggcggcgctttgtctgatgcagaagacgacctcgcgaagcttaaagacaagctccatcgcgatgaggttgcgattgaggcggcccaggggcgtgttgataagttcaaggcgaggctgatgctgctagatcctttcggtgttgggtctgtgtacgtcggggatgcaaagatcgctgcgattgctagccggcttgtttgatggtcgtcatccggttgaatcgttactgggattgttaaggcgggttttggcgtagccggatatccgtgatgatattgacgcttacatcaaggcgagggcccgtaaagatgggtggactgactcgcaggtaaaggcgatgaagcaatctgcaaggtcaattcagggaatgatctcttttaaaggccggaaagtagatgctgtagtcgccgcaaaatacttggataaagccttgtcatgtatggatagccagtttggtaaaaatagcactccagagtattaccggataaagccgctaatgctgaacactaaagagcggattcttgcctacgaccgatttaatgcggctatggatggtagtgtgatgacgcttccagagggtgataattgtgttccctaatttctttaaaaaaacgatgttgtggatttttgttctaatgcttttaagctctatcccggcgattctttttggcggacataagtcgcgaatttctgacgctcagccaattactgaagagagaaacaagccatattttagccattggtcgaagccgggcggcaagaggtccgatgggtctaagtctcaaattacaccggagaataaagtaaaaacaacggagctgcttggtgctagtgcacgttgtcatagcgatgtaaataacgtctcatcgtgttggaatgtgacttttgtgcgtaaaggatggcgaccttaggtttgttgcttggtattgtttttagaaagccgccacccagcggctttttcttcgccagaaatatcaaaacccacgagattctgcgcacgaaaactacttttaataccatttgatatattgaaaatgcaaatcgaatatttgcatctctcagtcacactaatggagttttaccatgggcattacaaagctacaaatcaaccttcagagtcttttggctgacgcggacgtgtctgcagcaatcaacgagtttgtaaaggaggtcatcgatcaagttcacgaatgggatcgcgagatcgaagaggagcgtaaaacctgcccaattcacctgtcgcttgagagattgaaaaaacgattcgaggagagtcttatggacccctctgtagcgctatacgaaccgcatttttttggtcgtattgcggttgctttcgctgaggagacggcaggaatgagccgggctgaaatagacgacgcaatcacaaagtctgacggtctgcgtctgcttgatcaagcgcgaagcattgaggctgcacttttttaccaggagaaattgaaggagattcaggatatcgaaatggattgggcaagcccggaagaatccactttcggacagtacctgtctgccgcagaacactgcagcaacttcttttcaaatcaaatggctttcgaggcgatgtgggagttgagccaggagtttcgcgatgtcggcgccctggcgggcttttgggaaaaagagtcggtactgaagtttggcgcgaaaagattccctgatttggtttagcgcgcctcttgaaaaaataatcccgggcaaaggaaaagacctcgcaattatctgcgaggtcttttggtttaaatactttctggaatgacgatttttcgtcgtttcttaacgatcacgatggtttttgacttttgatcatcgcggataatactctggatggctttgtcgctgagatcagctgagcaatcttgatgggcgtctttttcgtaacagccattacttccaatggagtgccaggctgtaaccaaacacacggaaggaatactgaagcagcctggattttgttttctcagtagagcaatttcctcccgctgtatttctggcgaaaagatgttttgggttttaatgtcagcaagaagtcgtccattttttcccgtaatccatgttcgcaataaaacaattttgatcagcaattccaacgaatttactcgctgatggtctggcttgtcgctgatcaaagttaaataattgtcgttcatggacttcttggttttacccttcagataacattcaattgtaaacaaaaaacattcagcctcttcatactccaggcaaaagttgtatttgtcagacatgtgcttgcagattataaaaagcacgcgtttttctgcagcaatttgtttcttcgtttttttcacttaacgcctcacggttattgtcattgtgaataggtgtgccaaccacggaataagaattttcattgtttagcctacggcgtctaatccacattggctaacttgaataaaatcaatacagtctgtatgattaacggatacaaataaccggcgtgccgctatgtcaaacacgatcttttcaagcaagttgccacccctctttactcaccagcacgaagcgacctcttcagcccttactgagcttgaaagccacgcaagaacaaaagtccttatggcatgcggaacaggcaagacgcgcgtcggtcctgagttggcaatcaagcgaaacgcaaagacgatcattgtctacttgccgtcattggccctgattcgccaaacgcttcccgtgtggcgtgaagcgatggatatggagtttctgtgcgtttgttcagaccggtcggttgcgaataaatcagatgaaatcgactttacccgggacgatctggtcgccgagcttggtatcgcaagagcatcggtctcaagtgacccatctgacgttcattcctttttgagcgctaaaacaacaaagcccaaggttgttttctctacttaccagtccgcggatgctgtcggtgatggtcagcctgaagttcatgagtttgaccttgggatttacgatgaggctcaccgcacggccggcaaggctggtttattttcatcctcgcttgtggatacacacaccaggatagctaagcgagtgtttatgacggccaccccaaaacatgtcacttatcggaagaagaataaggcgggtgagggcgctgtcgtctattcaatggacgatgaggtgatttatgggcgcaccgcgtatcacctgtcgatccgcaaggctatcaatctcaatatcattgcagactataaagtgctggtgtctatcgttgatgacaaaatgatcgcgtccgagctctcggctcaaaacgcacaggccggacgagctggtcttgaatcaattgcgcatgcgatcgctatccggaacgcgatgaatcaatatggtgtaaaaaaatgtgtgacgttccatgactctgtggccgatgcaaaacaattcgcaggaagctcggttattcatggtgagcttgatgcggccacctttcacgtaaacggatcaatgaaggcgcgcgatcgaaatgacgtgatggatcggttcgcggcagctgtgtctggcgtgatcaccaatgctaaatgcttaaccgaaggcgtggacgtgccggaaatcgacttaattgcttttttgcaccctaagcgcggacagattgacatcatccaggcaataggtcgggcactgcgtatgccaagcggatcatcaaaaacgacggcgtatatcctgttgccgctctatgtgagcgaaattgaaaatggcggcatggaacgtgccttggatgagcacggttacgacacaatttttcaggtattacaggcattgcgtgagcaagatgaggcggtcaaccagtatcttcgcaaaacagtgatcgcaaaaacgcatggaaatatgccgacacttggatttgttgaaatctttgggccagaaaatcatctggaagtgatgcgccaggcaatttctacaaaatgtgttgaagcgctgtgtggcgcatgggatgaaaagttcgctgtcctatataactatttttgtcaaaatgggcacacaaacgtccccgacggtttttattttgagggcgtaaatcttggcgattggtgcgcttatcagcgctatcaaaataagaaaggcttgctttttgacgatagagtagccgcgcttgaatcattgaatttcaagtttatgatcactgatcatgacgccgtgtttaaaaccggtttcaaagcttatgttgattacattgggagccacaaaagaaagcatgtcccgattaattacgaaacggaaagcggttttgctcttggcgtctggtgtaaaaatcatcgttactcaatttcgttaaatagactcgttaaagaaaagcttgatctgcttaacgaggtcggcttccctcattcgctgatggactcatgggagtgcaagtgccagtcttatattgacctgtcaattaaagggggtttgaaccctggtgatgtgcgatggattaattcgcaggtcaagcggtttaaaaatagcaaattaagcgagagtcaggttgtgatgttgtcgcggattaaaggtgtcgatattgaagccggcgtctatgtgtctactggtctgcaaaaaaggtacgacataaccggcgcgcccatcctccagcctggacttttgtccaaagataaggattgcgcttacgttttgacaggaaagagcgatgaggaatgggatatcgagtttgtaaaacattacctttttatgggtgagcgatgctcaatgactgaagccgctcaatgggttgagcaacaaagaaactttattaaaaaggggatgcttactacttcacaaatatccagattaagggattctggactggttgattgttctcgctctggatatccacataaacgtgagcggttgctgagtgcggcttgcggaaaaaccgtcaagcaatggcggttcgaatcctggttgattgatgacatgcgaaatccacatcgttaatttttggggtatccgtaatacgcggttgatttggcttttttcgacgctaatgtttatttgttgcaaaagcgtatttaatagcgcggccgacaagtgcctgccgcgcatcagattaatgcttttcggataattcccctgccaatttaacgcacacttttccccacgcatccattgcgtatgggttgtgcgatgagcgaagatcggccaggcattttatgtgcgatttttccgcttcaatttccgccgcagcgaccagcgggcttgctagaatcgactcgagtgttttaataactgaaggattggaattcttaatcatgagccagctaataaacatggattcgacgtcagggatctcgccgcggtgccacttatcctggtgtaggttcgctgttgcgtcttcgtaaattattggtctgaacccaggaaattggaatagggcttgcagaaacagatcgacgccttcttttcccttgttcatagcaagattgcaaatcgccatgataaataaagcctgaggatcgtggcttgagtctttacttattttcttcaaagctatttccgccgagatgaattgcttgtcagccgcaagcattattggtagctcgaatcgaacccccaggttgtcgctcggattaagtcgaagctgttttctggctaatttgattgcctttggtatttcttcatcaagcaaaaacctcatgtagttaaaaagtagccgatggtaggatctattttcaagccaaccccagataattttccccttaaagtctttcggaataaccgactccgcgctggctattccctctttgtagtatatctcggcaagtgcgtaattcccgctttcaacctccatggttgccagcgcaagccagccttcagtaaagtcgcgccgctttttaattattgccgcagcgaaggtgtgtgcatcacttttttccttctttgtttttgaatcgtagttctgccaacctccatcgaggtctctgatgagctttcggcaggctggggattccttaaatgccccatcaccctccggataaacgttaaatgtatatagggggccggcgctattttctggccttcgtctcttgagatcatcaaggtcgtcggcgttttgcatataggcaagcatatccattatttcccggtatggcatgttggctgattttgatagactgattcctaaacgctccaaaccgaaaagttgctctgccgtaggggctagcccctcaggaatgcgaatcaatagaggagccgcattggaaaacgggctaaggtctatggcttcgcgtgagaggcccggcttgatgtactcgtttttgagatttgtgatcgtggttgtaaatgcgtgccagcttggaaatccggctgcctcagtaacgatatcaatagcttttgaatgctttatttctggatttatttttttcaggaagcgagcgtgtatttttaatgcgcccgtgatgtcttcaagaaaaatatcgggacgtataaggtagataactgaatctacgccaaatgactcagcaaccgtactaaaattattttcaaccatgctatatctccattaagcgcatttgtgaattactccgccctaaaggacgaagcttctaacttcaagggcccctgcaagacagaggactttcgtcctctctcc

SEQ ID NO: 49 - DNA, 19268 bp, Artificial Sequence
  Synthetic Oligonucleotide
tataaagattctgcaagtcagtatcggtgattatgttgccatcaataaatcgtgccatggtaatttttccttgtttggtttgttgaataaatcttgcaaggaggtatggtgtgcgtggaataagaatccaatatggaaacgcacagcttaacagcgcagggcaaagagaaaagtctgtgaggcgaaggcgttgaggcggatcgcgaatcgcaatcctgtgaaaattcagcctggcggcttcacgggtgattcgttctgcgtgtgccgaaacagatgtttgcggctgccgggatggtcatccgattaatcacgatagcacttgcagttgcaaccagaataatcgcgatgacacaaaaacatctctatctaagtatgatttagatgcggttgattactgctgcccccaaaccttaaacgcgtgagcaggctttttcagatcgtatttagccttattttcatcgctaagtttgtcatagcgagactgagacattttgccattcaggtcgtgagatccggtcgatgacttgagtttgcgctcgtaagccgctgtcaccctgaccaacgcctcataaacaatctcgcgagacattttgaggttgtttgcgttccctttgattgactcgattgcattcaacagatccaggcgatccgcctcgacaagactgtctttcaggcgttgaatttcagcctcgattgcatggcgagatgtcggtgtattttctggcaagttcatggtcgttccttttatgattaatggaagaggcgcatattaatctcgttttcagcgagtagcaatcaaatgagcgttgattggtgtaggaataagcgttattctgtcgttaattgagcgtttgttgagttgctgtaatttgactccatatttacgactgcgtatactcaaagcatgaaataagctcacttcacagcctctgtttggcaatcaccctcgagacgcagacacctgtcgcgtgatttctatcgaggtgaaaaatgaatgacaacacgatcctgaatcaatcaacccgcaaagtaaaagatcataaaattttcacctgcagtcggtgcaaaaaaacattacacccagaagaacacataatggactggcaagagcggcttgttatctcattcaggggcggttatgggagtgtgtttggtgatggaaattatatcgagggcgtattctgccaggaatgcgttgatgaaacgctaggcccctggttgcgagtcacgaaagatgatccttttgaccctagatacaagtcagatcatctcgcagaaaagtcacttcaagattatcaaattaaccgaaataaagagtcgaaaacttgaatttcaccatctcagcctgtataatcaacacatgagatgaacaatctcttcctcctgagataaacccgccgatgcgggtttgaatggacatatcaaatctgaggagattcaaaatgaaagtcgcaaaaataaagcaaaaaaaacaccttgaacaggatgttaaaatactaaatatctacaaaagactcaatgcaagatacgagcgaaagcatggcggtgaagttgtcgtgagatcggaatctttgttggagttttttaaacaaaacggcccgaggccggaataacaaaaaacaaccaggtccgttaggatctggttgttgtactaattggcattcatcattgccttgcgcagtgcattaaatgcggctggagatatgtctgtatctatccttccaacaacctccagttcgctaatttccatcattgccgtcctattgcattgaaaccttgttccgaccatgccgtgcttcagcttcaatccagtcttatcccaaaacttagatccaaaatttgtcggggttacgacaaaatcaatacctttgtggtctttgttagcgtttacgtcaatttttttacttgttgcgtaaacgatttgggccataacgtgtccgttaattcccttttgaatgccggtaactagcgcgtagtgaggcaatgatccgccttcgtctgttgggaactggcagtaaacaatatctaaaatatctgggctcgcgctcatattaatctccattctatgtcgtaaaaggataggtaaaacatcacgcgtggacacccggggtcatgactccccagcacgcgtgatggcgccgtttctcaactttgcaaagggatatgctgtgcgaaaaataagaatatggaagaatagtttgcgtgaataaaattcaatctgtataataaacccgtcgaacatgattccctcctgatcggtagcaattttcccttaagttaattgctttttgcccaccacgccaatggtgggcttttttttgtccaaaatttgaacttggtaaatacgctctgtataatcaaaatatacaattaaatcaggaaaatgagcgtgattactcaagtcgaaacatttgccgagggccttgttcggattattcgtcagcagcgtctggatctttcaacagaaaagcgattgcaatcagggcttgctgacgtgttcttgaatagcaatatcgccttcagtcgggagcacgcattgtcacccggggatatcccggatttcttcatggatcacggtgtgctgattgagtgcaaggtgcacggggccaagaaaatggacgtgtacaagcagctgtgccggtacgctgagcacgacgaggtgtctgcaataatccttgcatcgaacattagtatgggcatgccggcattgatcaacggtaaaccggtgttctgtgcgtcgctaagtcggggatggttgtaatgagaacctacggcaccttaaaactgaccgagaacggcgaatcatgggaggcctccagtctcgaaccgcatgtatctattcggctgaaacaccttttcccaaaagttcctaagcaatcgaccgggccattcattttcccccgcgacctgatcaccgcggcggacttgagttggtttgagtcgcgttacaaactgaaaatgtccaaaaaggatcggtcggcgctcaaagatggcgaacgttctttcggcttacaacaagctgagatggagcggatactgttacctaattatgtgccgccggggattgttggtctgcgtgacgggcaggcgatccggcattaccagtctcaggcgatcgagcttctgcgccgccgaaaatcccttttgttgggagacgaaggcggattgggtaagacttatacggcgggcgcgttcatgtgtgcagagccaggatcattgccggccgccgtggtttgcgaccctcatatgcagaagcaatggctggagaagttgacggcttttacgactttgcgtattcatgtgatcaagaagaccaagccgtacgatctgccgccggccgacgtgtacatcttccggatctcccaaatttttgggtggacggacatattcgcgaccaacttttttaaggctgcgatttacgatgagccacaatcgttgaggaccgggaccgagaccgcgaagggtgccgccgcgaaggtgttatcaaaccatgtcatataccgacttggccttaccgccactccgatttacgggtacggcgtggaaatgcacaatgttttacagtacatagacgagacgattttaggctcctacgccgactttggccgcgaatgggtaaaccacgcgggccgcatcaccgaccccaaggctcttgggtctttcttgcgtgagcagcacgtcatgctacgtcgattaaaggcggatgtggggcaggagcttcctaaagtctcaaaaatcgttgaatacgtcgattacgacgtaaagacggtgcaatcaatcgaggatctcgcgcgtcgactggccatccgagctactgaaggctcgttcgttgagcgaggtgcggcatcgagagaattggacatgatggtgcggcaggcgacgggcgtgtcaaaagcgcgcgcggttgcccagttcgttcgtctgctggtcgaggctggcgagtcggtcctgctgcttggctggcatcgcgctgtctatgacatctggcaagaggagctaaaagacctgatgcccgccatgtacacgggatccgaatcagcgactcaaaaatccagtgagatcgatcgatttaaagcaggagaaacaaaagtcctgatcatgtcacttcgttctggcgctggtgtggacgggctgcagcattgttgttccactgttgtgtttggtgagctggattggtcgcccggcatccatcagcaagttatctggcgcgttgatcgtgaggggcagatgtacccggtgaccgtattcttcctggttgttgatgagggaagcgacccgccaatcatggacgtgttgggtatcaagtctagcgaggcgtgccagatcgtggatccgagcgttggcgtgcagacgagcgttgaagacacgacgaatttgaggaagttggtggatcgttatttggataaaaagaggggtgcgtaagtgagcggaagtgtattgacattaacgccgccgaatggaggtaactgcgttccataacttttttactgcatcgcaaaaaagagcggccagcgttgttcatgtggccacggctgcctcagtaacgcacgggccttacattaccgcagacaacgataatgtgatcaatctacttcgtgtcgtgccgggtaacaaaataccatgggagaatgtatctattcctggtgcaattgatcgtccggctggcgctgatggaagccgcgattttatgggtcatggattccttgctgtgtatatgggcaaagacatgaagccgtctggtgaaattgacaaggcagttcgtgaggctatcggtagcgacggtgaggtgcgataattctcgttgcttttaacgttatcgccttgaatttgctgtatcagcaacgtatacttctcgtatcaaaatcatgaggtgccgataggaatacctgggcgacaccccggtgatatcgtgagtaactacgcgcaaaagaaactgaagttttttgcaaccaacgaactcttctcgtatcaagcgggatggaaataatggagatattatgggtagtgattattcaatgaaagaagtccagctttttggaaaaacccaaacgttttgctctctgagcggcgttgtcgttaaacgtgaacagcgtagcgacacaatcgtcagcgggtcaggaaaaagcggctcttacggcggctacggcggtggtagtgtgtcgatcggttcaagcatcaggataacgacaaatctttggatcaagtgcgcgtcaggggttgaacatcacatccagctggatggcgactatccagcgatcgagggtaatgtggtgcatatgatcgacatggttgagagccgcccgagttctgaggactacgtcttcgacgaggcaacgaggacctcaaagccggcttcctatacttatcataaaattgataaaagcccggttatcttttacaacggcacccagaagaatatgtttttcatcggcggcctaaagttgcacgaaggtatcgttggtaaaaacaagataaatccaatgtggtttctcgccaatctcttgctctcaggctcgattggctacatgttctatttcttcaatattgatccacaatatccagctagatcatcggttccgattggtctaattacaggttttggcacgtcctttcttatgatgattattacggccgtgtgcaaccccaaagaaatctccagggacgcggccaataaaatgttttcagaagcctgctgggatcatgctaatcatcttgatctgatgtccccggcggtttttctgaaggcagatgagccggttttgattggcggttaggtgatgcacagcgcagtgtagggagggcattttgggcgcgtagaaataccaattaaaacacaattccatagagattccattcatcaaattaccaagccgccacccagcggctttttcttcgcaaaaaactcaataacctaaaaaatcctgctcgcgagattgccagtctttcttatttaacaaaattatcgcactacacgtagtaagtgctagtttgtattgataaataacaaataaagatgtacaaaaacttgtaatataaattccagttgtatataataaattcacaagtaggaggtgctgaaaagcgtttcaatcgatattaaatgtatcaaaagaaaaggagtcattttgacaaatagaaattacaagatggacaggattcgagtaacggcaaacatgctgtctccgatcgttactggcgggggttatatgacgcttgatggtttgctcggagctttgttgtttgatgagttgcaggatgtggaagcggctcatggcgcaatcccaatcaagtgtaaagacggtctgttttcggcaagcgcggcgatcatggaagcatcgcgggatcgaattacgtttattgcctcattgcgtcccggtcatagtattgatccggatttgattctgaagaacaaaaaaggtctattgcatcgaaaattcgacacctcattgaccaacgtaatgaacacatacacggagttgtcggcgaactctgtgacgtggttcgcggaaggggatgccgatcaaataatcaagctggttgagtctgttcaattcatcggaaagcgacgagcgtctggatttgggcgggtggccgggtggagtattgataccgataatcttgatggtattgaggggtattttggcggaccactgcgcccagtacctgctgaaatgttcgccggagataggtctcacccggtaattgatgcggcctggcgtccggcctattggaatccgaatcatcgcgctgcttgttttgcaccagaataaggagggacaaatgttgaacttttttaatgaaaattttggacggcacctggttgagcagggcgccgacccggtggcgaatgccagaagcgctttatcgtccggacaccggatgaaaaaagagggtggaatacctcaacgtattgcgtctggatgggctgtaatcagagccgggcgttcaaccttgcagtttgaactcgccgccacgggtcttgaatacagcaaaaagacgagatacgaggcgttccttgctgagttgagcgatggggattttgaagatccgaagatgtttattgaattttcaaaaaaaccggtgcctgttggcaacttgttcaggacgttcgacttgcgccatattcgtgtgtgctcttctggcggcgtcgagacttttgacttcacagttccgccagagaaggacggcagcaagactcataaaattttatggaaactaaaggagggtcagtgatggaatatgcatttcagaagccattgagcctgagcgggtacccgcttcatcgaattgccgctgatatggctgatggtgagaaggttattttcgcagatcgtggcgatcatatgttgttaagaacgagcaagcgtcttgagcttcaggaggttgctgctaaatcgattcgggttggaggtatttttggatttgagctccgcgcttgcgtcgggaaaaaggtgaaagggtgccaccgctacttcaaagtagaggactggcgttcgcgtcacgagtggcttgagcggcaaggggttttaggtggattttcgcttatggcaattcactgtgtagctggtatgacatcaattatcgataacgagcgtaattttaaagttgatcaaacagattttacgggcgtattgaaaattgaagacgagtcgcttttttttaaggcgatggagaatggtgttggaaataaagccagagcgttcggttttggcatgcttattatttaattttaaagagaaaaaacatgaaaactatcgtaattaatgcaacgttaacaactgttggtcctttgtctatcgcaatgcctgtcgcggaaggccaaatgggaaataagttcaacaacttcccaattatgacgcgagggattgatgatgagggaaataagcagcagaccggctatctcccgtctacaacgttgcgtggtttctttcgtcgttcaatcgttaccgatcaaatgcgtgtggcagcggaaagcggtaatcattacacgctgcaaaaagcatattccgatttgattggacaggatgcatcttccgaatcaaaagatgatatcgatttgatcaagttgcgccagctgcgcgatgagaactctgtgattgatctgtttggttgcggcctcggggttaaatctcgcctgcttgtttctcacttcatgccggatcacaacgtattgcctgaaacaatgacggggtgccgtaaagaccttgaggatacagaaggcgtcctggagttgatctccgatagtgaccgcgaagtctacctcggtcgatccggtgcaaacggtaagcgctcggcggccgcctcggtgattaaatcgctcgaagggaagatccgtaaagcgaaaaaagcaaacgagaaagaggatgttctcgctaatcttgaaactgcgcttaaggcggcccaggatgttgttgatcgcttcaaggacgacatgggatcaatgacgaattcatctcgaacgttgttgagttacacggctttccctgctggaatcgagttgaaagggcgcttgattgttgagcgattccgcgaacgcgatttgccgatgatcgaattggcgttaaacgaactgtcgaatcgcccgattctaggagctcaaagcgcacgcgggtgtggtgaggttgagggcgtatttgaagtctcgatcgatggtgttattgttaaaaaaatcagtatcggtggatggaaaaacgccattgttactgatttatctaaggcgatttgattgattttgttttgtaatcaataggttcttgattggctggtggagccaccctgcaaatgggtggttactagaacagccgctgcgattgtttccatgccgatttgggtggagccaccctgcaaatgggtggttactagaactaccggcctgttgctgacacaggcgacgggggtggagccaccctgcaaatgggtggttactagaaccaggagggagtttgtgccagagaaattgacggtggagccaccctgcaaatgggtggttactagaacaatggggaccaagacacacttcgctggtcaggtggagccaccctgcaaatgggtggttactagaacgttttgatacggtagtgcgctcagcgatagggtggagccaccctgcaaatgggtggttactagaactgcacacgacgagcgccgacggtttatctcggtggagccaccctgcaaatgggtggttactagaacaaagagtaatcagaccgcgctgccgcgcccggtggagccaccctgcaaatgggtggttactagaacggcgcgccactcaacaaaaaactgcgagttggtggagccaccctgcaaatgggtggttactagaactacagcggcgcactgccaaacgttcggagaggtggagccaccctgcaaatgggtggttactagaaccttgtaacgcttcaaaaaacctgctgatggtggagccaccctgcaaatgggtggttactagaactcggtaacaaaaggatggtcagacacgcttggtggagccaccctgcaaatgggtggttactagaacccgcacagcgacattatcgatttaagccggggtggagccaccctgcaaatgggtggttactagaactatgcgacggtgcctgcaaagctcaacgacggtggagccaccctgcaaatgggtggttactagaactcgggtatgtctttgctcaaatctctcgcaggtggagccaccctgcaaatgggtggttactagaactggataaaaactcggtcgcacgtcttgcccggtggagccaccctgcaaatgggtggttactagaacaccggaacgatcttgccgcccgcctcatttggtggagccaccctgcaaatgggtggttactagaaccttgctgaacttcagtacgcagatgggacgggtggagccaccctgcaaatgggtgcttgctaaaaaaacggctcgggtaaaaagtgcatgacgaaagattgagccaccacaggtggttattaaacaaacccaacaggaccttaaaaatgtttcgctcaaaagaacagcagaatttctcaaatatcatcgcggctcacatagccgacggcgatgctcctttgctgttggaggggggaacggggattggtaaaacccgcgcgtatctacactcgctaattcaatctggactgcgtgtcgccattgtatttccaacacaccaactgattgagcaaatgttaaattcggcagacctgattgcgacgcgtgggtcagcgactgtagccgcctttaagcccgcgcggatgtttgaatcgcgatccgattacgagatcaatcgacggttagcgatcgacgcgcaggttatgttttgcacggcggcaagcgtgattattgatcaacgggccggcggtgaatacaacggatcgacaggacgtgcatatttgctgtttgatgaggctgatcagctgccggacatggcagcgctgcaaagtgattttttgatcaagaaatctgacttgatggatattggcgtgaagatcaccaacgagcgagatgccttgatggcaatattggcgctgaagatacccatcgacccagaaatcaaggcttcagcgcgaattattcttgaagcgattgaaaaccccgcttggtataaaacaaccggcataaacgatcatggtgatatcgagctgaagcataaactgcccgggcgacttttgaagaagatcagtaatcgaggtaatactgcctttgtgtcggcaacgctcacaatcggtgggcggtttaaagactttcaggtgtcgatgggtattgaaaacacgagccacttgtcaggcgttattgatcctgaaaaacatggcgacctaaaattttccattgtaaattgcaagatcgatactgatgaatgggttgatgagatcgttaaggcggcggctggcgcaccaaagccagtgcttatcgcaacaacatcatacgcccttaccgagttgctgggcgagcgtatccccggcgctattatgcgctttgaagaagaaacgacatctcaagctgccgcgagagtaggtccggaaggtttgcttatttctgccggcgcctgggccgggctggatacgccgatacgatggaggtctgtcatcatccctcgcgtgccgtacaaacgtcttgatgtaatcaacgaagaggtcacgacaagttattttgattcgcgtaatacagcaataaggcgtcttcgccaggtttttgggcgcggactgagatcgccggatgcagtttgcgacgtctatatattggacgagaggatcaatgcattaaatggatttgttccatcacggttcgatcggcgatggagtgaccgatcaataactggcgatgcaaagacgttcttggaaggagggcgcagagagattgttctgtcaaaatcagagcggtgcccatcaatacgcaaaagcgcactaaagcactatggaaagaagtgcatgggaggatgtggtctggtcttaaaaagcgactcgcagcttgacgtccatcacacaaatccgatttctgatggtgttcgccagacaaggatggaagacctttctgttttgtgtgccaactgtcatcgattggctcactcagaagatccgccgttgtcgattgatacgctggtcgctattaatgcgtaattgcattggatgaataataggcgatatattgcctattgcagacttagccgtcaacagaaccaacctacacacaccccacacaacaacccgcttccacacaccatcaataaattcaacgcaatagaccacctaaaacttgaattttataaattcaatccgtataataaaaactccaaaaacacacaggagttgatcatgaaatattggtttgaaaacaagttcgaaaacaaaaaagccgctttgaccttcatcgccgaccgcgtcaataaggcgcttgcagatacgattctcgacttttgcgaaaagacgcatgagtctgcaatttcttgcaagaaagcagaagaagttgccggtgtctatctggctccgtttaacaaggataaaacgcattggatggctggcgttgagctcaaagcgcttgacgcctcttttatgcagcgaagcaagctgagccaaaaggggttgagggtcgatttcagtgacgccggggctgcggaagctaaaacgcgtgcggtctggcgtgctgaggtggagggcgcgaagaaggccaaacacttcgctgagaagatttataccgggatgagcatctcgcgcgggcaagagcttgctgtcgagcactgttaatcctttgttctagtgccggggcgcggatttaattggcgcccggcacttattcattgcaggagggaaatatcttgagtacagatcaaaaggaattgccgtccaccatgtgggttgtgacaagagcctatgttcgcgctggcaagccgccggtcaaaatagcgccttatgcctgggcttgccataacggaaagataacgggtgtaaagtcggcaagcggccatggctgcaaagaaatgctttacctgccgagcgattgctacgaaacccttggtggggctatagacgcaatgaatgcaatcatcaagaatgaaattgagtatgaacagctcaggctcaacaagattcgagggaggctgctctcggcccgaaagttgtctgccatgctggtcgcttaacgcattggagaaataatatggaatcatccacgcgagtcgaaataaccggcggcgctttgtctgatgcagaagacgacctcgcgaagcttaaagacaagctccatcgcgatgaggttgcgattgaggcggcccaggggcgtgttgataagttcaaggcgaggctgatgctgctagatcctttcggtgttgggtctgtgtacgtcggggatgcaaagatcgctgcgattgctagccggcttgtttgatggtcgtcatccggttgaatcgttactgggattgttaaggcgggttttggcgtagccggatatccgtgatgatattgacgcttacatcaaggcgagggcccgtaaagatgggtggactgactcgcaggtaaaggcgatgaagcaatctgcaaggtcaattcagggaatgatctcttttaaaggccggaaagtagatgctgtagtcgccgcaaaatacttggataaagccttgtcatgtatggatagccagtttggtaaaaatagcactccagagtattaccggataaagccgctaatgctgaacactaaagagcggattcttgcctacgaccgatttaatgcggctatggatggtagtgtgatgacgcttccagagggtgataattgtgttccctaatttctttaaaaaaacgatgttgtggatttttgttctaatgcttttaagctctatcccggcgattctttttggcggacataagtcgcgaatttctgacgctcagccaattactgaagagagaaacaagccatattttagccattggtcgaagccgggcggcaagaggtccgatgggtctaagtctcaaattacaccggagaataaagtaaaaacaacggagctgcttggtgctagtgcacgttgtcatagcgatgtaaataacgtctcatcgtgttggaatgtgacttttgtgcgtaaaggatggcgaccttaggtttgttgcttggtattgtttttagaaagccgccacccagcggctttttcttcgccagaaatatcaaaacccacgagattctgcgcacgaaaactacttttaataccatttgatatattgaaaatgcaaatcgaatatttgcatctctcagtcacactaatggagttttaccatgggcattacaaagctacaaatcaaccttcagagtcttttggctgacgcggacgtgtctgcagcaatcaacgagtttgtaaaggaggtcatcgatcaagttcacgaatgggatcgcgagatcgaagaggagcgtaaaacctgcccaattcacctgtcgcttgagagattgaaaaaacgattcgaggagagtcttatggacccctctgtagcgctatacgaaccgcatttttttggtcgtattgcggttgctttcgctgaggagacggcaggaatgagccgggctgaaatagacgacgcaatcacaaagtctgacggtctgcgtctgcttgatcaagcgcgaagcattgaggctgcacttttttaccaggagaaattgaaggagattcaggatatcgaaatggattgggcaagcccggaagaatccactttcggacagtacctgtctgccgcagaacactgcagcaacttcttttcaaatcaaatggctttcgaggcgatgtgggagttgagccaggagtttcgcgatgtcggcgccctggcgggcttttgggaaaaagagtcggtactgaagtttggcgcgaaaagattccctgatttggtttagcgcgcctcttgaaaaaataatcccgggcaaaggaaaagacctcgcaattatctgcgaggtcttttggtttaaatactttctggaatgacgatttttcgtcgtttcttaacgatcacgatggtttttgacttttgatcatcgcggataatactctggatggctttgtcgctgagatcagctgagcaatcttgatgggcgtctttttcgtaacagccattacttccaatggagtgccaggctgtaaccaaacacacggaaggaatactgaagcagcctggattttgttttctcagtagagcaatttcctcccgctgtatttctggcgaaaagatgttttgggttttaatgtcagcaagaagtcgtccattttttcccgtaatccatgttcgcaataaaacaattttgatcagcaattccaacgaatttactcgctgatggtctggcttgtcgctgatcaaagttaaataattgtcgttcatggacttcttggttttacccttcagataacattcaattgtaaacaaaaaacattcagcctcttcatactccaggcaaaagttgtatttgtcagacatgtgcttgcagattataaaaagcacgcgtttttctgcagcaatttgtttcttcgtttttttcacttaacgcctcacggttattgtcattgtgaataggtgtgccaaccacggaataagaattttcattgtttagcctacggcgtctaatccacattggctaacttgaataaaatcaatacagtctgtatgattaacggatacaaataaccggcgtgccgctatgtcaaacacgatcttttcaagcaagttgccacccctctttactcaccagcacgaagcgacctcttcagcccttactgagcttgaaagccacgcaagaacaaaagtccttatggcatgcggaacaggcaagacgcgcgtcggtcctgagttggcaatcaagcgaaacgcaaagacgatcattgtctacttgccgtcattggccctgattcgccaaacgcttcccgtgtggcgtgaagcgatggatatggagtttctgtgcgtttgttcagaccggtcggttgcgaataaatcagatgaaatcgactttacccgggacgatctggtcgccgagcttggtatcgcaagagcatcggtctcaagtgacccatctgacgttcattcctttttgagcgctaaaacaacaaagcccaaggttgttttctctacttaccagtccgcggatgctgtcggtgatggtcagcctgaagttcatgagtttgaccttgggatttacgatgaggctcaccgcacggccggcaaggctggtttattttcatcctcgcttgtggatacacacaccaggatagctaagcgagtgtttatgacggccaccccaaaacatgtcacttatcggaagaagaataaggcgggtgagggcgctgtcgtctattcaatggacgatgaggtgatttatgggcgcaccgcgtatcacctgtcgatccgcaaggctatcaatctcaatatcattgcagactataaagtgctggtgtctatcgttgatgacaaaatgatcgcgtccgagctctcggctcaaaacgcacaggccggacgagctggtcttgaatcaattgcgcatgcgatcgctatccggaacgcgatgaatcaatatggtgtaaaaaaatgtgtgacgttccatgactctgtggccgatgcaaaacaattcgcaggaagctcggttattcatggtgagcttgatgcggccacctttcacgtaaacggatcaatgaaggcgcgcgatcgaaatgacgtgatggatcggttcgcggcagctgtgtctggcgtgatcaccaatgctaaatgcttaaccgaaggcgtggacgtgccggaaatcgacttaattgcttttttgcaccctaagcgcggacagattgacatcatccaggcaataggtcgggcactgcgtatgccaagcggatcatcaaaaacgacggcgtatatcctgttgccgctctatgtgagcgaaattgaaaatggcggcatggaacgtgccttggatgagcacggttacgacacaatttttcaggtattacaggcattgcgtgagcaagatgaggcggtcaaccagtatcttcgcaaaacagtgatcgcaaaaacgcatggaaatatgccgacacttggatttgttgaaatctttgggccagaaaatcatctggaagtgatgcgccaggcaatttctacaaaatgtgttgaagcgctgtgtggcgcatgggatgaaaagttcgctgtcctatataactatttttgtcaaaatgggcacacaaacgtccccgacggtttttattttgagggcgtaaatcttggcgattggtgcgcttatcagcgctatcaaaataagaaaggcttgctttttgacgatagagtagccgcgcttgaatcattgaatttcaagtttatgatcactgatcatgacgccgtgtttaaaaccggtttcaaagcttatgttgattacattgggagccacaaaagaaagcatgtcccgattaattacgaaacggaaagcggttttgctcttggcgtctggtgtaaaaatcatcgttactcaatttcgttaaatagactcgttaaagaaaagcttgatctgcttaacgaggtcggcttccctcattcgctgatggactcatgggagtgcaagtgccagtcttatattgacctgtcaattaaagggggtttgaaccctggtgatgtgcgatggattaattcgcaggtcaagcggtttaaaaatagcaaattaagcgagagtcaggttgtgatgttgtcgcggattaaaggtgtcgatattgaagccggcgtctatgtgtctactggtctgcaaaaaaggtacgacataaccggcgcgcccatcctccagcctggacttttgtccaaagataaggattgcgcttacgttttgacaggaaagagcgatgaggaatgggatatcgagtttgtaaaacattacctttttatgggtgagcgatgctcaatgactgaagccgctcaatgggttgagcaacaaagaaactttattaaaaaggggatgcttactacttcacaaatatccagattaagggattctggactggttgattgttctcgctctggatatccacataaacgtgagcggttgctgagtgcggcttgcggaaaaaccgtcaagcaatggcggttcgaatcctggttgattgatgacatgcgaaatccacatcgttaatttttggggtatccgtaatacgcggttgatttggcttttttcgacgctaatgtttatttgttgcaaaagcgtatttaatagcgcggccgacaagtgcctgccgcgcatcagattaatgcttttcggataattcccctgccaatttaacgcacacttttccccacgcatccattgcgtatgggttgtgcgatgagcgaagatcggccaggcattttatgtgcgatttttccgcttcaatttccgccgcagcgaccagcgggcttgctagaatcgactcgagtgttttaataactgaaggattggaattcttaatcatgagccagctaataaacatggattcgacgtcagggatctcgccgcggtgccacttatcctggtgtaggttcgctgttgcgtcttcgtaaattattggtctgaacccaggaaattggaatagggcttgcagaaacagatcgacgccttcttttcccttgttcatagcaagattgcaaatcgccatgataaataaagcctgaggatcgtggcttgagtctttacttattttcttcaaagctatttccgccgagatgaattgcttgtcagccgcaagcattattggtagctcgaatcgaacccccaggttgtcgctcggattaagtcgaagctgttttctggctaatttgattgcctttggtatttcttcatcaagcaaaaacctcatgtagttaaaaagtagccgatggtaggatctattttcaagccaaccccagataattttccccttaaagtctttcggaataaccgactccgcgctggctattccctctttgtagtatatctcggcaagtgcgtaattcccgctttcaacctccatggttgccagcgcaagccagccttcagtaaagtcgcgccgctttttaattattgccgcagcgaaggtgtgtgcatcacttttttccttctttgtttttgaatcgtagttctgccaacctccatcgaggtctctgatgagctttcggcaggctggggattccttaaatgccccatcaccctccggataaacgttaaatgtatatagggggccggcgctattttctggccttcgtctcttgagatcatcaaggtcgtcggcgttttgcatataggcaagcatatccattatttcccggtatggcatgttggctgattttgatagactgattcctaaacgctccaaaccgaaaagttgctctgccgtaggggctagcccctcaggaatgcgaatcaatagaggagccgcattggaaaacgggctaaggtctatggcttcgcgtgagaggcccggcttgatgtactcgtttttgagatttgtgatcgtggttgtaaatgcgtgccagcttggaaatccggctgcctcagtaacgatatcaatagcttttgaatgctttatttctggatttatttttttcaggaagcgagcgtgtatttttaatgcgcccgtgatgtcttcaagaaaaatatcgggacgtataaggtagataactgaatctacgccaaatgactcagcaaccgtactaaaattattttcaaccatgctatatctccattaagcgcatttgtgaattactccgccctaaaggacgaagcttctaacttcaagggcccctgcaagacagaggactttcgtcctctctcc

SEQ ID NO: 50 - DNA, 18859 bp, Artificial Sequence
  Synthetic Oligonucleotide
  misc_feature (1)..(9999): n is a, c, g, or t
nnnnnnnnnnnnnnnnnnnnnnnnnnnnnnnnnnnnnnnnnnnnnnnnnnnnnnnnnnnnnnnnnnnnnnnnnnnnnnnnnnnnnnnnnnnnnnnnnnnnnnnnnnnnnnnnnnnnnnnnnnnnnnnnnnnnnnnnnnnnnnnnnnnnnnnnnnnnnnnnnnnnnnnnnnnnnnnnnnnnnnnnnnnnnnnnnnnnnnnnnnnnnnnnnnnnnnnnnnnnnnnnnnnnnnnnnnnnnnnnnnnnnnnnnnnnnnnnnnnnnnnnnnnnnnnnnnnnnnnnnnnnnnnnnnnnnnnnnnnnnnnnnnnnnnnnnnnnnnnnnnnnnnnnnnnnnnnnnnnnnnnnnnnnnnnnnnnnnnnnnnnnnnnnnnnnnnnnnnnnnnnnnnnnnnnnnnnnnnnnnnnnnnnnnnnnnnnnnnnnnnnnnnnnnnnnnnnnnnnnnnnnnnnnnnnnnnnnnnnnnnnnnnnnnnnnnnnnnnnnnnnnnnnnnnnnnnnnnnnnnnnnnnnnnnnnnnnnnnnnnnnnnnnnnnnnnnnnnnnnnnnnnnnnnnnnnnnnnnnnnnnnnnnnnnnnnnnnnnnnnnnnnnnnnnnnnnnnnnnnnnnnnnnnnnnnnnnnnnnnnnnnnnnnnnnnnnnnnnnnnnnnnnnnnnnnnnnnnnnnnnnnnnnnnnnnnnnnnnnnnnnnnnnnnnnnnnnnnnnnnnnnnnnnnnnnnnnnnnnnnnnnnnnnnnnnnnnnnnnnnnnnnnnnnnnnnnnnnnnnnnnnnnnnnnnnnnnnnnnnnnnnnnnnnnnnnnnnnnnnnnnnnnnnnnnnnnnnnnnnnnnnnnnnnnnnnnnnnnnnnnnnnnnnnnnnnnnnnnnnnnnnnnnnnnnnnnnnnnnnnnnnnnnnnnnnnnnnnnnnnnnnnnnnnnnnnnnnnnnnnnnnnnnnnnnnnnnnnnnnnnnnnnnnnnnnnnnnnnnnnnnnnnnnnnnnnnnnnnnnnnnnnnnnnnnnnnnnnnnnnnnnnnnnnnnnnnnnnnnnnnnnnnnnnnnnnnnnnnnnnnnnnnnnnnnnnnnnnnnnnnnnnnnnnnnnnnnnnnnnnnnnnnnnnnnnnnnnnnnnnnnnnnnnnnnnnnnnnnnnnnnnnnnnnnnnnnnnnnnnnnnnnnnnnnnnnnnnnnnnnnnnnnnnnnnnnnnnnnnnnnnnnnnnnnnnnnnnnnnnnnnnnnnnnnnnnnnnnnnnnnnnnnnnnnnnnnnnnnnnnnnnnnnnnnnnnnnnnnnnnnnnnnnnnnnnnnnnnnnnnnnnnnnnnnnnnnnnnnnnnnnnnnnnnnnnnnnnnnnnnnnnnnnnnnnnnnnnnnnnnnnnnnnnnnnnnnnnnnnnnnnnnnnnnnnnnnnnnnnnnnnnnnnnnnnnnnnnnnnnnnnnnnnnnnnnnnnnnnnnnnnnnnnnnnnnnnnnnnnnnnnnnnnnnnnnnnnnnnnnnnnnnnnnnnnnnnnnnnnnnnnnnnnnnnnnnnnnnnnnnnnnnnnnnnnnnnnnnnnnnnnnnnnnnnnnnnnnnnnnnnnnnnnnnnnnnnnnnnnnnnnnnnnnnnnnnnnnnnnnnnnnnnnnnnnnnnnnnnnnnnnnnnnnnnnnnnnnnnnnnnnnnnnnnnnnnnnnnnnnnnnnnnnnnnnnnnnnnnnnnnnnnnnnnnnnnnnnnnnnnnnnnnnnnnnnnnnnnnnnnnnnnnnnnnnnnnnnnnnnnnnnnnnnnnnnnnnnnnnnnnnnnnnnnnnnnnnnnnnnnnnnnnnnnnnnnnnnnnnnnnnnnnnnnnnnnnnnnnnnnnnnnnnnnnnnnnnnnnnnnnnnnnnnnnnnnnnnnnnnnnnnnnnnnnnnnnnnnnnnnnnnnnnnnnnnnnnnnnnnnnnnnnnnnnnnnnnnnnnnnnnnnnnnnnnnnnnnnnnnnnnnnnnnnnnnnnnnnnnnnnnnnnnnnnnnnnnnnnnnnnnnnnnnnnnnnnnnnnnnnnnnnnnnnnnnnnnnnnnnnnnnnnnnnnnnnnnnnnnnnnnnnnnnnnnnnnnnnnnnnnnnnnnnnnnnnnnnnnnnnnnnnnnnnnnnnnnnnnnnnnnnnnnnnnnnnnnnnnnnnnnnnnnnnnnnnnnnnnnnnnnnnnnnnnnnnnnnnnnnnnnnnnnnnnnnnnnnnnnnnnnnnnnnnnnnnnnnnnnnnnnnnnnnnnnnnnnnnnnnnnnnnnnnnnnnnnnnnnnnnnnnnnnnnnnnnnnnnnnnnnnnnnnnnnnnnnnnnnnnnnnnnnnnnnnnnnnnnnnnnnnnnnnnnnnnnnnnnnnnnnnnnnnnnnnnnnnnnnnnnnnnnnnnnnnnnnnnnnnnnnnnnnnnnnnnnnnnnnnnnnnnnnnnnnnnnnnnnnnnnnnnnnnnnnnnnnnnnnnnnnnnnnnnnnnnnnnnnnnnnnnnnnnnnnnnnnnnnnnnnnnnnnnnnnnnnnnnnnnnnnnnnnnnnnnnnnnnnnnnnnnnnnnnnnnnnnnnnnnnnnnnnnnnnnnnnnnnnnnnnnnnnnnnnnnnnnnnnnnnnnnnnnnnnnnnnnnnnnnnnnnnnnnnnnnnnnnnnnnnnnnnnnnnnnnnnnnnnnnnnnnnnnnnnnnnnnnnnnnnnnnnnnnnnnnnnnnnnnnnnnnnnnnnnnnnnnnnnnnnnnnnnnnnnnnnnnnnnnnnnnnnnnnnnnnnnnnnnnnnnnnnnnnnnnnnnnnnnnnnnnnnnnnnnnnnnnnnnnnnnnnnnnnnnnnnnnnnnnnnnnnnnnnnnnnnnnnnnnnnnnnnnnnnnnnnnnnnnnnnnnnnnnnnnnnnnnnnnnnnnnnnnnnnnnnnnnnnnnnnnnnnnnnnnnnnnnnnnnnnnnnnnnnnnnnnnnnnnnnnnnnnnnnnnnnnnnnnnnnnnnnnnnnnnnnnnnnnnnnnnnnnnnnnnnnnnnnnnnnnnnnnnnnnnnnnnnnnnnnnnnnnnnnnnnnnnnnnnnnnnnnnnnnnnnnnnnnnnnnnnnnnnnnnnnnnnnnnnnnnnnnnnnnnnnnnnnnnnnnnnnnnnnnnnnnnnnnnnnnnnnnnnnnnnnnnnnnnnnnnnnnnnnnnnnnnnnnnnnnnnnnnnnnnnnnnnnnnnnnnnnnnnnnnnnnnnnnnnnnnnnnnnnnnnnnnnnnnnnnnnnnnnnnnnnnnnnnnnnnnnnnnnnnnnnnnnnnnnnnnnnnnnnnnnnnnnnnnnnnnnnnnnnnnnnnnnnnnnnnnnnnnnnnnnnnnnnnnnnnnnnnnnnnnnnnnnnnnnnnnnnnnnnnnnnnnnnnnnnnnnnnnnnnnnnnnnnnnnnnnnnnnnnnnnnnnnnnnnnnnnnnnnnnnnnnnnnnnnnnnnnnnnnnnnnnnnnnnnnnnnnnnnnnnnnnnnnnnnnnnnnnnnnnnnnnnnnnnnnnnnnnnnnnnnnnnnnnnnnnnnnnnnnnnnnnnnnnnnnnnnnnnnnnnnnnnnnnnnnnnnnnnnnnnnnnnnnnnnnnnnnnnnnnnnnnnnnnnnnnnnnnnnnnnnnnnnnnnnnnnnnnnnnnnnnnnnnnnnnnnnnnnnnnnnnnnnnnnnnnnnnnnnnnnnnnnnnnnnnnnnnnnnnnnnnnnnnnnnnnnnnnnnnnnnnnnnnnnnnnnnnnnnnnnnnnnnnnnnnnnnnnnnnnnnnnnnnnnnnnnnnnnnnnnnnnnnnnnnnnnnnnnnnnnnnnnnnnnnnnnnnnnnnnnnnnnnnnnnnnnnnnnnnnnnnnnnnnnnnnnnnnnnnnnnnnnnnnnnnnnnnnnnnnnnnnnnnnnnnnnnnnnnnnnnnnnnnnnnnnnnnnnnnnnnnnnnnnnnnnnnnnnnnnnnnnnnnnnnnnnnnnnnnnnnnnnnnnnnnnnnnnnnnnnnnnnnnnnnnnnnnnnnnnnnnnnnnnnnnnnnnnnnnnnnnnnnnnnnnnnnnnnnnnnnnnnnnnnnnnnnnnnnnnnnnnnnnnnnnnnnnnnnnnnnnnnnnnnnnnnnnnnnnnnnnnnnnnnnnnnnnnnnnnnnnnnnnnnnnnnnnnnnnnnnnnnnnnnnnnnnnnnnnnnnnnnnnnnnnnnnnnnnnnnnnnnnnnnnnnnnnnnnnnnnnnnnnnnnnnnnnnnnnnnnnnnnnnnnnnnnnnnnnnnnnnnnnnnnnnnnnnnnnnnnnnnnnnnnnnnnnnnnnnnnnnnnnnnnnnnnnnnnnnnnnnnnnnnnnnnnnnnnnnnnnnnnnnnnnnnnnnnnnnnnnnnnnnnnnnnnnnnnnnnnnnnnnnnnnnnnnnnnnnnnnnnnnnnnnnnnnnnnnnnnnnnnnnnnnnnnnnnnnnnnnnnnnnnnnnnnnnnnnnnnnnnnnnnnnnnnnnnnnnnnnnnnnnnnnnnnnnnnnnnnnnnnnnnnnnnnnnnnnnnnnnnnnnnnnnnnnnnnnnnnnnnnnnnnnnnnnnnnnnnnnnnnnnnnnnnnnnnnnnnnnnnnnnnnnnnnnnnnnnnnnnnnnnnnnnnnnnnnnnnnnnnnnnnnnnnnnnnnnnnnnnnnnnnnnnnnnnnnnnnnnnnnnnnnnnnnnnnnnnnnnnnnnnnnnnnnnnnnnnnnnnnnnnnnnnnnnnnnnnnnnnnnnnnnnnnnnnnnnnnnnnnnnnnnnnnnnnnnnnnnnnnnnnnnnnnnnnnnnnnnnnnnnnnnnnnnnnnnnnnnnnnnnnnnnnnnnnnnnnnnnnnnnnnnnnnnnnnnnnnnnnnnnnnnnnnnnnnnnnnnnnnnnnnnnnnnnnnnnnnnnnnnnnnnnnnnnnnnnnnnnnnnnnnnnnnnnnnnnnnnnnnnnnnnnnnnnnnnnnnnnnnnnnnnnnnnnnnnnnnnnnnnnnnnnnnnnnnnnnnnnnnnnnnnnnnnnnnnnnnnnnnnnnnnnnnnnnnnnnnnnnnnnnnnnnnnnnnnnnnnnnnnnnnnnnnnnnnnnnnnnnnnnnnnnnnnnnnnnnnnnnnnnnnnnnnnnnnnnnnnnnnnnnnnnnnnnnnnnnnnnnnnnnnnnnnnnnnnnnnnnnnnnnnnnnnnnnnnnnnnnnnnnnnnnnnnnnnnnnnnnnnnnnnnnnnnnnnnnnnnnnnnnnnnnnnnnnnnnnnnnnnnnnnnnnnnnnnnnnnnnnnnnnnnnnnnnnnnnnnnnnnnnnnnnnnnnnnnnnnnnnnnnnnnnnnnnnnnnnnnnnnnnnnnnnnnnnnnnnnnnnnnnnnnnnnnnnnnnnnnnnnnnnnnnnnnnnnnnnnnnnnnnnnnnnnnnnnnnnnnnnnnnnnnnnnnnnnnnnnnnnnnnnnnnnnnnnnnnnnnnnnnnnnnnnnnnnnnnnnnnnnnnnnnnnnnnnnnnnnnnnnnnnnnnnnnnnnnnnnnnnnnnnnnnnnnnnnnnnnnnnnnnnnnnnnnnnnnnnnnnnnnnnnnnnnnnnnnnnnnnnnnnnnnnnnnnnnnnnnnnnnnnnnnnnnnnnnnnnnnnnnnnnnnnnnnnnnnnnnnnnnnnnnnnnnnnnnnnnnnnnnnnnnnnnnnnnnnnnnnnnnnnnnnnnnnnnnnnnnnnnnnnnnnnnnnnnnnnnnnnnnnnnnnnnnnnnnnnnnnnnnnnnnnnnnnnnnnnnnnnnnnnnnnnnnnnnnnnnnnnnnnnnnnnnnnnnnnnnnnnnnnnnnnnnnnnnnnnnnnnnnnnnnnnnnnnnnnnnnnnnnnnnnnnnnnnnnnnnnnnnnnnnnnnnnnnnnnnnnnnnnnnnnnnnnnnnnnnnnnnnnnnnnnnnnnnnnnnnnnnnnnnnnnnnnnnnnnnnnnnnnnnnnnnnnnnnnnnnnnnnnnnnnnnnnnnnnnnnnnnnnnnnnnnnnnnnnnnnnnnnnnnnnnnnnnnnnnnnnnnnnnnnnnnnnnnnnnnnnnnnnnnnnnnnnnnnnnnnnnnnnnnnnnnnnnnnnnnnnnnnnnnnnnnnnnnnnnnnnnnnnnnnnnnnnnnnnnnnnnnnnnnnnnnnnnnnnnnnnnnnnnnnnnnnnnnnnnnnnnnnnnnnnnnnnnnnnnnnnnnnnnnnnnnnnnnnnnnnnnnnnnnnnnnnnnnnnnnnnnnnnnnnnnnnnnnnnnnnnnnnnnnnnnnnnnnnnnnnnnnnnnnnnnnnnnnnnnnnnnnnnnnnnnnnnnnnnnnnnnnnnnnnnnnnnnnnnnnnnnnnnnnnnnnnnnnnnnnnnnnnnnnnnnnnnnnnnnnnnnnnnnnnnnnnnnnnnnnnnnnnnnnnnnnnnnnnnnnnnnnnnnnnnnnnnnnnnnnnnnnnnnnnnnnnnnnnnnnnnnnnnnnnnnnnnnnnnnnnnnnnnnnnnnnnnnnnnnnnnnnnnnnnnnnnnnnnnnnnnnnnnnnnnnnnnnnnnnnnnnnnnnnnnnnnnnnnnnnnnnnnnnnnnnnnnnnnnnnnnnnnnnnnnnnnnnnnnnnnnnnnnnnnnnnnnnnnnnnnnnnnnnnnnnnnnnnnnnnnnnnnnnnnnnnnnnnnnnnnnnnnnnnnnnnnnnnnnnnnnnnnnnnnnnnnnnnnnnnnnnnnnnnnnnnnnnnnnnnnnnnnnnnnnnnnnnnnnnnnnnnnnnnnnnnnnnnnnnnnnnnnnnnnnnnnnnnnnnnnnnnnnnnnnnnnnnnnnnnnnnnnnnnnnnnnnnnnnnnnnnnnnnnnnnnnnnnnnnnnnnnnnnnnnnnnnnnnnnnnnnnnnnnnnnnnnnnnnnnnnnnnnnnnnnnnnnnnnnnnnnnnnnnnnnnnnnnnnnnnnnnnnnnnnnnnnnnnnnnnnnnnnnnnnnnnnnnnnnnnnnnnnnnnnnnnnnnnnnnnnnnnnnnnnnnnnnnnnnnnnnnnnnnnnnnnnnnnnnnnnnnnnnnnnnnnnnnnnnnnnnnnnnnnnnnnnnnnnnnnnnnnnnnnnnnnnnnnnnnnnnnnnnnnnnnnnnnnnnnnnnnnnnnnnnnnnnnnnnnnnnnnnnnnnnnnnnnnnnnnnnnnnnnnnnnnnnnnnnnnnnnnnnnnnnnnnnnnnnnnnnnnnnnnnnnnnnnnnnnnnnnnnnnnnnnnnnnnnnnnnnnnnnnnnnnnnnnnnnnnnnnnnnnnnnnnnnnnnnnnnnnnnnnnnnnnnnnnnnnnnnnnnnnnnnnnnnnnnnnnnnnnnnnnnnnnnnnnnnnnnnnnnnnnnnnnnnnnnnnnnnnnnnnnnnnnnnnnnnnnnnnnnnnnnnnnnnnnnnnnnnnnnnnnnnnnnnnnnnnnnnnnnnnnnnnnnnnnnnnnnnnnnnnnnnnnnnnnnnnnnnnnnnnnnnnnnnnnnnnnnnnnnnnnnnnnnnnnnnnnnnnnnnnnnnnnnnnnnnnnnnnnnnnnnnnnnnnnnnnnnnnnnnnnnnnnnnnnnnnnnnnnnnnnnnnnnnnnnnnnnnnnnnnnnnnnnnnnnnnnnnnnnnnnnnnnnnnnnnnnnnnnnnnnnnnnnnnnnnnnnnnnnnnnnnnnnnnnnnnnnnnnnnnnnnnnnnnnnnnnnnnnnnnnnnnnnnnnnnnnnnnnnnnnnnnnnnnnnnnnnnnnnnnnnnnnnnnnnnnnnnnnnnnnnnnnnnnnnnnnnnnnnnnnnnnnnnnnnnnnnnnnnnnnnnnnnnnnnnnnnnnnnnnnnnnnnnnnnnnnnnnnnnnnnnnnnnnnnnnnnnnnnnnnnnnnnnnnnnnnnnnnnnnnnnnnnnnnnnnnnnnnnnnnnnnnnnnnnnnnnnnnnnnnnnnnnnnnnnnnnnnnnnnnnnnnnnnnnnnnnnnnnnnnnnnnnnnnnnnnnnnnnnnnnnnnnnnnnnnnnnnnnnnnnnnnnnnnnnnnnnnnnnnnnnnnnnnnnnnnnnnnnnnnnnnnnnnnnnnnnnnnnnnnnnnnnnnnnnnnnnnnnnnnnnnnnnnnnnnnnnnnnnnnnnnnnnnnnnnnnnnnnnnnnnnnnnnnnnnnnnnnnnnnnnnnnnnnnnnnnnnnnnnnnnnnnnnnnnnnnnnnnnnnnnnnnnnnnnnnnnnnnnnnnnnnnnnnnnnnnnnnnnnnnnnnnnnnnnnnnnnnnnnnnnnnnnnnnnnnnnnnnnnnnnnnnnnnnnnnnnnnnnnnnnnnnnnnnnnnnnnnnnnnnnnnnnnnnnnnnnnnnnnnnnnnnnnnnnnnnnnnnnnnnnnnnnnnnnnnnnnnnnnnnnnnnnnnnnnnnnnnnnnnnnnnnnnnnnnnnnnnnnnnnnnnnnnnnnnnnnnnnnnnnnnnnnnnnnnnnnnnnnnnnnnnnnnnnnnnnnnnnnnnnnnnnnnnnnnnnnnnnnnnnnnnnnnnnnnnnnnnnnnnnnnnnnnnnnnnnnnnnnnnnnnnnnnnnnnnnnnnnnnnnnnnnnnnnnnnnnnnnnnnnnnnnnnnnnnnnnnnnnnnnnnnnnnnnnnnnnnnnnnnnnnnnnnnnnnnnnnnnnnnnnnnnnnnnnnnnnnnnnnnnnnnnnnnnnnnnnnnnnnnnnnnnnnnnnnnnnnnnnnnnnnnnnnnnnnnnnnnnnnnnnnnnnnnnnnnnnnnnnnnnnnnnnnnnnnnnnnnnnnnnnnnnnnnnnnnnnnnnnnnnnnnnnnnnnnnnnnnnnnnnnnnnnnnnnnnnnnnnnnnnnnnnnnnnnnnnnnnnnnnnnnnnnnnnnnnnnnnnnnnnnnnnnnnnnnnnnnnnnnnnnnnnnnnnnnnnnnnnnnnnnnnnnnnnnnnnnnnnnnnnnnnnnnnnnnnnnnnnnnnnnnnnnnnnnnnnnnnnnnnnnnnnnnnnnnnnnnnnnnnnnnnnnnnnnnnnnnnnnnnnnnnnnnnnnnnnnnnnnnnnnnnnnnnnnnnnnnnnnnnnnnnnnnnnnnnnnnnnnnnnnnnnnnnnnnnnnnnnnnnnnnnnnnnnnnnnnnnnnnnnnnnnnnnnnnnnnnnnnnnnnnnnnnnnnnnnnnnnnnnnnnnnnnnnnnnnnnnnnnnnnnnnnnnnnnnnnnnnnnnnnnnnnnnnnnnnnnnnnnnnnnnnnnnnnnnnnnnnnnnnnnnnnnnnnnnnnnnnnnnnnnnnnnnnnnnnnnnnnnnnnnnnnnnnnnnnnnnnnnnnnnnnnnnnnnnnnnnnnnnnnnnnnnnnnnnnnnnnnnnnnnnnnnnnnnnnnnnnnnnnnnnnnnnnnnnnnnnnnnnnnnnnnnnnnnnnnnnnnnnnnnnnnnnnnnnnnnnnnnnnnnnnnnnnnnnnnnnnnnnnnnnnnnnnnnnnnnnnnnnnnnnnnnnnnnnnnnnnnnnnnnnnnnnnnnnnnnnnnnnnnnnnnnnnnnnnnnnnnnnnnnnnnnnnnnnnnnnnnnnnnnnnnnnnnnnnnnnnnnnnnnnnnnnnnnnnnnnnnnnnnnnnnnnnnnnnnnnnnnnnnnnnnnnnnnnnnnnnnnnnnnnnnnnnnnnnnnnnnnnnnnnnnnnnnnnnnnnnnnnnnnnnnnnnnnnnnnnnnnnnnnnnnnnnnnnnnnnnnnnnnnnnnnnnnnnnnnnnnnnnnnnnnnnnnnnnnnnnnnnnnnnnnnnnnnnnnnnnnnnnnnnnnnnnnnnnnnnnnnnnnnnnnnnnnnnnnnnnnnnnnnnnnnnnnnnnnnnnnnnnnnnnnnnnnnnnnnnnnnnnnnnnnnnnnnnnnnnnnnnnnnnnnnnnnnnnnnnnnnnnnnnnnnnnnnnnnnnnnnnnnnnnnnnnnnnnnnnnnnnnnnnnnnnnnnnnnnnnnnnnnnnnnnnnnnnnnnnnnnnnnnnnnnnnnnnnnnnnnnnnnnnnnnnnnnnnnnnnnnnnnnnnnnnnnnnnnnnnnnnnnnnnnnnnnnnnnnnnnnnnnnnnnnnnnnnnnnnnnnnnnnnnnnnnnnnnnnnnnnnnnnnnnnnnnnnnnnnnnnnnnnnnnnnnnnnnnnnnnnnnnnnnnnnnnnnnnnnnnnnnnnnnnnnnnnnnnnnnnnnnnnnnnnnnnnnnnnnnnnnnnnnnnnnnnnnnnnnnnnnnnnnnnnnnnnnnnnnnnnnnnnnnnnnnnnnnnnnnnnnnnnnggcttgctgacgcccgaggcgtcggtacgcctttcaggcgactcgccgtcacccgaatcattgacgtccgctggagccgtgctgatcgctgcggcgaactggccgggactcgacgcgccgcgggagtggcgcagcatcatcatcgcccgcgtacccatcgacgccgaatggggtcaggacgaggatgccgacgaacacttcgtcgatccccgcaatcaggccgtcaggctgctcaagaacatcatcggctggggagttcgccgacccgatgccgaatgtgatctttatgtgctcgactatcgcccggggttggtggagtcgctgatcccggctcgattcaagggtgattgggcacagcggcgcgcgatgacgggacgcggggcggcggaggacagcgcgatcgaacgcctcatcgctgccgagcagcctggcaaggcgctgcgtgacgaggtgttccgggtgcttggcaagcgctgcatgacctgcgatctcgtgccgaagccggggataccgctcgagatccatctgctcgggccagtctcggtcagcgaagacgatcgatcgctggccgaggagatggcggtgctctgccagtcatgccaccggctcgcgcattcggtcacgccgccgctctcgatgcccatgctgcgcggcttccacgaacgcaagcgcgcgcgaacctgagtccgtcgccgttgcggcgcaaggcggcttccgtcagatcgccaccgcgtgcacggggctgtccgtggcggcgctacggcgccgcagcgcgaacatgcgcatggttccgtagcctttggcggcagccgtcagaccgacgtagtcgcagcagaactcggccgcgtgctcgagttcgagcgccgcggcaaaagtttcggtgacatagacgagaccgggtggcgtcaccggctcgatgcgcgccgcaagactcacgtgcgcgccgaagaagttctgtttcagcagcagcggatcgtcggtttcgaacaccggaccgagatgaccgccgagtcgcaaggccaggggttcggcgaaagcgccgctgtcggcagccaacgcctgcatcgcgacctgcaggtcgagggcgcattccgccgcttcgcgggtccggcgaaaaacgaggaacatgccatcgccccaggtgttgaggctgagcacgcgcgcgcgatggctctcgatggcacgcgcgaccccgcccaggacaccatggacgaactgcggcatttcccgatccgatatggtgctgaagcgggtgaagtcgccgaacagcatggctcgcgcccgtcgccggttcctgcgctcgtccgcaggcggcgcagcgttggtttcttgcgcgtcttgcggtgcgttgccgggatccggcaacggaatgatgcgctgcggccttccggattcgcgccacagtccgacgtcgacggccgttccggccacgccgcgagcgggggtgccgtcccacaccgcaagttgcgccacgctcgtgaaaaggtgttgggaggcgagcacggcaaggcccatggcgatccggctcgagtaggtgaacaacgtgtcgtcgccgagcccggcgccatcggtcgcgtaacggaccgattgcgcggcggcgaggcaacgccgcatccgggtcacccattgcccgccggcgggccgcaccgaggtttcaatgaaatcgtccagaaggaacggcagtaccacatgcagctgcgcaccgcgatcgagcagcgcttcggcaaagaggatgtctgcacctgaggcgagcgaaccatagccgaagcccgctgcgtgctcgtccagtgtctcaccgatggcggcggcgatcgtcgcttcggccgcggccgggaagcgacccgggactccgggtgcggcgatcatgtgacccgtgtagtggatcaccgcgggcggcgtcagggacgccacccacgatggcggcagacccttggcctcggtcgcgtgcttgatcgaacgcgctgcggtggcgagcatggtgtagtcaccattgctcgcttcgcgtgcggcatcgagccttgcctcggccgacacgagatcgccattgatgatatgcgcttcgatcagggttgcgagggaccagaaccgatcttcgccctctgccgtgtccaccatcgtctcgagcgaggcgatcaggcgccgcgccactgcagccgcacgctccggctccccggcaagcagcagcaggttcgcgaaattgatcccggggtaatagtcgccgcgctcgaggtaggccgcttcgtactttgcggccgcggtgcgcagcagggcgagcctctcggcttcatcggtgctggccagggcgagatccttgtccagtcgggcatcgagttcacgcagaccgcgttcgcttcgaccttcgagtcccagtgaaacgaaccattgtcttgcctgccgcgtggcccccgagcgggcgagggcgaggacggctcggtgtttaagcctggtgctgtcgggatgttcgcccagcccgcggcgggcgatgtcgaacgcccggaacgcctcgcctgcacgctcggcttcgcgcaccagcgcataccagtccgcttcgttgcgaccgaccgtcggtgcgtggcgcagatcacccatggtgcattgtttactcgacccgggtccagatcgacttgctgtagaagaagcccctcgattgcttcacttcgagtttgcgacctcccggcagttgcaggatttcggcgcggctgagggatccggtttccggatcgagcaatatcgcctcttcccagacgttctctgcggcgttgaatcgggcgttttgcaagatcgtcagccccatgaacaactgccccttgcgcgaaccgggacagtccttgcagcgcgctgcacgctgcgccgggtcccgaacctcctcgattcgtccccagagttttcctgacagcaatgaaatgcgcacgaggaagccgcccgggtcgctctcggcttcgtgggtcagccagagtcccgtcggcggtggcggcggggtcgcgaaggaaaatgttgatacaccgatcaggaggatggaaaagagaagctttacacgcatgttccgttcacctccgccagctgtggagcgcccgcgatgcgcctgcgtcaccgatcctcaaaccgccctttcaacgcgaaccagtcgcccgacgcccgcagcccggcccgcttcgatgtcgcgctcgctgtcgccgatgaggatcgacgctgcagggtcgatgccgagctcgcggatcgcacgcaggatcattcccggtgccggcttgcgacagtcgcaggatcgcgtgaattgcgcaacggtaccctgcgggtgatgcgggcagtggtacaccgcggcgatacggatgccctgcgccgccaaggcttcgcgatagcgatccgtgagcagttcatagtccgcctcggagaagtagccccgcgcgatgccggactggttggtgatcacgaccagcagataaccctcgtcggccagccgctgcaacatcgcgacggcgtccggtgcgaacctgaagtcctcccagcgaccgacatacccggagtcgacgttgatcaccccgtcgcggtcgatgaacgcggctttgcgcaggccggacatggagcctccggtcagcgggccggatcgcccagtttcgagaggatgcgggtggtggacaggccgggcacgaggtcgaggatggccacctggccgcccgctgccgtgacacaccgtccgccggcgacttcgccggcgatgtagtccccgcctttcacgagtacctgcggcaacacctcgcagtagagatgttccggcgtgtcttcctcgaaggcgacgagatagtcgacgcactccagcatgccgaggaccgtgagtcggtgctcgagcggattgaccggccgcgtcggccccttgagccgacgtaccgaggcgtcgtcgttgacggccacgaccagcaggtcaccgagctcccgcgctcgccgcaggaggtcgacgtgtccggcgtgcagcacatcgaagcaaccgttggtcatcaccgtcgcccggcccgccgccttcgcggcggcgacgatttctttgagtgcgcgccggtcgacgaccttgcgcagcaggcccgaagcgggtgatgaggatctcgcgtggagaatctccgctacggtggtggtggccgttcccgacttggcgacgacgagaccggcagcgatgttcgcccagtcgacggcctcgcgcagcggtacgcccgaccccagcgccgccgccagagtcgcgaccaccgtgtcgccggcaccggtgacatcgaagacctcgcgggcgcgactggccagatgcagcggctccgcattgcgctcgagcagggtcatgccatgttcgccgcgggtgacgagcagagcttcgagacccagccggtcgcgcaggttgacgccgcgttcgacgatgctgcgttcgtccgcgcagcgacccaccaccgcctcgaactcggcgagattcggcgtgatcaccgtggcgccgcaatagcgcatgaagtccgttcccttcgggtcgaccaccacgggtttgccgagagcgcgggcagcctcgatcatctgcggcgtctcgctgccgaggaagcccttcgcgtaatccgagagcaccagcacgtcggcaccttcgagacgagcgcggatgccatcgaccttgctcgcgcccgaaagacccgccagaccgtgctcgaagtcgagtcgtaccagttgttgccggcgcgacatcacccgcagtttgcggatggtctgcgcgcctgcgacctgcatcaggccgtgggcgatgccgcgctggtcgaggagccgtccgagttccgcgcctgctgcatcgtcaccgatgagtccgaccagcgtcgcccgcgcgcccagcgccacgatgttgagcgccacattggccgcgccgccgggacgtgtctcctcgaagtcgaccagcaccaccggcacgggcgcctcgggggagatgcgcgaggtcgttcccacccagtaggtgtcggccatgacatcgccggcgacgagtacctgcgccgcaccgaagtcgagtactccctggattttcatcggccggacgggggtgcaacgagcccaagggcaatctcgacatctgcgcacagcgtatgtgcgaggaagatgtgcgcttcctggatcctcgcggtgtcgtccgacggcacgatcaaagaaatatcgcagagcggcggcatcttgccgccatcgcggccgagcaggcctatccgggtgatgccgagctcgccggcggcctgcagtgccacgagaacgttgggggaattgccggatgtggaaatgccgagcaggcagtcgccccggcggccgatggcgcggacctggcgcgcaaacacctgttcgtagccatagtcgttgccgatgcaggtgagcgccgaggtatccgtggtcagggcgatcgcagcgagcggatcgcgctctgcacgaagccgtccggtcagctcggcggcgatgtgctggcaatcggcggcggaaccgccgttgccgcagagcagcagcttgcctccgccgcgcagcgaatcggcgatcgcgcgggttgctgccgcgaggacaggctgcagcccggccactcgttgaaaggtttcaaggtgcgcctgcagcgcatcggggaacgtactcatcctcgggtcacctctggcgaattgtagatcacccgcgcgctcttcgctgccgatcggccatgacagtggcgggggtattggatacccttgccggcaatgtcgaaaagcttccgaaacgggtcgtcgggacgggcgaacaagccgcttcccccgtccctccaggggctcttcagccaggctgtggcccgtcatcaggccgggcgtatccacgaggcgctcggcttctatgaacgcgtgctcgaaggttcgccccggcacttcgacagcctgaatctgggcggcctcgccagtcttcaggcgggtgatccggggcgcggcgcgcgctggctcgcggctgcggtcgaactcaaccccggcaacgtggcaacccggaataacctgggcgtcgccttgctcgatctggggcgcagtgccgaggccctggctgcgttcgacctggccatcgggctacagcgcgatttcgtcgatgcccacttcaatcgcggcaagaccctgcttgcgctggcgcggttcgagcaggccgtggacgccttcgatgcagcggcgcgcctcaagcccgcgcatgccgaggcgctgcagtaccgcggcgtcgccttgaagatgctcggccgcaacgacgaggctctcgccagtttcgaggccgccctcgcgatccgcgccgactatccggatgcgcacaacaaccgcggcgtcacgctgttcgaaacgggccgatacgaggaggcgatcgcggcgtttggcgaggtgctgcgcctgagcggcccgcatcccgatccgtacaacaacctcgggcgcgcgttgcaggagttgcgacgcccggccgaggcgatcgatgcattcgatgctgcgctcaaactccgccccgattacgccgatgccctgaacagtcgcggaaactcgctgctcgagttgcgacgtctcgaggaggccctggcgagcttcgaagcggcgatccgtcatcgtccggggtatgtcgaggcgatcaacaatcgcggcaacgcactgttggagttgcggcgcttcgacgcggcgatcgtcgagtacgacctggcgctgcgcttgcggcccgacttcgccgaggcgcacgtcaaccgcagcaatgcgctgatgcagctggctagacccgtcgcggctctggcggatctcgatgcggcggtccgcctgcagcccgaacttgccggagcccacctcaaccgcgcgcatctttggctgaacaccggcgactatccgcagggctggcgcgaattcgagtggcgctggaaggtgcagggtcgtgccgtggtcgccttgcgcagcgccgcgcatggcctttggctcggacaggagcctattgccggatccactctggtcatctgtcacgagcaaggcgtgggcgacacgctgcagttctgccgttacggtcttttggccgccgcggcgggtgcacgcgtcgttgcgctggtgccgaaaccgctgacgcgcctgatgtccgcgcagccgtgggtgtcgcaagtggtggaaaccgggcagaccctgccgcccttcgacttccactgtccgatgatgtcgctgccgctggcattcggtacgacgctcgagacgattccgttcggtgacgcgccgtacctgctggcgccaaccggcgacgtggagcgctggggccagtggctggccgaacgtctgccgggctcctccgcagtcgccgacggcggccggcagctgcgcgtgggtctcgtctggaacggcggctttcgtgccgatcagcccgaactctgggcggtgaatgaacgtcgcaacgtgccgctgggccttttcgccgcggccctcgatctgccgggtatcgacttcgtcagcctgcagaagggcgacccggcggagtccgagctgcgtggtcgggagcgcgagttctggaaagttgcgaccttgctgaacccggcgtcggaactcaccgacttcgccgacacagccggcttgatcgcgaaccttgatctggtgatcagcgtggacacctcgacggcgcatctggccgcggcgatgggcaagccgacgtggatcctgaaccgctacgacacctgctggcggtggctgttcgatcgggaagacagtccgtggtatggatcggtgaagctgttccggcagggcgcggatcgcgactggcgacccgtgctcgagcgagtgtccagcgccctgcaatacgttgtcggaggtgcgtgatgagacgtggttttcgcgagcctggcgggcgcaccacccagcaacgcctcgaggccgccgtcgaactgcatcgcgccgggcgtctggaagaggccctgaaggcctacaggaatctcgcgcaggccgatccgacgaacttccacgcgctgcatctcggcgggctcgtcagcgtgcagctcggcgatcgcgcgcgcggcgtcgagatgctcagggcggcgatcaagatcaatcccgacgtgcccaccgcccacaacaactgtggcgtcgccttgctgggtctcggtcggcacgaggaggcgctggcgagtttcgacagcgccattgcactgcagcaagactacttcgacgccatcatcaaccgcggcaacgccctgaaggaactcggcaagctcgaggatgcgctcgcgagcttcgatcttgcgatcaagctgcagcgcgacaacgccgatgcgcacttcaaccgcggcaatacgctggtgcagctgcgacgcttcggtgaggccatcaccgcgttcgacgccacgctgcgtttgcagccgggcaatctcgatgccgtccagtcgcgtggcgcggcgctgcagggcctgcagcggcaccgcgaggccatcgcggcgttcgacaccgtgctcgcgcagcgcgcggacagcgtcgacgtcctcaccaatcgcggcgtcagtcagctcgaactcggcaaccacgaggatgcgctggccagtttcgatgcggctctcgcgttgcgcgccgaccaccccgaggctctcaacaaccgcggttcggcgctgcaaaagctcaagcgattcgcagaggccgtggacagttacgacgcggcgatccgccaccgacccgactaccacgaagcgtggagcaatcgcggcggcacgctctgggcgctggggcgccacgacgaggctcttgagagtttcgacaccgcactgcgactcaagcccgacgccgtggagatcaggacgacccgcggcaatgcctgcctcgaactcggccgctacgccgaggctttgtcggagtacgacaaggccatcgagacccagcccgattgc

SEQ ID NO: 51 - DNA, 18836 bp, Artificial Sequence
  Synthetic Oligonucleotide
  misc_feature (1)..(9999): n is a, c, g, or t
nnnnnnnnnnnnnnnnnnnnnnnnnnnnnnnnnnnnnnnnnnnnnnnnnnnnnnnnnnnnnnnnnnnnnnnnnnnnnnnnnnnnnnnnnnnnnnnnnnnnnnnnnnnnnnnnnnnnnnnnnnnnnnnnnnnnnnnnnnnnnnnnnnnnnnnnnnnnnnnnnnnnnnnnnnnnnnnnnnnnnnnnnnnnnnnnnnnnnnnnnnnnnnnnnnnnnnnnnnnnnnnnnnnnnnnnnnnnnnnnnnnnnnnnnnnnnnnnnnnnnnnnnnnnnnnnnnnnnnnnnnnnnnnnnnnnnnnnnnnnnnnnnnnnnnnnnnnnnnnnnnnnnnnnnnnnnnnnnnnnnnnnnnnnnnnnnnnnnnnnnnnnnnnnnnnnnnnnnnnnnnnnnnnnnnnnnnnnnnnnnnnnnnnnnnnnnnnnnnnnnnnnnnnnnnnnnnnnnnnnnnnnnnnnnnnnnnnnnnnnnnnnnnnnnnnnnnnnnnnnnnnnnnnnnnnnnnnnnnnnnnnnnnnnnnnnnnnnnnnnnnnnnnnnnnnnnnnnnnnnnnnnnnnnnnnnnnnnnnnnnnnnnnnnnnnnnnnnnnnnnnnnnnnnnnnnnnnnnnnnnnnnnnnnnnnnnnnnnnnnnnnnnnnnnnnnnnnnnnnnnnnnnnnnnnnnnnnnnnnnnnnnnnnnnnnnnnnnnnnnnnnnnnnnnnnnnnnnnnnnnnnnnnnnnnnnnnnnnnnnnnnnnnnnnnnnnnnnnnnnnnnnnnnnnnnnnnnnnnnnnnnnnnnnnnnnnnnnnnnnnnnnnnnnnnnnnnnnnnnnnnnnnnnnnnnnnnnnnnnnnnnnnnnnnnnnnnnnnnnnnnnnnnnnnnnnnnnnnnnnnnnnnnnnnnnnnnnnnnnnnnnnnnnnnnnnnnnnnnnnnnnnnnnnnnnnnnnnnnnnnnnnnnnnnnnnnnnnnnnnnnnnnnnnnnnnnnnnnnnnnnnnnnnnnnnnnnnnnnnnnnnnnnnnnnnnnnnnnnnnnnnnnnnnnnnnnnnnnnnnnnnnnnnnnnnnnnnnnnnnnnnnnnnnnnnnnnnnnnnnnnnnnnnnnnnnnnnnnnnnnnnnnnnnnnnnnnnnnnnnnnnnnnnnnnnnnnnnnnnnnnnnnnnnnnnnnnnnnnnnnnnnnnnnnnnnnnnnnnnnnnnnnnnnnnnnnnnnnnnnnnnnnnnnnnnnnnnnnnnnnnnnnnnnnnnnnnnnnnnnnnnnnnnnnnnnnnnnnnnnnnnnnnnnnnnnnnnnnnnnnnnnnnnnnnnnnnnnnnnnnnnnnnnnnnnnnnnnnnnnnnnnnnnnnnnnnnnnnnnnnnnnnnnnnnnnnnnnnnnnnnnnnnnnnnnnnnnnnnnnnnnnnnnnnnnnnnnnnnnnnnnnnnnnnnnnnnnnnnnnnnnnnnnnnnnnnnnnnnnnnnnnnnnnnnnnnnnnnnnnnnnnnnnnnnnnnnnnnnnnnnnnnnnnnnnnnnnnnnnnnnnnnnnnnnnnnnnnnnnnnnnnnnnnnnnnnnnnnnnnnnnnnnnnnnnnnnnnnnnnnnnnnnnnnnnnnnnnnnnnnnnnnnnnnnnnnnnnnnnnnnnnnnnnnnnnnnnnnnnnnnnnnnnnnnnnnnnnnnnnnnnnnnnnnnnnnnnnnnnnnnnnnnnnnnnnnnnnnnnnnnnnnnnnnnnnnnnnnnnnnnnnnnnnnnnnnnnnnnnnnnnnnnnnnnnnnnnnnnnnnnnnnnnnnnnnnnnnnnnnnnnnnnnnnnnnnnnnnnnnnnnnnnnnnnnnnnnnnnnnnnnnnnnnnnnnnnnnnnnnnnnnnnnnnnnnnnnnnnnnnnnnnnnnnnnnnnnnnnnnnnnnnnnnnnnnnnnnnnnnnnnnnnnnnnnnnnnnnnnnnnnnnnnnnnnnnnnnnnnnnnnnnnnnnnnnnnnnnnnnnnnnnnnnnnnnnnnnnnnnnnnnnnnnnnnnnnnnnnnnnnnnnnnnnnnnnnnnnnnnnnnnnnnnnnnnnnnnnnnnnnnnnnnnnnnnnnnnnnnnnnnnnnnnnnnnnnnnnnnnnnnnnnnnnnnnnnnnnnnnnnnnnnnnnnnnnnnnnnnnnnnnnnnnnnnnnnnnnnnnnnnnnnnnnnnnnnnnnnnnnnnnnnnnnnnnnnnnnnnnnnnnnnnnnnnnnnnnnnnnnnnnnnnnnnnnnnnnnnnnnnnnnnnnnnnnnnnnnnnnnnnnnnnnnnnnnnnnnnnnnnnnnnnnnnnnnnnnnnnnnnnnnnnnnnnnnnnnnnnnnnnnnnnnnnnnnnnnnnnnnnnnnnnnnnnnnnnnnnnnnnnnnnnnnnnnnnnnnnnnnnnnnnnnnnnnnnnnnnnnnnnnnnnnnnnnnnnnnnnnnnnnnnnnnnnnnnnnnnnnnnnnnnnnnnnnnnnnnnnnnnnnnnnnnnnnnnnnnnnnnnnnnnnnnnnnnnnnnnnnnnnnnnnnnnnnnnnnnnnnnnnnnnnnnnnnnnnnnnnnnnnnnnnnnnnnnnnnnnnnnnnnnnnnnnnnnnnnnnnnnnnnnnnnnnnnnnnnnnnnnnnnnnnnnnnnnnnnnnnnnnnnnnnnnnnnnnnnnnnnnnnnnnnnnnnnnnnnnnnnnnnnnnnnnnnnnnnnnnnnnnnnnnnnnnnnnnnnnnnnnnnnnnnnnnnnnnnnnnnnnnnnnnnnnnnnnnnnnnnnnnnnnnnnnnnnnnnnnnnnnnnnnnnnnnnnnnnnnnnnnnnnnnnnnnnnnnnnnnnnnnnnnnnnnnnnnnnnnnnnnnnnnnnnnnnnnnnnnnnnnnnnnnnnnnnnnnnnnnnnnnnnnnnnnnnnnnnnnnnnnnnnnnnnnnnnnnnnnnnnnnnnnnnnnnnnnnnnnnnnnnnnnnnnnnnnnnnnnnnnnnnnnnnnnnnnnnnnnnnnnnnnnnnnnnnnnnnnnnnnnnnnnnnnnnnnnnnnnnnnnnnnnnnnnnnnnnnnnnnnnnnnnnnnnnnnnnnnnnnnnnnnnnnnnnnnnnnnnnnnnnnnnnnnnnnnnnnnnnnnnnnnnnnnnnnnnnnnnnnnnnnnnnnnnnnnnnnnnnnnnnnnnnnnnnnnnnnnnnnnnnnnnnnnnnnnnnnnnnnnnnnnnnnnnnnnnnnnnnnnnnnnnnnnnnnnnnnnnnnnnnnnnnnnnnnnnnnnnnnnnnnnnnnnnnnnnnnnnnnnnnnnnnnnnnnnnnnnnnnnnnnnnnnnnnnnnnnnnnnnnnnnnnnnnnnnnnnnnnnnnnnnnnnnnnnnnnnnnnnnnnnnnnnnnnnnnnnnnnnnnnnnnnnnnnnnnnnnnnnnnnnnnnnnnnnnnnnnnnnnnnnnnnnnnnnnnnnnnnnnnnnnnnnnnnnnnnnnnnnnnnnnnnnnnnnnnnnnnnnnnnnnnnnnnnnnnnnnnnnnnnnnnnnnnnnnnnnnnnnnnnnnnnnnnnnnnnnnnnnnnnnnnnnnnnnnnnnnnnnnnnnnnnnnnnnnnnnnnnnnnnnnnnnnnnnnnnnnnnnnnnnnnnnnnnnnnnnnnnnnnnnnnnnnnnnnnnnnnnnnnnnnnnnnnnnnnnnnnnnnnnnnnnnnnnnnnnnnnnnnnnnnnnnnnnnnnnnnnnnnnnnnnnnnnnnnnnnnnnnnnnnnnnnnnnnnnnnnnnnnnnnnnnnnnnnnnnnnnnnnnnnnnnnnnnnnnnnnnnnnnnnnnnnnnnnnnnnnnnnnnnnnnnnnnnnnnnnnnnnnnnnnnnnnnnnnnnnnnnnnnnnnnnnnnnnnnnnnnnnnnnnnnnnnnnnnnnnnnnnnnnnnnnnnnnnnnnnnnnnnnnnnnnnnnnnnnnnnnnnnnnnnnnnnnnnnnnnnnnnnnnnnnnnnnnnnnnnnnnnnnnnnnnnnnnnnnnnnnnnnnnnnnnnnnnnnnnnnnnnnnnnnnnnnnnnnnnnnnnnnnnnnnnnnnnnnnnnnnnnnnnnnnnnnnnnnnnnnnnnnnnnnnnnnnnnnnnnnnnnnnnnnnnnnnnnnnnnnnnnnnnnnnnnnnnnnnnnnnnnnnnnnnnnnnnnnnnnnnnnnnnnnnnnnnnnnnnnnnnnnnnnnnnnnnnnnnnnnnnnnnnnnnnnnnnnnnnnnnnnnnnnnnnnnnnnnnnnnnnnnnnnnnnnnnnnnnnnnnnnnnnnnnnnnnnnnnnnnnnnnnnnnnnnnnnnnnnnnnnnnnnnnnnnnnnnnnnnnnnnnnnnnnnnnnnnnnnnnnnnnnnnnnnnnnnnnnnnnnnnnnnnnnnnnnnnnnnnnnnnnnnnnnnnnnnnnnnnnnnnnnnnnnnnnnnnnnnnnnnnnnnnnnnnnnnnnnnnnnnnnnnnnnnnnnnnnnnnnnnnnnnnnnnnnnnnnnnnnnnnnnnnnnnnnnnnnnnnnnnnnnnnnnnnnnnnnnnnnnnnnnnnnnnnnnnnnnnnnnnnnnnnnnnnnnnnnnnnnnnnnnnnnnnnnnnnnnnnnnnnnnnnnnnnnnnnnnnnnnnnnnnnnnnnnnnnnnnnnnnnnnnnnnnnnnnnnnnnnnnnnnnnnnnnnnnnnnnnnnnnnnnnnnnnnnnnnnnnnnnnnnnnnnnnnnnnnnnnnnnnnnnnnnnnnnnnnnnnnnnnnnnnnnnnnnnnnnnnnnnnnnnnnnnnnnnnnnnnnnnnnnnnnnnnnnnnnnnnnnnnnnnnnnnnnnnnnnnnnnnnnnnnnnnnnnnnnnnnnnnnnnnnnnnnnnnnnnnnnnnnnnnnnnnnnnnnnnnnnnnnnnnnnnnnnnnnnnnnnnnnnnnnnnnnnnnnnnnnnnnnnnnnnnnnnnnnnnnnnnnnnnnnnnnnnnnnnnnnnnnnnnnnnnnnnnnnnnnnnnnnnnnnnnnnnnnnnnnnnnnnnnnnnnnnnnnnnnnnnnnnnnnnnnnnnnnnnnnnnnnnnnnnnnnnnnnnnnnnnnnnnnnnnnnnnnnnnnnnnnnnnnnnnnnnnnnnnnnnnnnnnnnnnnnnnnnnnnnnnnnnnnnnnnnnnnnnnnnnnnnnnnnnnnnnnnnnnnnnnnnnnnnnnnnnnnnnnnnnnnnnnnnnnnnnnnnnnnnnnnnnnnnnnnnnnnnnnnnnnnnnnnnnnnnnnnnnnnnnnnnnnnnnnnnnnnnnnnnnnnnnnnnnnnnnnnnnnnnnnnnnnnnnnnnnnnnnnnnnnnnnnnnnnnnnnnnnnnnnnnnnnnnnnnnnnnnnnnnnnnnnnnnnnnnnnnnnnnnnnnnnnnnnnnnnnnnnnnnnnnnnnnnnnnnnnnnnnnnnnnnnnnnnnnnnnnnnnnnnnnnnnnnnnnnnnnnnnnnnnnnnnnnnnnnnnnnnnnnnnnnnnnnnnnnnnnnnnnnnnnnnnnnnnnnnnnnnnnnnnnnnnnnnnnnnnnnnnnnnnnnnnnnnnnnnnnnnnnnnnnnnnnnnnnnnnnnnnnnnnnnnnnnnnnnnnnnnnnnnnnnnnnnnnnnnnnnnnnnnnnnnnnnnnnnnnnnnnnnnnnnnnnnnnnnnnnnnnnnnnnnnnnnnnnnnnnnnnnnnnnnnnnnnnnnnnnnnnnnnnnnnnnnnnnnnnnnnnnnnnnnnnnnnnnnnnnnnnnnnnnnnnnnnnnnnnnnnnnnnnnnnnnnnnnnnnnnnnnnnnnnnnnnnnnnnnnnnnnnnnnnnnnnnnnnnnnnnnnnnnnnnnnnnnnnnnnnnnnnnnnnnnnnnnnnnnnnnnnnnnnnnnnnnnnnnnnnnnnnnnnnnnnnnnnnnnnnnnnnnnnnnnnnnnnnnnnnnnnnnnnnnnnnnnnnnnnnnnnnnnnnnnnnnnnnnnnnnnnnnnnnnnnnnnnnnnnnnnnnnnnnnnnnnnnnnnnnnnnnnnnnnnnnnnnnnnnnnnnnnnnnnnnnnnnnnnnnnnnnnnnnnnnnnnnnnnnnnnnnnnnnnnnnnnnnnnnnnnnnnnnnnnnnnnnnnnnnnnnnnnnnnnnnnnnnnnnnnnnnnnnnnnnnnnnnnnnnnnnnnnnnnnnnnnnnnnnnnnnnnnnnnnnnnnnnnnnnnnnnnnnnnnnnnnnnnnnnnnnnnnnnnnnnnnnnnnnnnnnnnnnnnnnnnnnnnnnnnnnnnnnnnnnnnnnnnnnnnnnnnnnnnnnnnnnnnnnnnnnnnnnnnnnnnnnnnnnnnnnnnnnnnnnnnnnnnnnnnnnnnnnnnnnnnnnnnnnnnnnnnnnnnnnnnnnnnnnnnnnnnnnnnnnnnnnnnnnnnnnnnnnnnnnnnnnnnnnnnnnnnnnnnnnnnnnnnnnnnnnnnnnnnnnnnnnnnnnnnnnnnnnnnnnnnnnnnnnnnnnnnnnnnnnnnnnnnnnnnnnnnnnnnnnnnnnnnnnnnnnnnnnnnnnnnnnnnnnnnnnnnnnnnnnnnnnnnnnnnnnnnnnnnnnnnnnnnnnnnnnnnnnnnnnnnnnnnnnnnnnnnnnnnnnnnnnnnnnnnnnnnnnnnnnnnnnnnnnnnnnnnnnnnnnnnnnnnnnnnnnnnnnnnnnnnnnnnnnnnnnnnnnnnnnnnnnnnnnnnnnnnnnnnnnnnnnnnnnnnnnnnnnnnnnnnnnnnnnnnnnnnnnnnnnnnnnnnnnnnnnnnnnnnnnnnnnnnnnnnnnnnnnnnnnnnnnnnnnnnnnnnnnnnnnnnnnnnnnnnnnnnnnnnnnnnnnnnnnnnnnnnnnnnnnnnnnnnnnnnnnnnnnnnnnnnnnnnnnnnnnnnnnnnnnnnnnnnnnnnnnnnnnnnnnnnnnnnnnnnnnnnnnnnnnnnnnnnnnnnnnnnnnnnnnnnnnnnnnnnnnnnnnnnnnnnnnnnnnnnnnnnnnnnnnnnnnnnnnnnnnnnnnnnnnnnnnnnnnnnnnnnnnnnnnnnnnnnnnnnnnnnnnnnnnnnnnnnnnnnnnnnnnnnnnnnnnnnnnnnnnnnnnnnnnnnnnnnnnnnnnnnnnnnnnnnnnnnnnnnnnnnnnnnnnnnnnnnnnnnnnnnnnnnnnnnnnnnnnnnnnnnnnnnnnnnnnnnnnnnnnnnnnnnnnnnnnnnnnnnnnnnnnnnnnnnnnnnnnnnnnnnnnnnnnnnnnnnnnnnnnnnnnnnnnnnnnnnnnnnnnnnnnnnnnnnnnnnnnnnnnnnnnnnnnnnnnnnnnnnnnnnnnnnnnnnnnnnnnnnnnnnnnnnnnnnnnnnnnnnnnnnnnnnnnnnnnnnnnnnnnnnnnnnnnnnnnnnnnnnnnnnnnnnnnnnnnnnnnnnnnnnnnnnnnnnnnnnnnnnnnnnnnnnnnnnnnnnnnnnnnnnnnnnnnnnnnnnnnnnnnnnnnnnnnnnnnnnnnnnnnnnnnnnnnnnnnnnnnnnnnnnnnnnnnnnnnnnnnnnnnnnnnnnnnnnnnnnnnnnnnnnnnnnnnnnnnnnnnnnnnnnnnnnnnnnnnnnnnnnnnnnnnnnnnnnnnnnnnnnnnnnnnnnnnnnnnnnnnnnnnnnnnnnnnnnnnnnnnnnnnnnnnnnnnnnnnnnnnnnnnnnnnnnnnnnnnnnnnnnnnnnnnnnnnnnnnnnnnnnnnnnnnnnnnnnnnnnnnnnnnnnnnnnnnnnnnnnnnnnnnnnnnnnnnnnnnnnnnnnnnnnnnnnnnnnnnnnnnnnnnnnnnnnnnnnnnnnnnnnnnnnnnnnnnnnnnnnnnnnnnnnnnnnnnnnnnnnnnnnnnnnnnnnnnnnnnnnnnnnnnnnnnnnnnnnnnnnnnnnnnnnnnnnnnnnnnnnnnnnnnnnnnnnnnnnnnnnnnnnnnnnnnnnnnnnnnnnnnnnnnnnnnnnnnnnnnnnnnnnnnnnnnnnnnnnnnnnnnnnnnnnnnnnnnnnnnnnnnnnnnnnnnnnnnnnnnnnnnnnnnnnnnnnnnnnnnnnnnnnnnnnnnnnnnnnnnnnnnnnnnnnnnnnnnnnnnnnnnnnnnnnnnnnnnnnnnnnnnnnnnnnnnnnnnnnnnnnnnnnnnnnnnnnnnnnnnnnnnnnnnnnnnnnnnnnnnnnnnnnnnnnnnnnnnnnnnnnnnnnnnnnnnnnnnnnnnnnnnnnnnnnnnnnnnnnnnnnnnnnnnnnnnnnnnnnnnnnnnnnnnnnnnnnnnnnnnnnnnnnnnnnnnnnnnnnnnnnnnnnnnnnnnnnnnnnnnnnnnnnnnnnnnnnnnnnnnnnnnnnnnnnnnnnnnnnnnnnnnnnnnnnnnnnnnnnnnnnnnnnnnnnnnnnnnnnnnnnnnnnnnnnnnnnnnnnnnnnnnnnnnnnnnnnnnnnnnnnnnnnnnnnnnnnnnnnnnnnnnnnnnnnnnnnnnnnnnnnnnnnnnnnnnnnnnnnnnnnnnnnnnnnnnnnnnnnnnnnnnnnnnnnnnnnnnnnnnnnnnnnnnnnnnnnnnnnnnnnnnnnnnnnnnnnnnnnnnnnnnnnnnnnnnnnnnnnnnnnnnnnnnnnnnnnnnnnnnnnnnnnnnnnnnnnnnnnnnnnnnnnnnnnnnnnnnnnnnnnnnnnnnnnnnnnnnnnnnnnnnnnnnnnnnnnnnnnnnnnnnnnnnnnnnnnnnnnnnnnnnnnnnnnnnnnnnnnnnnnnnnnnnnnnnnnnnnnnnnnnnnnnnnnnnnnnnnnnnnnnnnnnnnnnnnnnnnnnnnnnnnnnnnnnnnnnnnnnnnnnnnnnnnnnnnnnnnnnnnnnnnnnnnnnnnnnnnnnnnnnnnnnnnnnnnnnnnnnnnnnnnnnnnnnnnnnnnnnnnnnnnnnnnnnnnnnnnnnnnnnnnnnnnnnnnnnnnnnnnnnnnnnnnnnnnnnnnnnnnnnnnnnnnnnnnnnnnnnnnnnnnnnnnnnnnnnnnnnnnnnnnnnnnnnnnnnnnnnnnnnnnnnnnnnnnnnnnnnnnnnnnnnnnnnnnnnnnnnnnnnnnnnnnnnnnnnnnnnnnnnnnnnnnnnnnnnnnnnnnnnnnnnnnnnnnnnnnnnnnnnnnnnnnnnnnnnnnnnnnnnnnnnnnnnnnnnnnnnnnnnnnnnnnnnnnnnnnnnnnnnnnnnnnnnnnnnnnnnnnnnnnnnnnnnnnnnnnnnnnnnnnnnnnnnnnnnnnnnnnnnnnnnnnnnnnnnnnnnnnnnnnnnnnnnnnnnnnnnnnnnnnnnnnnnnnnnnnnnnnnnnnnnnnnnnnnnnnnnnnnnnnnnnnnnnnnnnnnnnnnnnnnnnnnnnnnnnnnnnnnnnnnnnnnnnnnnnnnnnnnnnnnnnnnnnnnnnnnnnnnnnnnnnnnnnnnnnnnnnnnnnnnnnnnnnnnnnnnnnnnnnnnnnnnnnnnnnnnnnnnnnnnnnnnnnnnnnnnnnnnnnnnnnnnnnnnnnnnnnnnnnnnnnnnnnnnnnnnnnnnnnnnnnnnnnnnnnnnnnnnnnnnnnnnnnnnnnnnnnnnnnnnnnnnnnnnnnnnnnnnnnnnnnnnnnnnnnnnnnnnnnnnnnnnnnnnnnnnnnnnnnnnnnnnnnnnnnnnnnnnnnnnnnnnnnnnnnnnnnnnnnnnnnnnnnnnnnnnnnnnnnnnnnnnnnnnnnnnnnnnnnnnnnnnnnnnnnnnnnnnnnnnnnnnnnnnnnnnnnnnnnnnnnnnnnnnnnnnnnnnnnnnnnnnnnnnnnnnnnnnnnnnnnnnnnnnnnnnnnnnnnnnnnnnnnnnnnnnnnnnnnnnnnnnnnnnnnnnnnnnnnnnnnnnnnnnnnnnnnnnnnnnnnnnnnnnnnnnnnnnnnnnnnnnnnnnnnnnnnnnnnnnnnnnnnnnnnnnnnnnnnnnnnnnnnnnnnnnnnnnnnnnnnnnnnnnnnnnnnnnnnnnnnnnnnnnnnnnnnnnnnnnnnnnnnnnnnnnnnnnnnnnnnnnnnnnnnnnnnnnnnnnnnnnnnnnnnnnnnnnnnnnnnnnnnnnnnnnnnnnnnnnnnnnnnnnnnnnnnnnnnnnnnnnnnnnnnnnnnnnnnnnnnnnnnnnnnnnnnnnnnnnnnnnnnnnnnnnnnnnnnnnnnnnnnnnnnnnnnnnnnnnnnnnnnnnnnnnnnnnnnnnnnnnnnnnnnnnnnnnnnnnnnnnnnnncccggtgccatctgccgcgcacccggtgaagccctcatggatgcggtggcgcgatgccctgatgatggcatcttgatcgccgctggcgcctggtctggcctcgatgcgccgcgcctgcggtggcaaaccgtggtcatccccaaaacaccgtacggcaaaccactcatccttgacgcccagcagataagcgcttacgtggacagcaaggttgttgccatcaggcgcaccaaccaagggttacaccgtgggctgcgcaccaccgatgccacctgcaccttgctgttactcgatccggatagccgtcgtgccgatttacgtcaagccattccccgtcgtttcttggtggattgggacagcgtggccgagggctcgttggttttgcgcacgcacttcgcccgtgaacgaaaaaaaggtctgcgtgaaaaaaccctgagccggcgcgggcagcactgcgaacaccccggctgtacggccacccaagagcatttgctggaggtgcaccacctcaacccgattgccaacggcccccgcgacacagttactgatgacctgcgggtgctttgtaaaaatcaccacgcggatgcccaccaagccatgcgaaaagctgattttttaaaagtgaaaacaactgaaaagcgtgcagaggcagacacttaggccacagctggtcaagctacgccgtaaatgcgtagttactggaacttcgcgcgagtgcttagataggcttccatcggtcaagctacgccgtaaatgcgtagttactggaacttgcgtgtggtatcagttcagcgtggatcgggtcaagctacgccgtaaatgcgtagttactggaacgaagttcacgttgacactgccttggatacgggtcaagctacgccgtaaatgcgtagttactggaactggtagcggctgcttgttaagtaaggccgaggtcgtctggggtcaagctacgccgtaaaggcgtagttacttttagcagccagttttgctggttttaagcggtccaatggcccgacttgccgcccatcttttcaagcaggcgcacgcccgtcatggtcatgccgcggtcggcggctttgcacatgtcgtagatggtcagcaagccgacttgtacggcggtgagggcttccatttcaacacccgtggggccggtggtttcggcggtgacggtgcaatgaacgtgggggggctggtcaccggtggtgaaggctacgcgcacatggctgagcgccaagggatggcacaggggaatgaggtcagcggtgcgcttggaggcttgtatagccgccacgcgcgcaatgcccaacacatcaccctttttggcgttgccatcgcgaatcagagccaaggtgtcggcgtgcatttcaatgcgcccttctgctgtggcgctgcgtttggtgttggctttgtcacccacgtcgaccatgtgggcttggccttgtgcatcaaagtgggtcaggggtgaagggggctggctggacacggtgcaatctccgaaactttgcaaaacttagggcatcatacccatatgccttcccccttgtttgttgctcgccgtcgccctcgtttggcgtgggcgttgccgtgggctttgggtgccgccctgctgctggggccaaccacactcaccgttgcgcaaccccgcgcggccttgcccaacttgggtggtggggtgtcgttaacgctgggggatgagcgccggctgggccaacaaatcatgcccagcttgcacaacagtggcttggtggtggaagacccgctgctcaaccaatacctcaccgatctgtggcgccctgtgtttgcaacggcgcgcgcacgcggtgatgtgcccgatgacatgttgcagcagtttgcttggcagttgtggttgctcagccccaaagccatcaacgcgtttgcattacccgggggttactttggttttcacttaggtttgttggcatcggccacggatgacgctgcactggcgtcggtgttggcgcacgagttgagccatgtgacacagcgccatattgcccgcatcatccaagcccaagagagccaagcgccttggctgattggcgccatgattttgggtgctgccaccatcgccgccagccccgatgcaggcgccgcactgattgtgggtgggcaggcagcgtccattcaaaaccagctcaacttctcgcgggacatggagcaagaggcggaccgccaaggcttggtggtgttgtcggaggcggggtttgatccgaaggggtttgtgcgcttatttgaaaccctgcaaaacgccaaccgcttgaatgacgatggtgcctttccctacctgcgcagccacccgctcacgaccgagcgtgtggcggatatgcaaggccgcttgttcagcgtaccggccgagcccaacccggtgggcgatggtgcggtgcagatgcgcgaccccgatgcctctgctttgttgcgcgtgcgtgccgccgtcatcgcctcggctgatgaggtggatgtgttgcaaggttggggtgcggcgcccgccaccactgggtcagcgggcagtgtcatccgcccggcgaaacaatgggcgagtgactaccagcgcgcactggccgcgtgggcactgaagcgccccgatgtggcatggacgcgcctgcgccaattgatgaccgaggcggctacgcaacccgccgtgtcgcaggtgctgcgcgagacggcgttggcttggctggccagccccgctaagtttgagccgatacccgctgcaacggtgcaggcttgggttgaggcggccttggctgatgcccaagccgggcggcgttcggcgctgctgctgttggcgggttatgcggccagcgccaattcagccgtgccggatgcgcggcgcgcgcaggtgatcggggccttgcgtacctggttggcgacccaccccaatgatgcgttgggctggcagttgttggcccgtttgagtgcgcaacaaggccaagccttggtggcgttgagggccgaggccgaggcctttgtggcgcgcgagctgtggcaaggggcgcttgaccgtttgtctgccgccaagcgcctgattgcggaggctaaaacccgtttcagtgaagccgacattgcgattatttacgcccgcgaaaaggcagttaatcaagccatggcatttgcacggtctgagcgccgttgagcgcgcaccagtacactaagtcccccatggcagccatccacatctctgacatcgagtcggccatcaactattggcggacacaaaaaccttcacccgacggtgtgacgctgtgcgccgaggtgcgcgccttggccgaggtttatgcgctgctggtgtactaccacgagaccgaggccgatgaggccagtatgccgtttgatgcctatgcggcctgggaggcttggttcgacacgacacccgatacgccgtgtatcgcgatctgctcaaccagccagggcgatgacctgtgtaaaggttgtggccgtacctttgaagaggtgcagtactggaccgaaatgcagcccgccgaaaagcgcgcggtttggcgtcgcatcaccctgcatggcgatgcgtggcgctttaaccgctaccgcgaacgggcgatcgagaacgcggcgtaaccgcgtgccgtcagcctttggcggcgcgcaacgccaattcggcggctttaccgacgtaggtggcaggcgtcatggccaacaaacgcgctttgtcggcgtctggaatagccagtgactgaatgaggccgtgcaaggcttcacgcgtgacggttttgccccgtgtgacggctttgagttgctcgtacgcgccatcgataccgtagcgccgcatgacggtttgaatcggctctgccaacacttcccacgcgttgtcgaggtcgtccgccaaggcgtccgcgttgagttcgagtttgcgcagacccaccgccatcgattgatacgccaacaccgagtagccaaacgcgacgcccatgttgcgcaacaccgtgctgtcggtcaggtcacgttgccagcgcgagatgggtagcttttcactgaggtggcgcagcaaggcattggccagccccaagttaccttcggcgttttcaaagtcgatcggattgactttgtgcggcatggtggatgagccgatctcaccgtctttgaggcgttgcttgaagtaccccaagctgatgtaaccccacacgtcacgcgcaaggtcgatcaagatggtgttgacacgggccatggcgtcgaacagctcggccatgtaatcgtgcggctcaatttgaatgctgtagtcctggaacgttaagcccaagccattgggtacgggtgaggccaccacgcctttggcaaaggcctcccaatcgacgtcgggccaggcgctcatgtgggcgttatagttaccaaccgcgccgttcattttggccatgatggcgacttgctcaatgcgcaaggtggcgcgttgcaggcgcacggcgacgttggccatctctttaccgacggtggtcgggctggcggtttggccgtgggtccggctgagcatgggcacgtgggcgtactgctcggccatgcccagcagcagattcacgacgtcgcccaacatgggcaacagcacttcgcgtagcgcggcttgcaattgcagtgcgtggctggtgttgttgatgtcctcgctggtgcaggcaaagtgcacaaattcgcctgcacgctcaagctcttcgcggaccgctgggctaagacggtcatttcggaaagcgcgtttgatccaatactcaactgctttgacatcgtggttggtctcgcgctcgatggccttgatgtcggcggtgtcggcttcgctgacttgctgaaccaagccccgcaggtaggcggtcgcctcggccgataaggcgggacactccaccagaccggcttgcgtgagggcgataaaccacgtgatctcgacttgcacccgcttgtgcatgtagccatgctcgctcatgatgggtcgcaaggcagccagtttgccgctgtagcggccgtcaagcggggagagggcggagatggtgtagaggtcttgagtcatggggggtggggtgcgatgtgcaccaaaatagataaccaatattgtaggcgcccagccaaattaagcctttggctgtatacaggtttgatgagcttaaaagcgaccaggattccttttggcgcccgtgttttggggctttctgtggctagaatcattgctcgatcaaccattattgaaacccatgaaactcatcggctctccaaccagtccatatgtgcgcaaggttcgcgtcgtcttggttgaaaagcgtctcgagtacgagttcgcaaccgaagatgtgtggtcggcggataccctgatcgcagcggctaatccactcgggaagatcccctgtttgatcatggacgggggtgaggccatgtttgattcgcgcgtgatcgtagagtacctcgatggcttgtcgccggtgagtcgtttgattcccgcaagcggccgcgagcgtgcggaagttaaaacctgggaggccttggctgacggtgtcatggatgccgccatcttggctcgcttagaggcttcatgggctgggcgcaccgaggcccaacgctcaccggcttggattgaccgccagttgggcaaagtggagttggcggtggctgccatggccaaaggcttgggcgacaagccttattgcagtggcattcatttcagtttgtcagacgtggctgtgggtagcgcgttggcgtatctggagttccgctttccacaaattaattggcgcgaaacgcatcccaatttgtccgcgttgttagaccgcttgatgcagcgggccagctttgcaggcacggcgcacgcctgatagcccatcgctctgcggggtttatcccgcgcgctttttgagccagcgcatgagggcgccgatgacggggagcttttcatacagctcttccgcagcgtcccagtagtcgcggtgaaacaccaccaagccctgcgcgtcgaagcgcaaatggctggcaccccggatggtccaggggcgaccgcccttgccgccctttcggcctttggtgctgaatagaaaatcccaagttaaaaagcagtcatcaccctgttcaatggccgtcgtgaccacgaagcgcggttgttcaaggcgcttgaacatgtcatcgaagatgtgctgaacttgcgccaactgcgtgacttcgttgaaagggtctttgaaaaagagcggatcggcgtagtacgcacccatgcgcgtcacgtcagcggcttgcaggttttcaaaccatgccaataacgcttgtgtgcgggccgatacctgatgacgggatgcgctcatagtcgggtgagttttttgatgagcgcttgtgcccagcgatgcggcaatacgcgcagcaatttgagccaccaggtgaagcgtttgggaaagtggatgtcaaagaggccatcagcccaaccagccaaaatttcggtggctgcaacatcggtggtgatcaacgcaggcatggtgaactcgttctgcgcggtgagtggggtttctacaaagccggggtggatggcgctgatacccagccccttgcccgccaagtcgtaatgcagtacttcagcgaaatgggtgagcgcggctttggtgggaccgtatgccaacgagttgggtaacccgcgccagccggcgacgctactgataaaactgaggtgaccaaatccttgttgcaataaggtgggcaaggtggcatcgaccaagttataggcgcccacgacgttgacgtcgagatgttgcttcatgcgtgccaagtcaaaccggtaggcgcgcaggggcttgtaaatcccggctgcaaacagcaccagatcgagccgcccttgcgcctgcacaatgtgttgcaccgtgttttgcagcgcgggcaagtcggtcacgtctagtgggtaggccgccgcactggggtgctgtgttgcaaattgctgcaggggctcgctttggcgtgccgagaccattacccgggcaccgcgttgtgccaactgctcggcaacggcgtggccaatgccggtggaggctccaacaatccacaccactttgccagaccattccgtcagcggtgggttcatgggtttgaacaagcgggccatcaggcggcagtcattggtttttcgagcgtgaactggatcacgtccgtgttcgactccatgaaggcggcttcacagtaggccaagtagaactcccatgtgcggatgaaaggcgtgtcaaaacccagcgcgcggacggcgggttcctcgtgcaggaatttgtggcgccatgtgcgcagggtctcggcgtaatcgagaccgaatgccttctcattgacgacacgcaaaccagcgcgcccagcagattcgcggaattggcgtggactgggtaaacagccgccaggaaagatgtactgctgtatgaagtccgtgccttggatgtagcggctgaacaggtgatcggcaatcacgatggactggatacaggccttacctccgggtttgaggcgcttggcgatggtgtcgaaataggtgggccagtaggcgcgcccgaccgcctcgatcatctcaatcgagcaaaccgcgtcgaatggttcttcggggctgaccacgccaatgtcacggtaatcctgcaaccgcaagtcggctaactgtccgttgggggttgcagcgagtcgcttgttggcccagtcgagctgttctgtggacagcgtcaggccgaccatttcgctttgaaattcgttggtagccatttctgccaaggcgccccagccgcagccgatctctagcaagcgttggccgggcttcaagtccacctcttgcagcgcgcggcgcaccttttcgttttgcgccatggccatgtctgtgatgccattggcatacaacgcgctggagtagttcatggtgttgtctaaccacaaacggtaaaagtcgtttccgaggtcgtagtgcgcgtgaatatttttgcggctgttggctttggtgttgcggttcaaccagtgcttcacttggtaggcaaaacgcccaatgggatgaccgtatacggctttctcgatggcgtcgcggttttgaatcagcacctgcaacaagtgggcgagttgcggggtgtgccagtaaccggcaatgtaggtttcggcgaagccgatatcaccacttttaatggctgccgaaaacacacgccaatttttcaggatgatgtagccctgcaaaccaccaggtttgccgtataccagccaggtgccgtcagggcattgaatgtgcaactccccatgcgtgattttggtgagcagcttgagcagtcgcttggccgcgaaggggactttgacgtgggcgagggctgccgcggtggtggtgtctcgttgcatgggtcgtcgaatgaaggctaggtaatgaactcggtgggtggcgcaggttttctgaaaaacggtacacgcttcagaaacaataacagggcttgccaatgaatgcgcgccatcaccccaaaggtcatgagggggtaggcccatagcgcgcgtcggcggctgcgcgcgtttaggggttcgagcgtaccactcacgctggtgcacagcaaaggaccgtccgcccattgggtgtcggtgtagtcaatgcgggcgaccacgcggtttggcaccccctgccccgtttgtttttggtgcatgaagttgaaccggtaactgccccgcacctcgcaaaagggggaaacatgaaaaaccttttcagtgcgctgctgtacacccagggttacgtggtccagtacgtagatgtgccgctcgccaaatgtgttgttgacctcgacgaccacggcttttagttcgtgcgcggcggtgtagcagtaccaaaaactgacgggcttaaagacgtagcccaacacgcgtgggtaggt

SEQ ID NO: 52 - DNA, 18836 bp, Artificial Sequence; identical to SEQ ID NO: 51
  Synthetic Oligonucleotide
  misc_feature (1)..(9999): n is a, c, g, or t

SEQ ID NO: 53 - DNA, 18419 bp, Artificial Sequence
  Synthetic Oligonucleotide
  misc_feature (1)..(6073): n is a, c, g, or t
nnnnnnnnnnnnnnnnnnnnnnnnnnnnnnnnnnnnnnnnnnnnnnnnnnnnnnnnnnnnnnnnnnnnnnnnnnnnnnnnnnnnnnnnnnnnnnnnnnnnnnnnnnnnnnnnnnnnnnnnnnnnnnnnnnnnnnnnnnnnnnnnnnnnnnnnnnnnnnnnnnnnnnnnnnnnnnnnnnnnnnnnnnnnnnnnnnnnnnnnnnnnnnnnnnnnnnnnnnnnnnnnnnnnnnnnnnnnnnnnnnnnnnnnnnnnnnnnnnnnnnnnnnnnnnnnnnnnnnnnnnnnnnnnnnnnnnnnnnnnnnnnnnnnnnnnnnnnnnnnnnnnnnnnnnnnnnnnnnnnnnnnnnnnnnnnnnnnnnnnnnnnnnnnnnnnnnnnnnnnnnnnnnnnnnnnnnnnnnnnnnnnnnnnnnnnnnnnnnnnnnnnnnnnnnnnnnnnnnnnnnnnnnnnnnnnnnnnnnnnnnnnnnnnnnnnnnnnnnnnnnnnnnnnnnnnnnnnnnnnnnnnnnnnnnnnnnnnnnnnnnnnnnnnnnnnnnnnnnnnnnnnnnnnnnnnnnnnnnnnnnnnnnnnnnnnnnnnnnnnnnnnnnnnnnnnnnnnnnnnnnnnnnnnnnnnnnnnnnnnnnnnnnnnnnnnnnnnnnnnnnnnnnnnnnnnnnnnnnnnnnnnnnnnnnnnnnnnnnnnnnnnnnnnnnnnnnnnnnnnnnnnnnnnnnnnnnnnnnnnnnnnnnnnnnnnnnnnnnnnnnnnnnnnnnnnnnnnnnnnnnnnnnnnnnnnnnnnnnnnnnnnnnnnnnnnnnnnnnnnnnnnnnnnnnnnnnnnnnnnnnnnnnnnnnnnnnnnnnnnnnnnnnnnnnnnnnnnnnnnnnnnnnnnnnnnnnnnnnnnnnnnnnnnnnnnnnnnnnnnnnnnnnnnnnnnnnnnnnnnnnnnnnnnnnnnnnnnnnnnnnnnnnnnnnnnnnnnnnnnnnnnnnnnnnnnnnnnnnnnnnnnnnnnnnnnnnnnnnnnnnnnnnnnnnnnnnnnnnnnnnnnnnnnnnnnnnnnnnnnnnnnnnnnnnnnnnnnnnnnnnnnnnnnnnnnnnnnnnnnnnnnnnnnnnnnnnnnnnnnnnnnnnnnnnnnnnnnnnnnnnnnnnnnnnnnnnnnnnnnnnnnnnnnnnnnnnnnnnnnnnnnnnnnnnnnnnnnnnnnnnnnnnnnnnnnnnnnnnnnnnnnnnnnnnnnnnnnnnnnnnnnnnnnnnnnnnnnnnnnnnnnnnnnnnnnnnnnnnnnnnnnnnnnnnnnnnnnnnnnnnnnnnnnnnnnnnnnnnnnnnnnnnnnnnnnnnnnnnnnnnnnnnnnnnnnnnnnnnnnnnnnnnnnnnnnnnnnnnnnnnnnnnnnnnnnnnnnnnnnnnnnnnnnnnnnnnnnnnnnnnnnnnnnnnnnnnnnnnnnnnnnnnnnnnnnnnnnnnnnnnnnnnnnnnnnnnnnnnnnnnnnnnnnnnnnnnnnnnnnnnnnnnnnnnnnnnnnnnnnnnnnnnnnnnnnnnnnnnnnnnnnnnnnnnnnnnnnnnnnnnnnnnnnnnnnnnnnnnnnnnnnnnnnnnnnnnnnnnnnnnnnnnnnnnnnnnnnnnnnnnnnnnnnnnnnnnnnnnnnnnnnnnnnnnnnnnnnnnnnnnnnnnnnnnnnnnnnnnnnnnnnnnnnnnnnnnnnnnnnnnnnnnnnnnnnnnnnnnnnnnnnnnnnnnnnnnnnnnnnnnnnnnnnnnnnnnnnnnnnnnnnnnnnnnnnnnnnnnnnnnnnnnnnnnnnnnnnnnnnnnnnnnnnnnnnnnnnnnnnnnnnnnnnnnnnnnnnnnnnnnnnnnnnnnnnnnnnnnnnnnnnnnnnnnnnnnnnnnnnnnnnnnnnnnnnnnnnnnnnnnnnnnnnnnnnnnnnnnnnnnnnnnnnnnnnnnnnnnnnnnnnnnnnnnnnnnnnnnnnnnnnnnnnnnnnnnnnnnnnnnnnnnnnnnnnnnnnnnnnnnnnnnnnnnnnnnnnnnnnnnnnnnnnnnnnnnnnnnnnnnnnnnnnnnnnnnnnnnnnnnnnnnnnnnnnnnnnnnnnnnnnnnnnnnnnnnnnnnnnnnnnnnnnnnnnnnnnnnnnnnnnnnnnnnnnnnnnnnnnnnnnnnnnnnnnnnnnnnnnnnnnnnnnnnnnnnnnnnnnnnnnnnnnnnnnnnnnnnnnnnnnnnnnnnnnnnnnnnnnnnnnnnnnnnnnnnnnnnnnnnnnnnnnnnnnnnnnnnnnnnnnnnnnnnnnnnnnnnnnnnnnnnnnnnnnnnnnnnnnnnnnnnnnnnnnnnnnnnnnnnnnnnnnnnnnnnnnnnnnnnnnnnnnnnnnnnnnnnnnnnnnnnnnnnnnnnnnnnnnnnnnnnnnnnnnnnnnnnnnnnnnnnnnnnnnnnnnnnnnnnnnnnnnnnnnnnnnnnnnnnnnnnnnnnnnnnnnnnnnnnnnnnnnnnnnnnnnnnnnnnnnnnnnnnnnnnnnnnnnnnnnnnnnnnnnnnnnnnnnnnnnnnnnnnnnnnnnnnnnnnnnnnnnnnnnnnnnnnnnnnnnnnnnnnnnnnnnnnnnnnnnnnnnnnnnnnnnnnnnnnnnnnnnnnnnnnnnnnnnnnnnnnnnnnnnnnnnnnnnnnnnnnnnnnnnnnnnnnnnnnnnnnnnnnnnnnnnnnnnnnnnnnnnnnnnnnnnnnnnnnnnnnnnnnnnnnnnnnnnnnnnnnnnnnnnnnnnnnnnnnnnnnnnnnnnnnnnnnnnnnnnnnnnnnnnnnnnnnnnnnnnnnnnnnnnnnnnnnnnnnnnnnnnnnnnnnnnnnnnnnnnnnnnnnnnnnnnnnnnnnnnnnnnnnnnnnnnnnnnnnnnnnnnnnnnnnnnnnnnnnnnnnnnnnnnnnnnnnnnnnnnnnnnnnnnnnnnnnnnnnnnnnnnnnnnnnnnnnnnnnnnnnnnnnnnnnnnnnnnnnnnnnnnnnnnnnnnnnnnnnnnnnnnnnnnnnnnnnnnnnnnnnnnnnnnnnnnnnnnnnnnnnnnnnnnnnnnnnnnnnnnnnnnnnnnnnnnnnnnnnnnnnnnnnnnnnnnnnnnnnnnnnnnnnnnnnnnnnnnnnnnnnnnnnnnnnnnnnnnnnnnnnnnnnnnnnnnnnnnnnnnnnnnnnnnnnnnnnnnnnnnnnnnnnnnnnnnnnnnnnnnnnnnnnnnnnnnnnnnnnnnnnnnnnnnnnnnnnnnnnnnnnnnnnnnnnnnnnnnnnnnnnnnnnnnnnnnnnnnnnnnnnnnnnnnnnnnnnnnnnnnnnnnnnnnnnnnnnnnnnnnnnnnnnnnnnnnnnnnnnnnnnnnnnnnnnnnnnnnnnnnnnnnnnnnnnnnnnnnnnnnnnnnnnnnnnnnnnnnnnnnnnnnnnnnnnnnnnnnnnnnnnnnnnnnnnnnnnnnnnnnnnnnnnnnnnnnnnnnnnnnnnnnnnnnnnnnnnnnnnnnnnnnnnnnnnnnnnnnnnnnnnnnnnnnnnnnnnnnnnnnnnnnnnnnnnnnnnnnnnnnnnnnnnnnnnnnnnnnnnnnnnnnnnnnnnnnnnnnnnnnnnnnnnnnnnnnnnnnnnnnnnnnnnnnnnnnnnnnnnnnnnnnnnnnnnnnnnnnnnnnnnnnnnnnnnnnnnnnnnnnnnnnnnnnnnnnnnnnnnnnnnnnnnnnnnnnnnnnnnnnnnnnnnnnnnnnnnnnnnnnnnnnnnnnnnnnnnnnnnnnnnnnnnnnnnnnnnnnnnnnnnnnnnnnnnnnnnnnnnnnnnnnnnnnnnnnnnnnnnnnnnnnnnnnnnnnnnnnnnnnnnnnnnnnnnnnnnnnnnnnnnnnnnnnnnnnnnnnnnnnnnnnnnnnnnnnnnnnnnnnnnnnnnnnnnnnnnnnnnnnnnnnnnnnnnnnnnnnnnnnnnnnnnnnnnnnnnnnnnnnnnnnnnnnnnnnnnnnnnnnnnnnnnnnnnnnnnnnnnnnnnnnnnnnnnnnnnnnnnnnnnnnnnnnnnnnnnnnnnnnnnnnnnnnnnnnnnnnnnnnnnnnnnnnnnnnnnnnnnnnnnnnnnnnnnnnnnnnnnnnnnnnnnnnnnnnnnnnnnnnnnnnnnnnnnnnnnnnnnnnnnnnnnnnnnnnnnnnnnnnnnnnnnnnnnnnnnnnnnnnnnnnnnnnnnnnnnnnnnnnnnnnnnnnnnnnnnnnnnnnnnnnnnnnnnnnnnnnnnnnnnnnnnnnnnnnnnnnnnnnnnnnnnnnnnnnnnnnnnnnnnnnnnnnnnnnnnnnnnnnnnnnnnnnnnnnnnnnnnnnnnnnnnnnnnnnnnnnnnnnnnnnnnnnnnnnnnnnnnnnnnnnnnnnnnnnnnnnnnnnnnnnnnnnnnnnnnnnnnnnnnnnnnnnnnnnnnnnnnnnnnnnnnnnnnnnnnnnnnnnnnnnnnnnnnnnnnnnnnnnnnnnnnnnnnnnnnnnnnnnnnnnnnnnnnnnnnnnnnnnnnnnnnnnnnnnnnnnnnnnnnnnnnnnnnnnnnnnnnnnnnnnnnnnnnnnnnnnnnnnnnnnnnnnnnnnnnnnnnnnnnnnnnnnnnnnnnnnnnnnnnnnnnnnnnnnnnnnnnnnnnnnnnnnnnnnnnnnnnnnnnnnnnnnnnnnnnnnnnnnnnnnnnnnnnnnnnnnnnnnnnnnnnnnnnnnnnnnnnnnnnnnnnnnnnnnnnnnnnnnnnnnnnnnnnnnnnnnnnnnnnnnnnnnnnnnnnnnnnnnnnnnnnnnnnnnnnnnnnnnnnnnnnnnnnnnnnnnnnnnnnnnnnnnnnnnnnnnnnnnnnnnnnnnnnnnnnnnnnnnnnnnnnnnnnnnnnnnnnnnnnnnnnnnnnnnnnnnnnnnnnnnnnnnnnnnnnnnnnnnnnnnnnnnnnnnnnnnnnnnnnnnnnnnnnnnnnnnnnnnnnnnnnnnnnnnnnnnnnnnnnnnnnnnnnnnnnnnnnnnnnnnnnnnnnnnnnnnnnnnnnnnnnnnnnnnnnnnnnnnnnnnnnnnnnnnnnnnnnnnnnnnnnnnnnnnnnnnnnnnnnnnnnnnnnnnnnnnnnnnnnnnnnnnnnnnnnnnnnnnnnnnnnnnnnnnnnnnnnnnnnnnnnnnnnnnnnnnnnnnnnnnnnnnnnnnnnnnnnnnnnnnnnnnnnnnnnnnnnnnnnnnnnnnnnnnnnnnnnnnnnnnnnnnnnnnnnnnnnnnnnnnnnnnnnnnnnnnnnnnnnnnnnnnnnnnnnnnnnnnnnnnnnnnnnnnnnnnnnnnnnnnnnnnnnnnnnnnnnnnnnnnnnnnnnnnnnnnnnnnnnnnnnnnnnnnnnnnnnnnnnnnnnnnnnnnnnnnnnnnnnnnnnnnnnnnnnnnnnnnnnnnnnnnnnnnnnnnnnnnnnnnnnnnnnnnnnnnnnnnnnnnnnnnnnnnnnnnnnnnnnnnnnnnnnnnnnnnnnnnnnnnnnnnnnnnnnnnnnnnnnnnnnnnnnnnnnnnnnnnnnnnnnnnnnnnnnnnnnnnnnnnnnnnnnnnnnnnnnnnnnnnnnnnnnnnnnnnnnnnnnnnnnnnnnnnnnnnnnnnnnnnnnnnnnnnnnnnnnnnnnnnnnnnnnnnnnnnnnnnnnnnnnnnnnnnnnnnnnnnnnnnnnnnnnnnnnnnnnnnnnnnnnnnnnnnnnnnnnnnnnnnnnnnnnnnnnnnnnnnnnnnnnnnnnnnnnnnnnnnnnnnnnnnnnnnnnnnnnnnnnnnnnnnnnnnnnnnnnnnnnnnnnnnnnnnnnnnnnnnnnnnnnnnnnnnnnnnnnnnnnnnnnnnnnnnnnnnnnnnnnnnnnnnnnnnnnnnnnnnnnnnnnnnnnnnnnnnnnnnnnnnnnnnnnnnnnnnnnnnnnnnnnnnnnnnnnnnnnnnnnnnnnnnnnnnnnnnnnnnnnnnnnnnnnnnnnnnnnnnnnnnnnnnnnnnnnnnnnnnnnnnnnnnnnnnnnnnnnnnnnnnnnnnnnnnnnnnnnnnnnnnnnnnnnnnnnnnnnnnnnnnnnnnnnnnnnnnnnnnnnnnnnnnnnnnnnnnnnnnnnnnnnnnnnnnnnnnnnnnnnnnnnnnnnnnnnnnnnnnnnnnnnnnnnnnnnnnnnnnnnnnnnnnnatcatttttgctggaaacgtgaccgagtggccgaaggtgctcccctgctaagggagtatggggtgttgagcctcatcaagggttcgaatcccttcgtttccgccaagcaatttttgtaagccgttgatttaaaacggcttttttcatttttacttttaattctttagctggtacccgcattggtacccaacttgttattggcccttgcaagttatggcttgctccttaagttagcccaagttgtatttataaaaattcgttgctgggtacccccttcaatttctagccagaccagaccccacggcacccccaccccccaattttctatttgggtcccatccgcgcacccttacacctagttttgctcaaacgattctttgatttttaaattagtaaattgagatttagtgttagtctggccgaagcggggtttctaacttagcctgcttttgtgttttttttgaatctgttcggtaattggttgaaggaaatgacttcacaccattcattcttgccatctgtcgtgcctcctctgcgaccgtcaaatcgacggggatgatttcggtgaaaccgtttttgtaagtgacgtatttgtatggcatttaaatctccaacttagccgcttgggttttttgggtttcgtactttggtgattcgatataaccttttgatgtgatcgaattcagaacctctttggcatcagaaatatcaatgtcgtcgtcagttggtcttatgggtaataaccacgcatcaggaatacatctcgggtacttccagtagatagtctgtagctctgcaatattgtttttaagcgtttcaacccagaccttcttatggtggattggtttcacacgccagccttgtaagttgaggaaatcaatatattgaattgggcctcgtacttgaacaattagtccgatattcgctcggcattgcggtgtttcgttgatgatgattgctaagtcaccgtgtttgcatctccacgccatagagtttctccaatttagtcatttcagcgattgctagggcatgacaagtaggaataaatccgcccaataaaaaacccgccactagggacgggttgacactcgcttggttgtccgaagaccacatcgctttaccaccttgcccgaggagcaggttggcgtgggtgtcagcccatctcttgatgacggatgaaatataccaaagtggcagaggttgtcaatatcgggcgtgtttcctcatttttagctacgccctaacgtcccagtaaccctcatctcggtagcaaccgcccacccttacacctagatttactcaaacgagggctatttgccgagttagtggctggggagtagacttgttagcaattaagtcatattgataatttgacagaagactaaagagaaaatgaaaaatttcgcaatcagagccaaattaagggtgccgattattcttaaggggtacaccaccctagatgctttacttatgtctgttttaggaaaaggtgatgtaagcgaattacttaagtgtacggatgacctctacttcgcaagtgctgctcttccagaggacctaggaattacacaaaaagcatcattcgttgcaagcatgagaccagagcacactccagagtggcgagacatcatcttgccaaatactaagacggacggattaccaagtaacttcgagttgcaaggttcaaaaagggtaaacgacttgaagattggccttgcacgtcaacgtgatgctgggaatattctcagcagctacccagccagatacacccccgttgttgaatggcatgccattggcattgctgaggctgtttatgatgttttgaaggaagtcccatttctcggtaaaagacgaactgctggttatggagaggtagatgaatggagtctcctagatagcgatttggatggcatcgtcggctacgctaacgagcctttgcgtccaatacctgtagagcgttggcagtatggtggcgactggattcctgaagaagctgcttggaaagcgccttattgggaagtgcgaaatcgaactaaatgcttcgtgccacaaagttcatgaacggcccagaatttttcatgaaacacgctgggtacagtttgctacccaaggatagagccacgggcgatccagtaattgatgctgaggcgctatttcaaatttctatttcgttaaatactgggcaatctctacgtctatcctcatcgtggtgggtagttacacccgagttcgtcgctaccagctttaaagtacagaatgagactggatttcgccatgacctaactaggccggaagcgataagaattgcgctgaaatcaggacagccctgcatactattggcactgggtaagcgaacccttgaaccaagggatttgtttgtaacctatgacccccgctctgcccgcttgtgcagtgaggggaaatttaaaaactttgatgctacgcaggagaaagattggatatcttgatcgaaaagccattaagagtgaggggctacgccctacaccggttggttgagcagcatcagcagggtgtgccagcactttggttggacgaaggccagcatgtaagaattcgtccccgtaatcaggagccgccccccatgtcagttgggaagctcatcggttttagtgttaccgcatgtgtagcgtactcaagtggcaacaagcacaaatacttgcccaccagtgattggcggggtcgtaagcgttggctcgaggagcgatctaccaagtgcggctttgaggttgtaggagtgcatgtctcaggcggcatgcaggttattgataaagaagacggaaggcgctttaccgtggacgccacagaattcattggccttttaaaaatcactgatcttgatgtctttcagcactgttatgtgaacggcatcagtaaggtgggaaaggcgtatggattaaatatgctcatcattgattaactggagaaataataatggctaacccaactcgtttcctcatagccgacttggttgtgaatactttgcagcctgtgacttattcgcaccacggggtcagagatatgcccatgcttatcagaggcgttgattcagctgggactccgcagcggaccgtttatcttcccgctggtcaaatgcgtggccgaattcggcacgaagctgcacttagcgtgatgcgtaataagccagagaaggtaaagctcgaggaggcatatatgttggcactgggtcaagaccttaacccagaggaagataaggctccagaagagattcggctaggagatcaactcaaacttcggcatgcaaatcctttgcttgatctttttggaacttggaagctatcaagccgtctttttgtttcgcatttgcttcctgaacaaaacttgcagccagacgtaattagaaatatacgacgtgacttggataccaacgaggacatcatggagcaactaggcgaagaagagcaggagcgactctacgaccgtcagatgaagcaaggccaagcatcaaaggtcaatacctatatcgacatagccgagaaagaactcaagacagctcgtcgtaacaaggatcaggcaaaggttgatgaacttgaggctaagttagatgagctgaaaactctaaaaaaggatacaaaaggtgaagatcagtcagaaaacaccaaacacttagtcgagtttcaagttattccagctggcgtgacgttgataggcaagttaactatcgagcgtccaattccttcggacttgaggtttctggttgaggctttcaaggcaatcagtctaaagccctacttcggtgcccaaagagcgaggggatgcggtgagattagtgggtcggtaagttttagaacacaaactgatgagggattgattaacattcagtttggtaacttcaagcctgccgttgttcaaacaaccgaagccggtagtgcctttctagctgcgtgatgcagtaccgaagccctgagcaagctacttatgccaagttaatagagggggccataagcccaggcctaccgttacttgcgggcgcggctgctggtttaggtaaaactcacgggtactcgatccctctagtctcctctggtaagcggatagctattgcaatgagtacaaggcagttgattgaccagttcttgagcagcgacgcgcttcggcaagccttgagtattcattcagccagcgttgtagctcttcagcctaggcgaaattttgagactcagtcacagtacaaatctcatcgagagcaggctctcaaagcagatgttttagttgtgacccatgcagccgcgctgattgactctttgatgcccgcctacgccgagttacgcaatcgtgatgttttgttatttgatgaagctgatctattagctgatgctgctgatttaagaagcacatttagcattgaggtggagacactgattgactgtaaggcagaggcttcatcgcatttagaagcagctaaggcagtcaaaaaaaatgctgatgatattgaggatcgggcgtcagcttctgcgattatttatgcactcgagaatcctgcttggtataaagaggtgggcaaggatgagagcggggcgttaatactcaagcatcgaatgccgggtcgaatgctgaagcgacttatcaatgactctccaagatgtatcttcactagcgggactttacaagtctcaggcagatttgattacttcgcacaggcattgggaatttcatcttatgcacccgaaagtcgccacatcaatcctagtgtgcatggttcattagatgtgtcagtggcatctgatgagatgtcttcacaagagatggccgaccagatacttgcagcagaaagaccagcattagttttgactacgagccatgcgctaagtaaagagttaggtggtctttgtgatggggcgactatccgtttgcagggcgaggctttggcagacgctgtttcacgatgccctgacaaagggattttgattgcagctggcgcttggtcgggactggatgaaccgagacttcgttggaaaacggtggttattccgaagacaccatttctaaggccagcaatattagacggtaaacaagtaacccgataccttgatagcagagttgttgcaatgcgtaggactaatcagggcttgcaccgtggtttgcgaacacctgatgccaagtgcaaattgattcttctagaccccagaaacagcctgcctgaattgcgtgaagcgatccctacgaggtttaaggtgtcgtgggaggcttttgccgagggttcccgaaaagtaagagaacatgttgttgaggaaacccaaaggagcgcagctcttcgtaacgctgcgctaaagaaattaggggctaattgctcacatgagggctgcacggtgaaggagaaacacttgctcgatgttcaccaccttagacccgtcgctcaaggcgcaagattaaccacgctcgatgatgtcgttgtcctgtgtaaaaatcatcatgctcaagcccatcatctgatgcgccttgccgatttggagtcggctgagaactaataaattctttaaaaatcaaggcgttagcgatagtcagtgcaagccacccttaattggtgtggttactagaacttgatcacccaagtagcgacatcgaggcgcgtgcaagccacctttaatttgtgtggttactagaacgttatctctgtcctagcaagtttaggcaaagtgcaagccacctttttgtgtggttactagaacgactacgccctagcaatagacccccaagaagtgcaagccacctttttgtgtggttactagaatgacaggttcacttgcacgctcggtatcttggtccaagccacctttaatttgtgtggttactagagcatccagtgactgagcgttaccagatcgtcagtacaagccacccttaattggcgtggttactagaacttgagaagattgagtaagtcattcattgctgtgcaagccacctttttgtgtggttactaaaaagaagcgccccttaagcggaaaaacgacaagctcaagccaccctcaattggcgtggttactacaatgaccatgcgtatgacgatgacgccgtggaggtacaagccacctttttgtgtggttactagaactacatgatgaaggatagtcccgtcttgaccgtttaagccacatttaatttgtgtggttactagaatgtgactgtattctcattacaagccgccataggtcaagccacccttaattggtgtggttactagagaaagaaaatggtcgtggataccgactcgtttgtgtaagccacccttaattgacgtggttactagaacttaggtacaaaaaacgtagccgtaacgaaagcgcaagccacctttaatttgtgtggttactagaacgacgagcagacgctgggcgaggtcgtcgtggtccaagccacccttaattggcgtggttactggaacatggatgatgaccattgttggcatcgagtcgatcaagccacctttttgtgtggttactaaaatatgtttggacctgtgccgttagcagtccacgcgtaagccacccttaattgttgtggttactagaacttgatgatcttggttaccttggtatggtcagctcaagccacctttttgtgtggttactggaacaatcaaggcgtagcaacgacctttcgatttttacaagccacccttaattggtgtggttactagctcatttagaggtggggtttggtttctttcccggtattcttgccccacgcatgatcccaagtgcgtgccctaagttttctaatgcacggagtcggcgcattgctagtgcccgttctgttcgcgctttgcgcgtttcattgccgtggatggttttagcttcagcgcaacgctgtcggccttgctcagttcgaggcccggtagcggacccaccgtgaaatttacaccacgcccggccagttaaagcgggggccttgcatcgttctttggttcgacgcgatgtaccctcgcattgtctacaaacgatacgtccgcctgctgttgtaaatgtaaagttatttgacattgatttgcactcggttaaggggtcaagaggggcttaattttttgattgagcacaggtctccgtgtgccggaggagaaatgcacctctcttgagtggtactgaaggtggctgtctaagagaggtaccaccgctgtagccctcgtgtttattgggtttgcgctgtttagtggcacctttgtgcttatatctaataaatatttataaatagcagtatccatatggctacccctctttgcgtttgatcgagcttaagaaagttaggtaactggtaccactggtaccacggcatttgtttttgattgtcccgccaaagctgcatttatggcgtgtaggtccggaacaaaatgacgtccacctttattggtaatttgaggcttttgacccccgttgtatttacgtatagcacttgcaagtttcatggtctgtccctttgttgggtgctcgatataaatctttccgcatatgtctttcatcaactcagctgaccaagttgtacatccattgaaggggtacttatctaaaagagcttcaatatctggatcactaaccatgaattgctcactgtattgattcagcatcgctacctcttgctgacttaaataccatttttcaccagcctgataccaagtttttacttcagcccaaagttgttgatagtcgatagtttcgtcacgaagaattccatctacgtcaatgggccagaatcttctatttccagtcaagtcatgcaagaactgaaaatcattaacggttccagcaaatacagtgcgccttggaaagttggaatccttccgtgtaaatggtttcctgagagtgtcagatacttttgtaacaaaagcctttaattgtgcgatttcggcttttctgaatgttgcgtcaagttcaccaagttcgacaatccaatgactaaccgcagtcataacgctgtctttgtcagctgggtttaatgtttgaccttctagaaacacaccttcgatgccagaagctaatgctttgattaaggttgtcttcccaacattttgtacaccactcaaaactatcattccagcgttggcaatccctttcggttcgtaagcggcagcgactgcttgaattaaccacttacgccaaaacaaatcggcaagtactggattgccgcactgaatctgccctgtaaattgcgtaaatctactaatgccgtcccatggcttggaatcaatgtaagtctggacggggcaaaagggattttgtgaagcaattgcgtcaagtagttcaggaattcttgcagcagtcatgcccgacttgatcgcatagtctgtaacagttgtaagtgatgtattgtctgattcatccagtacgcatttaagaccggggacaataaactctccgcgtttgaaaatctggttatagcgtgctgagatgccataggtcaatagcacagcgattaagttatccgtaacttgaagcggtttcttcttattattcaatatgggaaaactgataggtcctttgctcaattgatttggtgacgtcgttccaaatgcaacctgtaagttatggtcctcttcaaatacgacatcgttggttgtcaaccctgcaatttttattagatgtctaactccataccctgaaggtcgatgcgctagttcacgtaaagaacgatcaaactttttatcgacttcagttgcatcatgttttatgtagggctgcccccaaaagtctcctttactgaatctttgaaaagtttcacggcctccctctccatatacgcgcgctaggacgtttgctacgtcaaaccaagttggttctgatgtgcaatcaataaacccaagcaccgtgtgtaatgagtcagacgtcaacctagagtagttcgagactgtatttacatcaaaggattcgctatcaatttctgacgattcgcttttaagttgatccggttctgggtatctcttgaggatgtcatcaacattaagagacttaccgccaaaatgaaaaatctctgcatctggacccggcgcgtagacaggctgctcgttttgataaaccgatttatcaaatttaatcgcatcatcgccatagatattcttgaacatccgttccaacgatttacctagtgcaattgcttccgatctgctgacttcacggctaagttcaaatataactcgacacctaggcttgtcttcttgatgactccatgttgtgtagccaaatgcacgaattactgacagatcagaaatgaattgctcgaatgcctcccgatctctaaaaccgtcttcgtctgtcgctagtatccgtctcatttgcgagtgactagctaaacgatagtgtgcatcttcagggtaatcatctttcctatcgtgtgctccgaatgacaatgggccacagatataggtagaccctttgctggggcttctgtcagcaaccacagctagttcaaactggtcgaagttatcggctgttctctgttctggagcgttgtcgtagttatcacgtccgcgtgagtagcggattttttggtttctattggtagtcatttgtaaaaatcactccaatcagaatcgtgttcattaaaggtcgtgttttcgccgtcgtaaccctgttcggcagcgttcatcgcttgtatttttgaggtaaaactacccttaataaactcgtcgccgcgtcgtgcccaccaccggccgtcttttcgtttaccaacaactaaaccaataccgttgattcgcttccaagtgttacctttggctgatgtcgcccattctgtgtcgcatgtggggtagttcatactgagtcccccattttttcgctcagccaagcatcgactagattactaggccatccagtacttctagctgttaattggattggttttggaaaagacttttcccttactaacttataaatcgtagagggttttagtccggtgatttcgcatacttccttgatgcgatgaatttttaaatctgacatttattactccatataaatctgtgaagcaccattgcttcacttggagtaatttagaaaaagttactcgctgctaccgggacagcgaaaattaaattgaattctttagcttggtcagtctgtctttgaggccggatattttgaatatgcgttcatcgttgctgagcctaatctcgttcagcgagtcgtccatgctatgaattacaccttttccaatttgctttcgcaattcgcgttcaaactctttttggctgatgcgtggactagctctaacaatgtcttcttgtaacttctcaaatgctttttttttgtgtctgtgtgaggcgttgtgtgactgtatttctgaggcaattttttgaccttcttcaattgagccaagttgagtcgcctctgcaagtgcgccttgaacatcatttgcaagcaatttttctataatcttatccgtcctactgcttacaggcgtgtgcacatacatgtgcatccaaataccctgacttcgcaataccacatcgttaaatgtgatttttgagttcggccattcagggtcttccgctcgaagatgtcccatgtataactcgattaaagtctttgtccaacgcttggcaagatggggcggagggggcgaggcttcaatcttgtttagaaaattttcaagccgaatttgccgttcaatgcgaatatcttgtctcatgccacatttctcatggggatgacgttataggttggttttccatcacaccaatcagcaaaccactgcatgattcgtattctttcttccatgaagtctgagcgtaaataagacgctcggactcgattagtttcttgatgatctagctgcctttcaattgcatcgcgattaaacccattttcattgaggacgtttgtaatcaggcttcgcatgccatgcactgtgaccttgaaccctagcctgtgcagtgccaggcgtaaagtgttttctgccatgtagccatatttgcctgtgctaggaagaacatagctttctggctttctaaaagtgagcggttccaatatcccgaatacttccactgcttgtgtaggcagaggcagcttgaattccttgcctgatttcattcttgcggctgggactgtccatattcttttttctaagtcgatctcagaccatctggcgccacgtatagagttatcgcgtagtccagtgtagagggccagcttcaatgcacataccgttttgatgtcaagctgctgctctacttggcttttgtttaatgccaccatcagttgtggtacccgctctttgggtaacgcatcaaaatgcttgaccggtggtttcttgaaatatgggttgtcgctcatgtctctggcagggttactagttgccctatgcgtagctcgggcgtaggaaaaaatctgacctgcaattgttcttgttcttgccgccgagacctttgtgcccttatcgtagatttttttgatgacggtgtacaagtagggttcggtaatcgactcaatgggtaacttggcaagatcgggcagcagaaagcgtctaagtagcccttcgttacgttcatagtgagtgccactccagtcggacttattgtgttcaagccattcatttgctatcaatccaaaggtgtttcctcctttggttatttgcttagttttagctatccgcttggaggtagaggggttatttccttttgagacctcctgcctagcttctaacgccttggctctggcaatttgcagactaacggtcggataggcgccaagaccagtagacatttccttaccgtcaagtctgtatctgtatatccaagtgcgacttccatctggtcttatacgcatacgcaagcctgcgccgtcattcaagtaatagatggccgacttggcctttgccgacttacatgctgcctcgcttaatagtttttccgctgccataaccattctcctcagtacccgttctggtacccaatcttaagatggcttctggtaacttgcaatagacgacggtgaagtaaagtgcccgtatttattggatttcaagagggaaaatagatttcagtagagtttgatgaagttaagttcggcgcacttcgtttccgccaaacaactataaaaagccgtggctcttccggctcttccggctcttccccataaacgggggatgggcattcactaaacacgattgattactccattccaaccgcattgtgccaatacacgtaagcggtaattttggaagtttctaaacccaaacgctccccttgatctagttaatcacctaaatcatcgtctatgggtaaatcttcaaaaggaatgcctcaatgctgtttgcgacttcttcatatgcgttgtaatacatgtgaaatccactcctgcatgggtcttgaggttcaggc

SEQ ID NO: 54 - DNA, 18179 bp, Artificial Sequence
  Synthetic Oligonucleotide
  misc_feature (1)..(3632): n is a, c, g, or t
nnnnnnnnnnnnnnnnnnnnnnnnnnnnnnnnnnnnnnnnnnnnnnnnnnnnnnnnnnnnnnnnnnnnnnnnnnnnnnnnnnnnnnnnnnnnnnnnnnnnnnnnnnnnnnnnnnnnnnnnnnnnnnnnnnnnnnnnnnnnnnnnnnnnnnnnnnnnnnnnnnnnnnnnnnnnnnnnnnnnnnnnnnnnnnnnnnnnnnnnnnnnnnnnnnnnnnnnnnnnnnnnnnnnnnnnnnnnnnnnnnnnnnnnnnnnnnnnnnnnnnnnnnnnnnnnnnnnnnnnnnnnnnnnnnnnnnnnnnnnnnnnnnnnnnnnnnnnnnnnnnnnnnnnnnnnnnnnnnnnnnnnnnnnnnnnnnnnnnnnnnnnnnnnnnnnnnnnnnnnnnnnnnnnnnnnnnnnnnnnnnnnnnnnnnnnnnnnnnnnnnnnnnnnnnnnnnnnnnnnnnnnnnnnnnnnnnnnnnnnnnnnnnnnnnnnnnnnnnnnnnnnnnnnnnnnnnnnnnnnnnnnnnnnnnnnnnnnnnnnnnnnnnnnnnnnnnnnnnnnnnnnnnnnnnnnnnnnnnnnnnnnnnnnnnnnnnnnnnnnnnnnnnnnnnnnnnnnnnnnnnnnnnnnnnnnnnnnnnnnnnnnnnnnnnnnnnnnnnnnnnnnnnnnnnnnnnnnnnnnnnnnnnnnnnnnnnnnnnnnnnnnnnnnnnnnnnnnnnnnnnnnnnnnnnnnnnnnnnnnnnnnnnnnnnnnnnnnnnnnnnnnnnnnnnnnnnnnnnnnnnnnnnnnnnnnnnnnnnnnnnnnnnnnnnnnnnnnnnnnnnnnnnnnnnnnnnnnnnnnnnnnnnnnnnnnnnnnnnnnnnnnnnnnnnnnnnnnnnnnnnnnnnnnnnnnnnnnnnnnnnnnnnnnnnnnnnnnnnnnnnnnnnnnnnnnnnnnnnnnnnnnnnnnnnnnnnnnnnnnnnnnnnnnnnnnnnnnnnnnnnnnnnnnnnnnnnnnnnnnnnnnnnnnnnnnnnnnnnnnnnnnnnnnnnnnnnnnnnnnnnnnnnnnnnnnnnnnnnnnnnnnnnnnnnnnnnnnnnnnnnnnnnnnnnnnnnnnnnnnnnnnnnnnnnnnnnnnnnnnnnnnnnnnnnnnnnnnnnnnnnnnnnnnnnnnnnnnnnnnnnnnnnnnnnnnnnnnnnnnnnnnnnnnnnnnnnnnnnnnnnnnnnnnnnnnnnnnnnnnnnnnnnnnnnnnnnnnnnnnnnnnnnnnnnnnnnnnnnnnnnnnnnnnnnnnnnnnnnnnnnnnnnnnnnnnnnnnnnnnnnnnnnnnnnnnnnnnnnnnnnnnnnnnnnnnnnnnnnnnnnnnnnnnnnnnnnnnnnnnnnnnnnnnnnnnnnnnnnnnnnnnnnnnnnnnnnnnnnnnnnnnnnnnnnnnnnnnnnnnnnnnnnnnnnnnnnnnnnnnnnnnnnnnnnnnnnnnnnnnnnnnnnnnnnnnnnnnnnnnnnnnnnnnnnnnnnnnnnnnnnnnnnnnnnnnnnnnnnnnnnnnnnnnnnnnnnnnnnnnnnnnnnnnnnnnnnnnnnnnnnnnnnnnnnnnnnnnnnnnnnnnnnnnnnnnnnnnnnnnnnnnnnnnnnnnnnnnnnnnnnnnnnnnnnnnnnnnnnnnnnnnnnnnnnnnnnnnnnnnnnnnnnnnnnnnnnnnnnnnnnnnnnnnnnnnnnnnnnnnnnnnnnnnnnnnnnnnnnnnnnnnnnnnnnnnnnnnnnnnnnnnnnnnnnnnnnnnnnnnnnnnnnnnnnnnnnnnnnnnnnnnnnnnnnnnnnnnnnnnnnnnnnnnnnnnnnnnnnnnnnnnnnnnnnnnnnnnnnnnnnnnnnnnnnnnnnnnnnnnnnnnnnnnnnnnnnnnnnnnnnnnnnnnnnnnnnnnnnnnnnnnnnnnnnnnnnnnnnnnnnnnnnnnnnnnnnnnnnnnnnnnnnnnnnnnnnnnnnnnnnnnnnnnnnnnnnnnnnnnnnnnnnnnnnnnnnnnnnnnnnnnnnnnnnnnnnnnnnnnnnnnnnnnnnnnnnnnnnnnnnnnnnnnnnnnnnnnnnnnnnnnnnnnnnnnnnnnnnnnnnnnnnnnnnnnnnnnnnnnnnnnnnnnnnnnnnnnnnnnnnnnnnnnnnnnnnnnnnnnnnnnnnnnnnnnnnnnnnnnnnnnnnnnnnnnnnnnnnnnnnnnnnnnnnnnnnnnnnnnnnnnnnnnnnnnnnnnnnnnnnnnnnnnnnnnnnnnnnnnnnnnnnnnnnnnnnnnnnnnnnnnnnnnnnnnnnnnnnnnnnnnnnnnnnnnnnnnnnnnnnnnnnnnnnnnnnnnnnnnnnnnnnnnnnnnnnnnnnnnnnnnnnnnnnnnnnnnnnnnnnnnnnnnnnnnnnnnnnnnnnnnnnnnnnnnnnnnnnnnnnnnnnnnnnnnnnnnnnnnnnnnnnnnnnnnnnnnnnnnnnnnnnnnnnnnnnnnnnnnnnnnnnnnnnnnnnnnnnnnnnnnnnnnnnnnnnnnnnnnnnnnnnnnnnnnnnnnnnnnnnnnnnnnnnnnnnnnnnnnnnnnnnnnnnnnnnnnnnnnnnnnnnnnnnnnnnnnnnnnnnnnnnnnnnnnnnnnnnnnnnnnnnnnnnnnnnnnnnnnnnnnnnnnnnnnnnnnnnnnnnnnnnnnnnnnnnnnnnnnnnnnnnnnnnnnnnnnnnnnnnnnnnnnnnnnnnnnnnnnnnnnnnnnnnnnnnnnnnnnnnnnnnnnnnnnnnnnnnnnnnnnnnnnnnnnnnnnnnnnnnnnnnnnnnnnnnnnnnnnnnnnnnnnnnnnnnnnnnnnnnnnnnnnnnnnnnnnnnnnnnnnnnnnnnnnnnnnnnnnnnnnnnnnnnnnnnnnnnnnnnnnnnnnnnnnnnnnnnnnnnnnnnnnnnnnnnnnnnnnnnnnnnnnnnnnnnnnnnnnnnnnnnnnnnnnnnnnnnnnnnnnnnnnnnnnnnnnnnnnnnnnnnnnnnnnnnnnnnnnnnnnnnnnnnnnnnnnnnnnnnnnnnnnnnnnnnnnnnnnnnnnnnnnnnnnnnnnnnnnnnnnnnnnnnnnnnnnnnnnnnnnnnnnnnnnnnnnnnnnnnnnnnnnnnnnnnnnnnnnnnnnnnnnnnnnnnnnnnnnnnnnnnnnnnnnnnnnnnnnnnnnnnnnnnnnnnnnnnnnnnnnnnnnnnnnnnnnnnnnnnnnnnnnnnnnnnnnnnnnnnnnnnnnnnnnnnnnnnnnnnnnnnnnnnnnnnnnnnnnnnnnnnnnnnnnnnnnnnnnnnnnnnnnnnnnnnnnnnnnnnnnnnnnnnnnnnnnnnnnnnnnnnnnnnnnnnnnnnnnnnnnnnnnnnnnnnnnnnnnnnnnnnnnnnnnnnnnnnnnnnnnnnnnnnnnnnnnnnnnnnnnnnnnnnnnnnnnnnnnnnnnnnnnnnnnnnnnnnnnnnnnnnnnnnnnnnnnnnnnnnnnnnnnnnnnnnnnnnnnnnnnnnnnnnnnnnnnnnnnnnnnnnnnnnnnnnnnnnnnnnnnnnnnnnnnnnnnnnnnnnnnnnnnnnnnnnnnnnnnnnnnnnnnnnnnnnnnnnnnnnnnnnnnnnnnnnnnnnnnnnnnnnnnnnnnnnnnnnnnnnnnnnnnnnnnnnnnnnnnnnnnnnnnnnnnnnnnnnnnnnnnnnnnnnnntttttttttaatgatacggcgaccaccgagatctacactctttccctacacgacgctcttccgatctgcgcgatctgctcggcaacaacgccgaactcacgatcaagctggttccgcccgtggtggatatggattcctatgtttctccgctgccgcccgcagaagccgccaaagtgacgatgatttacggcccggacattgcgccgttgccgacactgactccgttgcccgccaagctggctggtgaagtcatgctcaaattgggcaacgaaatcaccaccgatcacatccagcctgcaggcaaatatttgtcgctgcgttccaacgccgacgagtacgcgaagcaagccaccttcgtgcaagtcgataagacattcagcgcacgcgccgcagcagtgcgcgatgcgggcggtcacggcttcatcgtggcgggcgacggttacggcatgggcagttcgcgcgaacacgccggtctgtgcccgcgtatcttgggcatccgcgccatcgtggccaaaggcttcgagcgtattcacctggccaatctcgccaacttcggtatcgttggcttgaccttcgagaacccggctgatctggatcgcatccagcaaggtgccaaggtgtcgctggacatgaacacgctggatagcggcaatctcaagctggtggtcgaaggcttgggcgatattccgctgaagctcgcgcagggcaaggaagacattcctatgatccgtgccggtggcgcgctttcattgtttgccagccagcaagcggcttaactaaataccgatgatcgattgacgtaggtcgggctttagcccgacttgtcgggttaaaacccgacctacataactttaagagagaaaatcatgagcaaacccatcatttactggaccaaggttgacgaagcgcccgcgctggcaacctattctttgttgcccatcgtgcaagccttcaccaaggcagcgggcgttgatgtcgagacccgcgacatctcgctggctggccgcgtcatcgccaatttcccggacaatctgaccgacagccaaaagctgaatgacgatctgacttggttgggcgaactgacgctgaagcccgaagccaacatcatcaagctgcctaacgttagcgcctccgtgccgcaactgaaagcggtcatcaaggaattgcagtcgcaaggttataagattcccgacttccctgagaatcctcagaacgatgccgagaaagcactcagggtacgtttcggcaaggcgctcggcagtgcggtaaacccggtgttgcgcgaaggcaactccgaccgccgcgcggctctgtcggtcaagaattttgcacgcaagcatccgcaccgcatgggcaaatgggcagctgattccaagacccacgtggcgcacatgacggccaatgatttctacggcagcgaaacatcggttaccgtttctgaagcgggtcccgtgcgcatcgagttcgtcggcgcggacggcaagaccagcgtgctgaaagaaaaaaccacgctcaaagcgggcgaagtgatcgactcttgcgccatgaacgtgcgcgccttgcgccagttctttgccgaccagatcgaagcagcaaagaaagagccgaacgtgctgctgtcgctgcacctgaaagccaccatgatgaagatctccgatcccatcatgttcggtcacgccgtctcggtgtatttcaaggacgtgttcgacaagcatggcgcgacgctgaaagaactcaacgtcaacgtgaataacggtttcggcgatgtgttggccaaagttgccaccttgccagaagccaagcgcgccgagatcgaagccgacattcaagcctgcttcaagaagcagccgcaactggcgatggtgaattccgacaaaggcatcaccaatttgcacgtaccttcggacgtgattatcgacgcatccatgccaccgatgatccgcgacggcggcaagatgtggggcgcagacggcaaggcttacgacaccaaggccatgatccctgaccgcaactatgcgggcgtatttcaggccaccatcgacgattgcaaaaagaacggcgcactcgatccggtgaccatgggttccgtgcccaacgtcggcctgatggcgcagcaagccgaagaatacggctcgcacgacaagactttcgaagctgccggaaacggcgtgatccgcgtggtggatgccgcaggcaaaaccttgctggagcagaaggtggagcagggcgacatcttccgcatgtgccaggttaaagatgcgcctatccaggactgggtcaagctggccgttactcgtgcccgtctgtccaacaccccggccatcttctggctggacaagaaccgcgcacacgacagacagatcatcgccaaggtcgaaaagtacctcaaggatcacgacaccagcggcctcgacatcaagatcatggaaccggcggatgcctgccgcgccacgctggaacgcgcgcgcaaaggactggacaccatctcagtcaccggcaacgtgttgcgcgactacctcaccgacctgttcccgattctggaactgaacaccagcgccaagatgctctccatcgtgccgctgatgagcggcggcggattgtttgaaacaggcgcgggcggctctgctcccaagcacgtgcaacagttccaggaagaaggctatttgcgctgggattcactgggcgaattcctcgcgctcggcgtgtcgctggagcatctggcacaagtgttcaagaacgccaaggcgcaagtgctggccgacgcgctggacgaagccaacggcaaaatcctcgacaacaaccgttctcccgcccgcaaggtcggcgagatcgacaaccgtggcagccatttctacctcgccatgtactgggcacaagctttggccgcccagtccaaggacaaggacttacaggcgaaatttgcaccgctggccaaaacgctgaccgagaacgaagcaaagatcaacgccgaattgctcgcagctcaaggcaagccggtggacatgggtggctactaccaccccgactttgccaagacttccggcgcaatgcgccccagcgcaaccctgaatgccgccttggcatccatcgcctaagaaacacctggggaggagaaacaccgacgctagagcgggacaaaactaaaaaaactaatggccggggaaacccggccatttttttttatgcgaactccgtgggaacgcccgtcaataggcgatctacgttatgcgattgatggagattggctattgacgggcgttgcggggcagcgggtatattgaaatcggaaaaaacataaacacaaagtagcttcaaaacagttggcctatatattcttgaacgtggaaagttgcgggctttgctgttagattgcgcggggcgaaaacggggcggttgtatgggggtgtcgttggtgcaagaacatcgtaaacccaatgacgctatagagttgtagtgaaagaaggattgccgatggacaaaatcaaagtaaccgcgcacctgatttcaccgcttgtcacaggcggtggttatatgacgctcgatggcctgctggcggctctgttgtttgatgaactgcaagacgtggaggcggcgcacgccgcaatcccgatccagcaaacggacggcttgtttcatgccagcgccgccatcatggaagcctcgcgcgaacatatttccttcatcgcggcattgcgtcccgaccatagcctcgaccccgagctgattttgaaaaataaacacgggcaagtgcatcgcaagttcgactcctcgctgaccaatgtgatgaacagctacgccatgctgaccgcgccgacggtgacctggtatgccgaaggcgatgcagatcgcattcagcgtttgcttgcgcccgtgcaattcatcggcaagcggcgcgcctccggtttcgggcgcgtgtcgcagtggcaggtcgaagcggatgaactggatggaattgttggcccgttcggtgagccgttgcgacccgtgccaatcgccttattcaaaggcgacacctcgcacccgatggttgatgccgcgtggcggcctgcctactggaatcccctccaccgcaccgcgtgttacgcccccgtctgaggagaagcgatgctggatttcttcaacacccacttcgggcaatatctggccgaaccaacgggcgacccggtagccgatgctcgccatgccctgtcatccggccgcaccatgaaaaaaggcggactaccgcaacgcatcgcttccggctgggcagtggtcagacccggcaaatcaaccatgcagtttgaactcgccgcgcaaggcatcgcatacagcaaacaaacgcgctacgaagcttttctggcagagcttgaaaactggaacccgaactctccgcgcatgttcatcgaattcagcaaaaaacccgtgccggtcggcaacctgttccgcaccttcgatctgcgccaagtgcgcatttgttcttcagccggagtcgagacattcgacttcacccagccgccggaaaaagacggctgcaagacacacaaaattctttggaagatgaagaaggagaacgcgtgatggacttcgttatcagcaaaccgcccaccgtgcgcggctacgccctgcaccgcatcgccgccggattggtcggcgaagaaaaagtgctgttcgcggattgcggcgaccatatcttgctgcgcaccgacaaagtgctggatgccgaacagcgtgttatgcgcacgatcaacacgggcgaaatcatcggcttcgagttgcgcgcctgcgtcggcaaaaaagtcaaaggcaagcaccactactttcacacgtcggattggcgcagcaggcatgaatggttggcgcaacaaggcgaacaacacggcttcaccctcatcaccgttcactgcaccgcagaaatgctggcggtcaatgcgggcgaacgcaaattcaccgtcgatcaaaccgacttcgttggcgtgctgaaagtcaccgatgtcgaacgtttcaaacaagcagtctcaactggaatcggcagcaaagccaaagcattcgggtttggcatgttggtcatttaacgaaaggaaacgcattgtgaaaaccatcgtcatcaacgccaccctcaccaccgttggcccgctgtcaattaggctgcccgaagcggaagggcatcaacccaacaagttcaacaactttcccgtcgtcacgcgcggcattgacgaagacggcaacaaacaacaaaccgcttacctgcccgccaccacgctgcgcggatttctgcgccgcgccatcgtcaccgaacaaatgaaacaggccgcagcggcgggcacgccttacaccctgcaaaaagcctacgccgacctcatcggacaagatgccgcttccgaagccaaggacaacatcgacctgctcaagctgcaacagacccgcgaggagaatgccattctcgatctgttcggctcgggtttgggcatcaagtcgcggctgctggtttcgcacttcatgccgacacacaacgtattgcccgaagtcaccaccggcgtgcgcaaagatttggaagacaccgacggcgtgctcgacttgttatccgaaaacgaccgcgacaaatatctgggacgctccggcgcgaacagcaaacgctctgccgccttgtcggtggtgaaaaatctggaaaccaaaattcgcaaagcaaaaaaatccggcgacgatctggccgaactggaagccgcgctgcaagaagcgcaaggcgtggtggaccgttatgtggccgacatgggcgacatgaccaactcatcgcgcacgctgaccaactactacatcctgcctgcgggcattgccctcaaaggacggctggtgatcgagaaagcgaaagaacgcgacctgccgatgatagaactggcgctgaacgaactttcgaagcgcccgattctgggcgcacaaagcgcgcgcggctgcggggaattagaaggcacattcgatgtgctggtggatggcgtgctcgttaaaaaaattagcattggcgggtgggatgaggcggttgtgacagatttttccggggagagtgtggggagagctgttggctagtcagcggttttttgttggggatgattaagccactttgggttggggtggttactagaacaaaaacggcaaataccacatcgccaactttgattaagccacaccgggctggggtggttactagaaattctggaacgcaacgcgcggcatgtgttgttgggattaagccactctgaggtagggtgattactagaattacacgttacccgtgccttcgatcagcggcaattaaaccattccgggttggggtggttactagaactagcttggcaaatgtagcccgtccgccttgattaagccaccccgggttggggtggttactagaacatgtccgtcgccatcgtgctggccgtccacgattaagccactctgggttggggtggttactagaactgatacaccttgcggttcgaggtttgcttggattaagccactctgggttggggtggttgctagaacgtgggaaagcagggttgtcttttacaaccggattaagccactccgggtttgggtggttactagaacaagaacacggacacagaactcaggctcgcggattaagccacccgtggtcggggtggttactagaacttcgatgtgttccgccagcggtcgcgcagcgattaagccacctcgtgttggagtggttactagaacttgtataggtacatccggcaggtactcattgattaagccaccccgtgtggttaatgaaaaggaaactcgaatgttccgcagcccagagcaaaccaatttcgccgccatcgtcgccaaacacatggcgatggcggatgcgcctttgttgctggagggcggcacgggcattggtaaaactcgcgcgtatttgtcggcgttggttcagtccgggcgacgggttgccattgttctgcccacgcaccagttgattgaacagatgctggcttcttccgatttagcggccacgcgcggtgcggccacggtggcggcgttccggcctgcgcggatgtttgagcggcgggtcgattacgaggccaacaagcgcgcggcgatggaggcgcagctgatgttttgcacggcggccagcgtcatcatcgaccagcgtttgggcggggaatacaacggcgctacgctgcgcgactacatcgtgtttgacgaggccgaccagttgcctgacatggcggctttgcaaagcggcttcacgatcagccaggccgatctggccgaaatgggtatccgcctaaccacggtgagcgatgctttgcaggcgattctggcgaagccgccgcgcgtggttgagccggaaatcaaagccgctgcgcgcatcattctcgatgtcatcgctgaaccggcgtggtatcagaaggctggtttgagcgacgagggcgacattgtgctgacgcacaaactgcccggtcgtttgttaaagaagatcagcaatcgcggcaatgtggcgttcgtgtcggcgacgctgacggtaggcggacgcttcacggattttcagaattcgatggggatagacagcatcagccgcttgtcctgcgcgattgaaccggagcggcatggcacgctggattttcagatgatgccgctggagattgatacgccggaatggatagacgctgtcgtgcaagtggcaaacgacgcgcccaagccggtgctggtcgccacgccgtcgcacgatctttcgagcttgctcggcgaacgtttgccgggtgctgtggtgaggtctgtcgaagaaaccgcaacacaggccgccgagcgtgtgggtgcggatggcattttcgtttctgccggtgcatgggcgggtctggatacgcccatgcgctggcgctctatcatcgttccgcgtgttccattcggccagccggtggtgatcgacggtgaaaccacgaccagttatttggatgcgcgcaatacggcggtgcgccgcttgcgccaagtaatcgggcgcgggctgcgcacaccggacgcggtgtgcagcgtttttattctggatgcgcgagcggaaaagttgagcggcttcgtgccggagcgtttctccgccgcatggattggccgcacgtttgtggagggtgcgagaaaagaatttgttctatccaaagccgagcgcgacccggcagtgcgccgtgcggcgttgaagcactatggtcggaagtgcaaggagtgcggctttgtgccgaaggtggattcgcaacttgacgtgcatcacctcaacccgattgccgaaggacaacggcaaaccagaatcgaagatgtggtggtgttatgcgcgaactgccaccgcttggcgcacgcgatgttataacgcatcaaaaaacaggtttttaaaaacacctcttcgccgcaagccaataaatacgccactctccatcaatcgcatcacgcagagcgcctattgacgggcgttcccatgaggtcaggcatgtctttccgattaaaaaacgcgcagtgatgtaatcccttgtgttgacgtgtttgacgaaccagtcggtcaatccggcttcgatgaaatccagcactcgatggagaagtgcgtgtttatgggtttggtgcgtgttgaagattgatgttgacctatctggttttccgggtaatggtgggttggtgtaagatgagttttctggcgaaagagtcgtgttttagcgcagccgggcaatgaaaaatgaaaggagttgaacatgtctaatctaaccattcacaaccttgaagattcggttacccaaaatctgcgtgcgttagctcaacaacatgggcattcggtggaagaggaagtgcgacagattcttcgttcggctttcttcgaggcatcgcgcaacacaaacaaactcggcagcaaaatctcccaacgctttactgagctaggcggaatcgagcttcctcaacccaatcgttcattgccgcgtcagtcaccaaactttggtgatgccaattgattctgctcgatatttttattcgcggtatccccgttcgttccttcggttgtttcttcaaagaggtgttgacattttatggttggtggttatagtaaccaccaatggtgatgaatatgtttttcacactgtcgagtagctctttataattctaacgccgagatggcgctgaaaggaaacgctttgaatagcaagcaaattattaaattactggaagcggacggctggtcattgcgcagcgtgcgcggcagccatcacgtttttacccaccctgctaagcccggtcacataagcgttccgcaccctaaacaggatttgggcgtgggcttggtgcataaactgctgaaacaggcggggcttaaatgagttaaatgagagataaacatgaaatttattatcgcgattgaaccaggcacaaatacaactgcatttggggttgttgtacccgatttgcccggctgcttttctgccggggataccttggacaaggccgtagacaatgctcgcgaggcgattgatttatggtgcgaaaccgtaattgaagacggcggggatattcctgttgccaagagtttgacagagcaccgcagcaaccctgaatttgagggctgggtgtgggcggtggttgaagttccggttgagcgttattttggcccagcagaaaagctcaacattactttgccgcgtttattgcttgccaagattgacgaatacacgcgtgctcacggtgaaacacgttccggctttttggctgaagctgctcgcgcagctatgcgctagcatcaaaatttctgggttaagtctgctttgtaccattagcaaagacccacaaaaatggccgatatatatcggccatttttttatgtgatgccatccgtttcagacggtatccatccaatactgcttaccccaacaaatgcttcaccatgtcgcgttcacccagcagttcgctgtagctgtccatcatgtgtttgcggttgagttcggtgatgtgcaggtctttgacgatgcagtatttgccgttgaggcaggtgacggggaagccgtacagcacgcctttggggatgccgtagctgccgtcggaggggatgcccatggtgacccagtcgttgtgcggggaattcagcagccagtcgtggacgtgggcgatggcggagttggcggcgctggcggcgctgctcaggccgcgcgcttcgatcacggccgcgccgcgtttttgcacggtggggatgaaggtggattccacccaatccgggtcttgcagtatggccgatactttggttttgttgatttcggcgtgcgagagatcgggatattgcgagccggagtggttgccccagactaccatgtgcttgatgtcgcctgtcggaacagacaatttttgcgcgacctgcgcgatggcgcggttatggtcgaggcgcatcatggaggtgaaattcagcgggtcaatatcgggggcgttgcgcatggtgatgagcgcgttggtgttggccgggttgccgacgaccagcactttgacgttgcgcgaggcgacttcgttgaggatgcggccttgctcggagaaaattgcgccgttagcttcgagcaggtctttgcgttccatgcctttgccgcgcggacgtgcgccgaccagtagtgcgacttcggcatcgcggaaagcgacctttggatcatcggtggtgatgacttgttgcaacaaagggaatacacaatcttccaattccatcgctacgccgcgcaacacttgttgtgctggagtaatgtcgagcaactgcaaaatgatcggttgatcagcgcccaacatgtcgcctttggcgatacggaacaataggttatagccgatttgtcctgctgctccggtgattgctacgcggatcggtgctttcatgcttccctctcttaattattgagatgagtaatctcttttggattaaaaatttgattattaattttccctgagcgaaatataaaatttcggacgcatcatagtcttttgcttttaactcgccaagtctaggagtacgattggctcatcgtatttcgggttttataaaaaaaatgactataaataaaccgataaaaacccgccccaaacacctcgctctccacaaaataaagctgcccctttccggctatgtatccatcctgcaccgcatcagtggtgcagttctttttttggctcttcctttgttgttgctgttgctcgaccaaagcctgcgttccatcgaaacctataccaacctgaccgaatatctggcgcatccgatgttgaaattggctttgctcggtttgatgtgggcgtttctgcaccatttctgcgccgggctgcgttatctggctatcgacttgcacctgctgcccaatctggcagcggcgcgcgctgcaagtgtttgggtgctggtggtcagcctgatcttgaccctcgtattgggagtgacgctatggtgaaccggactgtaaccggcgcgcactacgggctgcgcgattggctggcgcagcgagtgactgcggcggtgatggcgatctacgcgctggtgatcgtcggctatttgttgatgcaaccgtctttcggctatgacacgtggctggagctgttcaccagcaatgtgatgcgcacctttaccatgctgttcctgctgagcctgttctatcacgcttggataggcgtgcgcgacatcgtgatggattacgtgaagccagcgagcattcgtttgttgatacacgtcttggtcattcttgcactggtggtgtatgtgatctggtcggtgcaaatactctggggactttaatggcattgccaaaaagaacatttgatgtggtggtggtgggcgcaggtggcgcaggaatgcgcgccgcgctgacgttgtcgcatgcgggtctcaaagtggcggtgctgtccaaggtgtttccgacgcgctcgcatactgtggccgcgcagggcggtattgccgcttccttgggcaacgtcaacgaagacaactggcactggcacatgtacgacacggtgaaaggttcggactacctcggcgaccaggatgccatcgaatacatgtgccgcgccgcgccggaagtggtttatgagttggagcatttcggcatgccgtttgaccgcctcgacagcggcaagatttaccagcgcccgttcggcgggcacatgcaggactacggcaagaatcccgtgccgcgcgcctgcgctgccgccgatcgtactggtcatgcgctgctgcatacgctgtatcagcaaaacgttaaagccaataccaatttctttgtcgaatggatggcgctcgatctgatccgcgatgcggaaggcgatgtgctgggcgtggtggcgatggagatcgaaaccaacgaagtgatgattttgcaagcgcgcgccacgctgttcgccacgggcggagcggggcgcatcttttcggccagcaccaatgcctatatcaataccggcgacggactgggcatggcggcgcgcgcgggcattccgctggaagacatggaatttttccagttccacccgaccggcgtgtatggctcgggcgtgctgattaccgaaggtgtgcgcggcgaaggtggttatctggtgaacaaggacggcgagcgtttcatgccgcgctatgcaccgaatgccaaagatttggccagccgcgacgtggtgtcgcgcgccatggccacggagatcaaggaagggcgcggctgcgggccgcatggcgatcatgtcatgctcaagctcgaccatttgggcgacgaagtgatacgccatcgtctgcccggcatacgcgacatcgcgctcaagttcgcgcatgttgacccggccaaagcgccgattcctgtagtgccgaccgcgcattacatgatgggcggcattcccaccaactatcacgggcaagtggtcgcgccgcatggcaccggaccggaagatgtggtgcagggtttctacgcggtgggcgaatgcgcttgcgtctcggtgcatggcgcgaaccgtctgggctgcaactcgctgctcgacctgatcgtgttcggccgctctgccgcgcgccagatcatcgaagacctgaaaaacaatcccaacccgaaacccttgcccgccgatgcggcagagcgcccgctggcgcgtttggcgcgcttggagaatcagaaaaatggcgaacgcgtggcggatgtgggcgatgccatgcgcaaaaccatgcaagcccattgcggcgtgttccgcttccccgatctgatggctgaaggcgtgaccaaaatccgcgaagtggcagagcgcgcgcgtcacaccgagatcaaagacaaaagcaaagtgttcaacaccgcacgcgtcgaagcgctggaactggataacctgatcgaagtcgcccaagccaccatgaccgccgccgccgcgcgcaaggaaagccgtggcgcgcatgcgcgcgaagacttccccgagcgcgacgacaagagctggctgaaacattcgctgtactacagcgaaggccaccgcctcgattacaaacccgtgcgcctgaaaccgcttacggtggaatcgttcccgttgaaaccacgcgtttactaggagcgagcagatgaaatttaaaatctaccgctacaaccccgacacggataccgcgtcgtacatgcaggatttcgatctggatttgcaggcgggcgatgccatgttgctggacgcgctgatgctgttgaagcaacaggacgacagtctcggttttcgcaaatcctgccgcgaaggcgtgtgcggttcggatgcgatgaatatcaacgggcgcaacgggctggcttgcatcacagcgctgtcctcgctcaagcagccgatcgaaatccgcccgctgccgggactacccatcatccgcgatttgattgtggatatgacgcagttctttaaacagtaccactcgatcaaaccctatctggtgaacaatgatccgccgccggagaccgagcgcctgcaatcgccgcaagaccgcgaggaactggacgggttgtacgagtgcatcttgtgcggttgctgcaccacggcctgcccgtcgttctggtggaacccggacaagttcgtcggtcccgccgggctgttgcaagcctatcgcttcatcgccgatacgcgcgatcaggacacggcggcgcggctggataatctggaagacccgtaccgtttgttccgttgccacaccatcatgaattgtgccgatgtgtgtcccaaggaactgaacccgaccgaagccatcggcaagatcaaagacatgatggtgaagcggacggtatgaggattgaggaatcaggattgaggattgagagtgacggagatgcggattcgcccaatcctcaatccacaatcctcaatcctgttttcatggagcgcgtgcgctggcgctgtcggcgcggattgctggaactggatattgtgttggggcgctttatcgaacagcgttacccgtcgatggatcacgagcagcgtgtgattttcgacgaattgctggacatgccggataccgaactgtgggatgtgattaccggcaagaaagaagatcggaagagcgtcgtgtagggaaagagtgtagatctcggtggtcgccgtatcattaaaaaaaaa

SEQ ID NO: 55 - DNA, 18179 bp, Artificial Sequence
  Synthetic Oligonucleotide
  misc_feature (1)..(9978): n is a, c, g, or t
nnnnnnnnnnnnnnnnnnnnnnnnnnnnnnnnnnnnnnnnnnnnnnnnnnnnnnnnnnnnnnnnnnnnnnnnnnnnnnnnnnnnnnnnnnnnnnnnnnnnnnnnnnnnnnnnnnnnnnnnnnnnnnnnnnnnnnnnnnnnnnnnnnnnnnnnnnnnnnnnnnnnnnnnnnnnnnnnnnnnnnnnnnnnnnnnnnnnnnnnnnnnnnnnnnnnnnnnnnnnnnnnnnnnnnnnnnnnnnnnnnnnnnnnnnnnnnnnnnnnnnnnnnnnnnnnnnnnnnnnnnnnnnnnnnnnnnnnnnnnnnnnnnnnnnnnnnnnnnnnnnnnnnnnnnnnnnnnnnnnnnnnnnnnnnnnnnnnnnnnnnnnnnnnnnnnnnnnnnnnnnnnnnnnnnnnnnnnnnnnnnnnnnnnnnnnnnnnnnnnnnnnnnnnnnnnnnnnnnnnnnnnnnnnnnnnnnnnnnnnnnnnnnnnnnnnnnnnnnnnnnnnnnnnnnnnnnnnnnnnnnnnnnnnnnnnnnnnnnnnnnnnnnnnnnnnnnnnnnnnnnnnnnnnnnnnnnnnnnnnnnnnnnnnnnnnnnnnnnnnnnnnnnnnnnnnnnnnnnnnnnnnnnnnnnnnnnnnnnnnnnnnnnnnnnnnnnnnnnnnnnnnnnnnnnnnnnnnnnnnnnnnnnnnnnnnnnnnnnnnnnnnnnnnnnnnnnnnnnnnnnnnnnnnnnnnnnnnnnnnnnnnnnnnnnnnnnnnnnnnnnnnnnnnnnnnnnnnnnnnnnnnnnnnnnnnnnnnnnnnnnnnnnnnnnnnnnnnnnnnnnnnnnnnnnnnnnnnnnnnnnnnnnnnnnnnnnnnnnnnnnnnnnnnnnnnnnnnnnnnnnnnnnnnnnnnnnnnnnnnnnnnnnnnnnnnnnnnnnnnnnnnnnnnnnnnnnnnnnnnnnnnnnnnnnnnnnnnnnnnnnnnnnnnnnnnnnnnnnnnnnnnnnnnnnnnnnnnnnnnnnnnnnnnnnnnnnnnnnnnnnnnnnnnnnnnnnnnnnnnnnnnnnnnnnnnnnnnnnnnnnnnnnnnnnnnnnnnnnnnnnnnnnnnnnnnnnnnnnnnnnnnnnnnnnnnnnnnnnnnnnnnnnnnnnnnnnnnnnnnnnnnnnnnnnnnnnnnnnnnnnnnnnnnnnnnnnnnnnnnnnnnnnnnnnnnnnnnnnnnnnnnnnnnnnnnnnnnnnnnnnnnnnnnnnnnnnnnnnnnnnnnnnnnnnnnnnnnnnnnnnnnnnnnnnnnnnnnnnnnnnnnnnnnnnnnnnnnnnnnnnnnnnnnnnnnnnnnnnnnnnnnnnnnnnnnnnnnnnnnnnnnnnnnnnnnnnnnnnnnnnnnnnnnnnnnnnnnnnnnnnnnnnnnnnnnnnnnnnnnnnnnnnnnnnnnnnnnnnnnnnnnnnnnnnnnnnnnnnnnnnnnnnnnnnnnnnnnnnnnnnnnnnnnnnnnnnnnnnnnnnnnnnnnnnnnnnnnnnnnnnnnnnnnnnnnnnnnnnnnnnnnnnnnnnnnnnnnnnnnnnnnnnnnnnnnnnnnnnnnnnnnnnnnnnnnnnnnnnnnnnnnnnnnnnnnnnnnnnnnnnnnnnnnnnnnnnnnnnnnnnnnnnnnnnnnnnnnnnnnnnnnnnnnnnnnnnnnnnnnnnnnnnnnnnnnnnnnnnnnnnnnnnnnnnnnnnnnnnnnnnnnnnnnnnnnnnnnnnnnnnnnnnnnnnnnnnnnnnnnnnnnnnnnnnnnnnnnnnnnnnnnnnnnnnnnnnnnnnnnnnnnnnnnnnnnnnnnnnnnnnnnnnnnnnnnnnnnnnnnnnnnnnnnnnnnnnnnnnnnnnnnnnnnnnnnnnnnnnnnnnnnnnnnnnnnnnnnnnnnnnnnnnnnnnnnnnnnnnnnnnnnnnnnnnnnnnnnnnnnnnnnnnnnnnnnnnnnnnnnnnnnnnnnnnnnnnnnnnnnnnnnnnnnnnnnnnnnnnnnnnnnnnnnnnnnnnnnnnnnnnnnnnnnnnnnnnnnnnnnnnnnnnnnnnnnnnnnnnnnnnnnnnnnnnnnnnnnnnnnnnnnnnnnnnnnnnnnnnnnnnnnnnnnnnnnnnnnnnnnnnnnnnnnnnnnnnnnnnnnnnnnnnnnnnnnnnnnnnnnnnnnnnnnnnnnnnnnnnnnnnnnnnnnnnnnnnnnnnnnnnnnnnnnnnnnnnnnnnnnnnnnnnnnnnnnnnnnnnnnnnnnnnnnnnnnnnnnnnnnnnnnnnnnnnnnnnnnnnnnnnnnnnnnnnnnnnnnnnnnnnnnnnnnnnnnnnnnnnnnnnnnnnnnnnnnnnnnnnnnnnnnnnnnnnnnnnnnnnnnnnnnnnnnnnnnnnnnnnnnnnnnnnnnnnnnnnnnnnnnnnnnnnnnnnnnnnnnnnnnnnnnnnnnnnnnnnnnnnnnnnnnnnnnnnnnnnnnnnnnnnnnnnnnnnnnnnnnnnnnnnnnnnnnnnnnnnnnnnnnnnnnnnnnnnnnnnnnnnnnnnnnnnnnnnnnnnnnnnnnnnnnnnnnnnnnnnnnnnnnnnnnnnnnnnnnnnnnnnnnnnnnnnnnnnnnnnnnnnnnnnnnnnnnnnnnnnnnnnnnnnnnnnnnnnnnnnnnnnnnnnnnnnnnnnnnnnnnnnnnnnnnnnnnnnnnnnnnnnnnnnnnnnnnnnnnnnnnnnnnnnnnnnnnnnnnnnnnnnnnnnnnnnnnnnnnnnnnnnnnnnnnnnnnnnnnnnnnnnnnnnnnnnnnnnnnnnnnnnnnnnnnnnnnnnnnnnnnnnnnnnnnnnnnnnnnnnnnnnnnnnnnnnnnnnnnnnnnnnnnnnnnnnnnnnnnnnnnnnnnnnnnnnnnnnnnnnnnnnnnnnnnnnnnnnnnnnnnnnnnnnnnnnnnnnnnnnnnnnnnnnnnnnnnnnnnnnnnnnnnnnnnnnnnnnnnnnnnnnnnnnnnnnnnnnnnnnnnnnnnnnnnnnnnnnnnnnnnnnnnnnnnnnnnnnnnnnnnnnnnnnnnnnnnnnnnnnnnnnnnnnnnnnnnnnnnnnnnnnnnnnnnnnnnnnnnnnnnnnnnnnnnnnnnnnnnnnnnnnnnnnnnnnnnnnnnnnnnnnnnnnnnnnnnnnnnnnnnnnnnnnnnnnnnnnnnnnnnnnnnnnnnnnnnnnnnnnnnnnnnnnnnnnnnnnnnnnnnnnnnnnnnnnnnnnnnnnnnnnnnnnnnnnnnnnnnnnnnnnnnnnnnnnnnnnnnnnnnnnnnnnnnnnnnnnnnnnnnnnnnnnnnnnnnnnnnnnnnnnnnnnnnnnnnnnnnnnnnnnnnnnnnnnnnnnnnnnnnnnnnnnnnnnnnnnnnnnnnnnnnnnnnnnnnnnnnnnnnnnnnnnnnnnnnnnnnnnnnnnnnnnnnnnnnnnnnnnnnnnnnnnnnnnnnnnnnnnnnnnnnnnnnnnnnnnnnnnnnnnnnnnnnnnnnnnnnnnnnnnnnnnnnnnnnnnnnnnnnnnnnnnnnnnnnnnnnnnnnnnnnnnnnnnnnnnnnnnnnnnnnnnnnnnnnnnnnnnnnnnnnnnnnnnnnnnnnnnnnnnnnnnnnnnnnnnnnnnnnnnnnnnnnnnnnnnnnnnnnnnnnnnnnnnnnnnnnnnnnnnnnnnnnnnnnnnnnnnnnnnnnnnnnnnnnnnnnnnnnnnnnnnnnnnnnnnnnnnnnnnnnnnnnnnnnnnnnnnnnnnnnnnnnnnnnnnnnnnnnnnnnnnnnnnnnnnnnnnnnnnnnnnnnnnnnnnnnnnnnnnnnnnnnnnnnnnnnnnnnnnnnnnnnnnnnnnnnnnnnnnnnnnnnnnnnnnnnnnnnnnnnnnnnnnnnnnnnnnnnnnnnnnnnnnnnnnnnnnnnnnnnnnnnnnnnnnnnnnnnnnnnnnnnnnnnnnnnnnnnnnnnnnnnnnnnnnnnnnnnnnnnnnnnnnnnnnnnnnnnnnnnnnnnnnnnnnnnnnnnnnnnnnnnnnnnnnnnnnnnnnnnnnnnnnnnnnnnnnnnnnnnnnnnnnnnnnnnnnnnnnnnnnnnnnnnnnnnnnnnnnnnnnnnnnnnnnnnnnnnnnnnnnnnnnnnnnnnnnnnnnnnnnnnnnnnnnnnnnnnnnnnnnnnnnnnnnnnnnnnnnnnnnnnnnnnnnnnnnnnnnnnnnnnnnnnnnnnnnnnnnnnnnnnnnnnnnnnnnnnnnnnnnnnnnnnnnnnnnnnnnnnnnnnnnnnnnnnnnnnnnnnnnnnnnnnnnnnnnnnnnnnnnnnnnnnnnnnnnnnnnnnnnnnnnnnnnnnnnnnnnnnnnnnnnnnnnnnnnnnnnnnnnnnnnnnnnnnnnnnnnnnnnnnnnnnnnnnnnnnnnnnnnnnnnnnnnnnnnnnnnnnnnnnnnnnnnnnnnnnnnnnnnnnnnnnnnnnnnnnnnnnnnnnnnnnnnnnnnnnnnnnnnnnnnnnnnnnnnnnnnnnnnnnnnnnnnnnnnnnnnnnnnnnnnnnnnnnnnnnnnnnnnnnnnnnnnnnnnnnnnnnnnnnnnnnnnnnnnnnnnnnnnnnnnnnnnnnnnnnnnnnnnnnnnnnnnnnnnnnnnnnnnnnnnnnnnnnnnnnnnnnnnnnnnnnnnnnnnnnnnnnnnnnnnnnnnnnnnnnnnnnnnnnnnnnnnnnnnnnnnnnnnnnnnnnnnnnnnnnnnnnnnnnnnnnnnnnnnnnnnnnnnnnnnnnnnnnnnnnnnnnnnnnnnnnnnnnnnnnnnnnnnnnnnnnnnnnnnnnnnnnnnnnnnnnnnnnnnnnnnnnnnnnnnnnnnnnnnnnnnnnnnnnnnnnnnnnnnnnnnnnnnnnnnnnnnnnnnnnnnnnnnnnnnnnnnnnnnnnnnnnnnnnnnnnnnnnnnnnnnnnnnnnnnnnnnnnnnnnnnnnnnnnnnnnnnnnnnnnnnnnnnnnnnnnnnnnnnnnnnnnnnnnnnnnnnnnnnnnnnnnnnnnnnnnnnnnnnnnnnnnnnnnnnnnnnnnnnnnnnnnnnnnnnnnnnnnnnnnnnnnnnnnnnnnnnnnnnnnnnnnnnnnnnnnnnnnnnnnnnnnnnnnnnnnnnnnnnnnnnnnnnnnnnnnnnnnnnnnnnnnnnnnnnnnnnnnnnnnnnnnnnnnnnnnnnnnnnnnnnnnnnnnnnnnnnnnnnnnnnnnnnnnnnnnnnnnnnnnnnnnnnnnnnnnnnnnnnnnnnnnnnnnnnnnnnnnnnnnnnnnnnnnnnnnnnnnnnnnnnnnnnnnnnnnnnnnnnnnnnnnnnnnnnnnnnnnnnnnnnnnnnnnnnnnnnnnnnnnnnnnnnnnnnnnnnnnnnnnnnnnnnnnnnnnnnnnnnnnnnnnnnnnnnnnnnnnnnnnnnnnnnnnnnnnnnnnnnnnnnnnnnnnnnnnnnnnnnnnnnnnnnnnnnnnnnnnnnnnnnnnnnnnnnnnnnnnnnnnnnnnnnnnnnnnnnnnnnnnnnnnnnnnnnnnnnnnnnnnnnnnnnnnnnnnnnnnnnnnnnnnnnnnnnnnnnnnnnnnnnnnnnnnnnnnnnnnnnnnnnnnnnnnnnnnnnnnnnnnnnnnnnnnnnnnnnnnnnnnnnnnnnnnnnnnnnnnnnnnnnnnnnnnnnnnnnnnnnnnnnnnnnnnnnnnnnnnnnnnnnnnnnnnnnnnnnnnnnnnnnnnnnnnnnnnnnnnnnnnnnnnnnnnnnnnnnnnnnnnnnnnnnnnnnnnnnnnnnnnnnnnnnnnnnnnnnnnnnnnnnnnnnnnnnnnnnnnnnnnnnnnnnnnnnnnnnnnnnnnnnnnnnnnnnnnnnnnnnnnnnnnnnnnnnnnnnnnnnnnnnnnnnnnnnnnnnnnnnnnnnnnnnnnnnnnnnnnnnnnnnnnnnnnnnnnnnnnnnnnnnnnnnnnnnnnnnnnnnnnnnnnnnnnnnnnnnnnnnnnnnnnnnnnnnnnnnnnnnnnnnnnnnnnnnnnnnnnnnnnnnnnnnnnnnnnnnnnnnnnnnnnnnnnnnnnnnnnnnnnnnnnnnnnnnnnnnnnnnnnnnnnnnnnnnnnnnnnnnnnnnnnnnnnnnnnnnnnnnnnnnnnnnnnnnnnnnnnnnnnnnnnnnnnnnnnnnnnnnnnnnnnnnnnnnnnnnnnnnnnnnnnnnnnnnnnnnnnnnnnnnnnnnnnnnnnnnnnnnnnnnnnnnnnnnnnnnnnnnnnnnnnnnnnnnnnnnnnnnnnnnnnnnnnnnnnnnnnnnnnnnnnnnnnnnnnnnnnnnnnnnnnnnnnnnnnnnnnnnnnnnnnnnnnnnnnnnnnnnnnnnnnnnnnnnnnnnnnnnnnnnnnnnnnnnnnnnnnnnnnnnnnnnnnnnnnnnnnnnnnnnnnnnnnnnnnnnnnnnnnnnnnnnnnnnnnnnnnnnnnnnnnnnnnnnnnnnnnnnnnnnnnnnnnnnnnnnnnnnnnnnnnnnnnnnnnnnnnnnnnnnnnnnnnnnnnnnnnnnnnnnnnnnnnnnnnnnnnnnnnnnnnnnnnnnnnnnnnnnnnnnnnnnnnnnnnnnnnnnnnnnnnnnnnnnnnnnnnnnnnnnnnnnnnnnnnnnnnnnnnnnnnnnnnnnnnnnnnnnnnnnnnnnnnnnnnnnnnnnnnnnnnnnnnnnnnnnnnnnnnnnnnnnnnnnnnnnnnnnnnnnnnnnnnnnnnnnnnnnnnnnnnnnnnnnnnnnnnnnnnnnnnnnnnnnnnnnnnnnnnnnnnnnnnnnnnnnnnnnnnnnnnnnnnnnnnnnnnnnnnnnnnnnnnnnnnnnnnnnnnnnnnnnnnnnnnnnnnnnnnnnnnnnnnnnnnnnnnnnnnnnnnnnnnnnnnnnnnnnnnnnnnnnnnnnnnnnnnnnnnnnnnnnnnnnnnnnnnnnnnnnnnnnnnnnnnnnnnnnnnnnnnnnnnnnnnnnnnnnnnnnnnnnnnnnnnnnnnnnnnnnnnnnnnnnnnnnnnnnnnnnnnnnnnnnnnnnnnnnnnnnnnnnnnnnnnnnnnnnnnnnnnnnnnnnnnnnnnnnnnnnnnnnnnnnnnnnnnnnnnnnnnnnnnnnnnnnnnnnnnnnnnnnnnnnnnnnnnnnnnnnnnnnnnnnnnnnnnnnnnnnnnnnnnnnnnnnnnnnnnnnnnnnnnnnnnnnnnnnnnnnnnnnnnnnnnnnnnnnnnnnnnnnnnnnnnnnnnnnnnnnnnnnnnnnnnnnnnnnnnnnnnnnnnnnnnnnnnnnnnnnnnnnnnnnnnnnnnnnnnnnnnnnnnnnnnnnnnnnnnnnnnnnnnnnnnnnnnnnnnnnnnnnnnnnnnnnnnnnnnnnnnnnnnnnnnnnnnnnnnnnnnnnnnnnnnnnnnnnnnnnnnnnnnnnnnnnnnnnnnnnnnnnnnnnnnnnnnnnnnnnnnnnnnnnnnnnnnnnnnnnnnnnnnnnnnnnnnnnnnnnnnnnnnnnnnnnnnnnnnnnnnnnnnnnnnnnnnnnnnnnnnnnnnnnnnnnnnnnnnnnnnnnnnnnnnnnnnnnnnnnnnnnnnnnnnnnnnnnnnnnnnnnnnnnnnnnnnnnnnnnnnnnnnnnnnnnnnnnnnnnnnnnnnnnnnnnnnnnnnnnnnnnnnnnnnnnnnnnnnnnnnnnnnnnnnnnnnnnnnnnnnnnnnnnnnnnnnnnnnnnnnnnnnnnnnnnnnnnnnnnnnnnnnnnnnnnnnnnnnnnnnnnnnnnnnnnnnnnnnnnnnnnnnnnnnnnnnnnnnnnnnnnnnnnnnnnnnnnnnnnnnnnnnnnnnnnnnnnnnnnnnnnnnnnnnnnnnnnnnnnnnnnnnnnnnnnnnnnnnnnnnnnnnnnnnnnnnnnnnnnnnnnnnnnnnnnnnnnnnnnnnnnnnnnnnnnnnnnnnnnnnnnnnnnnnnnnnnnnnnnnnnnnnnnnnnnnnnnnnnnnnnnnnnnnnnnnnnnnnnnnnnnnnnnnnnnnnnnnnnnnnnnnnnnnnnnnnnnnnnnnnnnnnnnnnnnnnnnnnnnnnnnnnnnnnnnnnnnnnnnnnnnnnnnnnnnnnnnnnnnnnnnnnnnnnnnnnnnnnnnnnnnnnnnnnnnnnnnnnnnnnnnnnnnnnnnnnnnnnnnnnnnnnnnnnnnnnnnnnnnnnnnnnnnnnnnnnnnnnnnnnnnnnnnnnnnnnnnnnnnnnnnnnnnnnnnnnnnnnnnnnnnnnnnnnnnnnnnnnnnnnnnnnnnnnnnnnnnnnnnnnnnnnnnnnnnnnnnnnnnnnnnnnnnnnnnnnnnnnnnnnnnnnnnnnnnnnnnnnnnnnnnnnnnnnnnnnnnnnnnnnnnnnnnnnnnnnnnnnnnnnnnnnnnnnnnnnnnnnnnnnnnnnnnnnnnnnnnnnnnnnnnnnnnnnnnnnnnnnnnnnnnnnnnnnnnnnnnnnnnnnnnnnnnnnnnnnnnnnnnnnnnnnnnnnnnnnnnnnnnnnnnnnnnnnnnnnnnnnnnnnnnnnnnnnnnnnnnnnnnnnnnnnnnnnnnnnnnnnnnnnnnnnnnnnnnnnnnnnnnnnnnnnnnnnnnnnnnnnnnnnnnnnnnnnnnnnnnnnnnnnnnnnnnnnnnnnnnnnnnnnnnnnnnnnnnnnnnnnnnnnnnnnnnnnnnnnnnnnnnnnnnnnnnnnnnnnnnnnnnnnnnnnnnnnnnnnnnnnnnnnnnnnnnnnnnnnnnnnnnnnnnnnnnnnnnnnnnnnnnnnnnnnnnnnnnnnnnnnnnnnnnnnnnnnnnnnnnnnnnnnnnnnnnnnnnnnnnnnnnnnnnnnnnnnnnnnnnnnnnnnnnnnnnnnnnnnnnnnnnnnnnnnnnnnnnnnnnnnnnnnnnnnnnnnnnnnnnnnnnnnnnnnnnnnnnnnnnnnnnnnnnnnnnnnnnnnnnnnnnnnnnnnnnnnnnnnnnnnnnnnnnnnnnnnnnnnnnnnnnnnnnnnnnnnnnnnnnnnnnnnnnnnnnnnnnnnnnnnnnnnnnnnnnnnnnnnnnnnnnnnnnnnnnnnnnnnnnnnnnnnnnnnnnnnnnnnnnnnnnnnnnnnnnnnnnnnnnnnnnnnnnnnnnnnnnnnnnnnnnnnnnnnnnnnnnnnnnnnnnnnnnnnnnnnnnnnnnnnnnnnnnnnnnnnnnnnnnnnnnnnnnnnnnnnnnnnnnnnnnnnnnnnnnnnnnnnnnnnnnnnnnnnnnnnnnnnnnnnnnnnnnnnnnnnnnnnnnnnnnnnnnnnnnnnnnnnnnnnnnnnnnnnnnnnnnnnnnnnnnnnnnnnnnnnnnnnnnnnnnnnnnnnnnnnnnnnnnnnnnnnnnnnnnnnnnnnnnnnnnnnnnnnnnnnnnnnnnnnnnnnnnnnnnnnnnnnnnnnnnnnnnnnnnnnnnnnnnnnnnnnnnnnnnnnnnnnnnnnnnnnnnnnnnnnnnnnnnnnnnnnnnnnnnnnnnnnnnnnnnnnnnnnnnnnnnnnnnnnnnnnnnnnnnnnnnnnnnnnnnnnnnnnnnnnnnnnnnnnnnnnnnnnnnnnnnnnnnnnnnnnnnnnnnnnnnnnnnnnnnnnnnnnnnnnnnnnnnnnnnnnnnnnnnnnnnnnnnnnnnnnnnnnnnnnnnnnnnnnnnnnnnnnnnnnnnnnnnnnnnnnnnnnnnnnnnnnnnnnnnnnnnnnnnnnnnnnnnnnnnnnnnnnnnnnnnnnnnnnnnnnnnnnnnnnnnnnnnnnnnnnnnnnnnnnnnnnnnnnnnnnnnnnnnnnnnnnnnnnnnnnnnnnnnnnnnnnnnnnnnnnnnnnnnnnnnnnnnnnnnnnnnnnnnnnnnnnnnnnnnnnnnnnnnnnnnnnnnnnnnnnnnnnnnnnnnnnnnnnnnnnnnnnnnnnnnnnnnnnnnnnnnnnnnnnnnnnnnnnnnnnnnnnnnnnnnnnnnnnnnnnnnnnnnnnnnnnnnnnnnnnnnnnnnnnnnnnnnnnnnnnnnnnnnnnnnnnnnnnnnnnnnnnnnnnnnnnnnnnnnnnnnnnnnnnnnnnnnnnnnnnnnnnnnnnnnnnnnnnnnnnnnnnnnnnnnnnnnnnnnnnnnnnnnnnnnnnnnnnnnnnnnnnnnnnnnnnnnnnnnaaccaagggttacaccgtgggctgcgcaccaccgatgccacctgcaccttgctgttactcgatccggatagccgtcgtgccgatttacgtcaagccattccccgtcgtttcttggtggattgggacagcgtggccgagggctcgttggttttgcgcacgcacttcgcccgtgaacgaaaaaaaggtctgcgtgaaaaaaccctgagccggcgcgggcagcactgcgaacaccccggctgtacggccacccaagagcatttgctggaggtgcaccacctcaacccgattgccaacggcccccgcgacacagttactgatgacctgcgggtgctttgtaaaaatcaccacgcggatgcccaccaagccatgcgaaaagctgattttttaaaagtgaaaacaactgaaaagcgtgcagaggcagacacttaggccacagctggtcaagctacgccgtaaatgcgtagttactggaacttcgcgcgagtgcttagataggcttccatcggtcaagctacgccgtaaatgcgtagttactggaacttgcgtgtggtatcagttcagcgtggatcgggtcaagctacgccgtaaatgcgtagttactggaacgaagttcacgttgacactgccttggatacgggtcaagctacgccgtaaatgcgtagttactggaactggtagcggctgcttgttaagtaaggccgaggtcgtctggggtcaagctacgccgtaaaggcgtagttacttttagcagccagttttgctggttttaagcggtccaatggcccgacttgccgcccatcttttcaagcaggcgcacgcccgtcatggtcatgccgcggtcggcggctttgcacatgtcgtagatggtcagcaagccgacttgtacggcggtgagggcttccatttcaacacccgtggggccggtggtttcggcggtgacggtgcaatgaacgtgggggggctggtcaccggtggtgaaggccacgcgcacatggctgagcgccaagggatggcacaggggaatgaggtcagcggtgcgcttggaggcttgtatagccgccacgcgcgcaatgcccaacacatccccctttttggcgttgccatcgcgaatcagagccaaggtgtcggcgtgcatttcaatgcgcccttctgctgtggcgctgcgcttggtgttggctttgtcacccacgtcgaccatgtgggcttggccttgtgcatcaaagtgggtcaggggtgaagggggctggctggacacggtgcaatctccgaaactttgcaaaacttagggcatcatacctacatgctttcccccttgtttgttgctcgccgtcgccctcgtttggcgtgggcgttgccgtgggctttgggtgccgccctgctgctggggccaaccacactcaccgttgcgcaaccccgcgcggccttgcccaacttgggtggtggggtgtcgttaacgctgggggatgagcgccggctgggccaacaaatcatgcccagcttgcacaacagtggcttggtggtggaagacccgctgctcaaccaatacctcaccgatctgtggcgccctgtgtttgcaacggcgcgcgcacgcggtgatgtgcccgatgacatgttgcagcagtttgcttggcagttgtggttgctcagccccaaagccatcaacgcgtttgcattacccgggggttactttggttttcacttaggtttgttggcatcggccacggatgacgctgcactggcgtcggtgttggcgcacgagttgagccatgtgacacagcgccatattgcccgcatcattcaagcccaagagagccaagcgccttggctgattggcgccatgattttgggtgctgccaccatcgccgccagccccgatgcaggcgccgcactgattgtgggtgggcaggcagcgtccattcaaaaccagctcaacttctcgcgggacatggagcaagaggcggaccgccaaggcttggtggtgttgtcggaggcggggtttgatccgaaggggtttgtgcgcttatttgaaaccctgcaaaacgccaaccgcttgaatgacgatggtgcctttccctacctgcgcagccacccgctcacgaccgagcgtgtggcggatatgcaaggccgcttgttcagcgtaccggccgagcccaacccggtgggcgatggtgcggtgcagatgcgcgaccccgatgcctctgctttgttgcgcgtgcgtgccgccgtcatcgcctcggctgatgaggtggatgtgttgcaaggttggggtgcggcgcccgccgccactgggtcagcgggcagcgccacccgcccggcggaacaatgggcgagtgactaccagcgcgcactggccgcgtgggcactgaagcgccccgatgtggcatggacgcgcctgcgccaattgatgaccgaggcggctacgcaacccgccgtgtcgcaggtgctgcgcgagacggcgttggcttggctggccagccccgctaagtttgagccgatacccgctgcaacggtgcaggcttgggttgaggcggccttggctgatgcccaagccgggcggcgttcggcgctgctgctgttggcgggttatgcggccagcgccaattcagccgtgccggatgcgcggcgcgcgcaggtgatcggggccttgcgtacctggttggcgacccaccccaatgatgcgttgggctggcagttgttggcccgtttgagtgcgcaacaaggccaagccttggtggcgttgagggccgaggccgaggcctttgtggcgcgcgagctgtggcaaggggcgcttgaccgtttgtctgccgccaagcgcctgattgcggaggctaaaacccgtttcagtgaagccgacattgcgattatttacgcccgcgaaaaggcagttaatcaagccatggcatttgcacggtctgagcgccgttgagcgcgcaccggtacactaagtcccccatggcagccatccacatctctgacatcgagtcggccatcaactattggcggacacaaaaaccttcacccgacggtgtgacgctgtgcgccgaggtgcgcgccttggccgaggtttatgcgctgctggtgtactaccacgagaccgaggccgatgaggccagtatgccgtttgatgcctatgcggcctgggaggcttggttcgacacgacacccgatacgccgtgtatcgcgatctgctcaaccagccagggtgatgacatgtgtaaaggttgtggccgtacctttgaagaggtgcagtactggaccgaaatgcagcccgccgaaaagcgcgcggtttggcgtcgcatcaccctgcatggcgatgcgtggcgctttaaccgctaccgcgaacgggcgatcgagaacgcggcgtaaccgcgtgccgtcagcctttggcggcgcgcaacgccaattcggcggctttaccgacgtaggtggcaggcgtcatggccaacaaacgcgctttgtcggcgtctggaatagccagtgactgaatgaggccgtgcaaggcttcacgcgtgacggttttgccccgtgtgacggctttgagttgctcgtacgcgccatcgatgccgtagcgtcgcatgacggtttgaattggctctgccaacacttcccacgcgttgtcgaggtcgtccgccaaggcgtccgcgttgagttcgagtttgcgcagacccaccgccatcgattgatacgccaacaccgagtagccaaacgcgacgcccatgttgcgcaacaccgtgctgtcggtcaggtcacgttgccagcgcgagatgggtagcttttcactgaggtggcgcagcaaggcattggccagccccaagttaccttcggcgttttcaaagtcgatcggattgactttgtgcggcatggtggatgagccgatctcaccgtctttgaggcgttgcttgaagtaacccaagctgatgtaaccccacacgtcacgcgcaaggtcgatcaagatggtgttgacacgggccatggcgtcgaacagctcggccatgtaatcgtgtggctcaatttgaatgctgtagtcctggaacgttaagcccaagccattgggtgcgggtgaggccaccacgcctttggcaaaggcctcccaatcgacgtcgggccaggcgctcatgtgggcgttatagttaccaaccgcgccgttcattttggccatgatggcgacttgctcaatgcgcaaggtggcgcgttgcaggcgcacggcgacgttggccatctctttaccgacggtggtcgggctggcggtttggccgtgggtccggctgagcatgggtacgtgggcgtactgctcggccatgcccagcagcagattcacgacgtcgcccaacatgggcaacagcacttcacgccgcgcggcttgcaattgcagtgcgtggctggtgttgttgatgtcttcgctggtgaaggcacagtgcacaaattcgcctgcacgctcaagctcttcgcggaccgctgggctaagacggtcatttcggaaagcgcgtttgatccaatactcaactgctttgacatcgtggttggtctcgcgctcgatggccttgatgtcggcggtgtcggcttcgctgaattgctgaaccaagccccgcaggtaggcggtcgcctcggccgataaggcgggacactccaccagaccggcttgcgtgagggcgataaaccacgtgatctcgacttgcacccgcttgtgcatgtagccatgctcgctcatgatgggtcgcaaggcagccagtttgccgctgtagcggccgtcaagcggggatagggcggagatggtgtagaggtcttgagtcattgggggcggggcgcgatgtgcaccaaaatagatagccaatattgtaggcgcccagccaaattaaacctttggctgtatacaggtttgatgagcttaaaagcgaccaggattccttttggcgcccgtgttttggggctttctgtggctagaatcattgctcgatcaaccattattgaaacccatgaaactcatcggctctccaaccagtccatatgtgcgcaaggttcgcgtcgtcttggttgaaaagcgtctcgagtacgagttcgcaaccgaagatgtgtggtcggcggataccctgatcgcagcggctaatccactcgggaagatcccctgtttgatcatggacgggggtgaggccatgtttgattcgcgcgtgatcgtagagtacctcgatggcttgtcgccggtgagtcgtttgattcccgcaagcggccgcgagcgtgcggaagttaaaacctgggaggccttggctgacggtgtcatggatgccgccatcttggctcgcttagaggcttcatgggctgggcgcaccgaggcccaacgctcaccggcttggattgaccgccagttgggcaaagtggagttggcggtggctgccatggccaaaggcttgggcgacaagccttattgcagtggcattcatttcagtttgtcagacgtggctgtgggtagcgcgttggcgtatctggagttccgctttccacaaattaattggcgcgaaacgcatcccaatttgtccgcgttgttagaccgcttgatgcagcgggccagctttgcaggcacggcgcacgcctgatagcccatcgctctgcggggtttatcccgcgcgctttttgagccagcgcatgagggcgccgatgacggggagcttttcatacagctcttccgcagcgtcccagtagtcgcggtgaaacaccaccaagccctgcgcgtcgaagcgcaaatggctggcaccccggatggtccaggggcgaccgcccttgccgccctttcggcctttggtgctgaatagaaaatcccaagttaaaaagcagtcatcaccctgttcaatggccgtcgtgaccacgaagcgcggttgttcaaggcgcttgaacatgtcatcgaagatgtgctgaacttgcgccaactgcgtgacttcgttgaaagggtctttgaaaaagagcggatcggcgtagtacgcacccatgcgcgtcacgtcagcggcttgcaggttttcaaaccatgccaataacgcttgtgtgcgggccgatacctgatgacgggatgcgctcatagtcgggtgagttttttgatgagcgcttgtgcccagcgatgcggcaatacgcgcagcaatttgagccaccaggtgaagcgtttgggaaagtggatgtcaaagaggccatcggcccaaccggccaaaatttcggtggccgcgacatcggtggtgatcaacgcaggcatggtgaactcgttctgcgcggtgagtggggtttctacaaagccggggtggatggcgctgatacccagccccttgcccgccaagtcgtaatgcagtacttcagcgaaatgggtgagcgcggctttggtgggaccgtatgccaacgagttgggtaacccgcgccagccggcgacgctactgataaaactgaggtgaccaaatccttgttgcaataaggtgggcaaggtggcatcgaccaagttataggcgcccacgacgttgacgtcgagatgttgcttcatgcgtgccaagtcaaaccggtaggcgcgcaggggcttgtaaatcccggctgcaaacagcaccagatcgagccgcccttgcgcctgcacaatgtgttgcaccgtgttttgcagcgcgggcaagtcggtcacgtctagtgggtaggccgccgcactggggtgctgtgttgcaaattgctgcaggggctcgctttggcgtgccgagaccattacccgggcaccgcgttgtgccaactgctcggcaacggcgtggccaatgccggtggaggctccaacaatccacaccactttgccagaccattccgtcagcggtgggttcatgggtttgaacaagcgggccatcaggcggcagtcattggtttttcgagcgtgaactggatcacgtccgtgttcgactccatgaaggcggcttcacagtaggccaagtagaactcccatgtgcggatgaaaggcgtgtcaaaacccagcgcgcggacggcgggttcctcgtgcaggaatttgtggcgccatgtgcgcagggtctcggcgtaatcgagaccgaatgccttctcattgacgacacgcaaaccagcgcgcccagcagattcgcggaattggcgtggactgggtaaacagccgccaggaaagatgtactgctgtatgaagtccgtgccttggatgtagcggctgaacaggtgatcggcaatcacgatggactggatacaggccttacctccgggtttgaggcgcttggcgatggtgtcgaaataggtgggccagtaggcgcgcccgaccgcctcgatcatctcaatcgagcaaaccgcgtcgaatggttcttcggggctgaccacgccaatgtcacggtaatcctgcaaccgcaagtcggctaagtgtccgttgggggttgcagcgagtcgcttgttggcccagtcgagctgttctgtggacagcgtcaggccgaccatttcgctttgaaattcgttggtagccatttctgccaaggcgccccagccgcagccgatctctagcaagcgttggccgggcttcaagtccacctcttgcagcgcgcggcgcaccttttcgttttgcgccatggccatgtcggtgatgccattggcatacaacgcgctggagtagttcatggtgttgtctaaccacaaacggtaaaagtcgtttccgaggtcgtagtgcgcgtgaatatttttgcggctgttggctttggtgttgcggttcaaccagtgcttcacttggtaggcaaaacgcccaatgggatgaccgtatacggctttctcgatggcgtcgcggttttgaatcagcacctgcaacaagtgggcgagttgcggggtgtgccagtaaccggcaatgtaggtttcggcgaagccgatatcaccacttttaatggctgccgaaaacacacgccaatttttcaggatgatgtagccctgcaaaccaccaggtttgccgtagaccagccaggtgccgtcagggcattgaatgtgcaactccccatgcgtgattttggtgagcagcttgagcagtcgcttggccgcgaaggggactttgacgtgggcgagggctgccgcggtggtggtgtctcgttgcatgggtcgtcgaatgaaggctaggtaatgaactcggtgggtggcgcaggttttctgaaaaacggtacacgcttcagaaacaataacagggcttgccaatgaatgcgcgccat

SEQ ID NO: 56 - DNA, 18021 bp, Artificial Sequence; identical to SEQ ID NO: 6
  Synthetic Oligonucleotide
  misc_feature (1)..(4861): n is a, c, g, or t

SEQ ID NO: 57 - DNA, 17954 bp, Artificial Sequence
  Synthetic Oligonucleotide
  misc_feature (1)..(9981): n is a, c, g, or t
nnnnnnnnnnnnnnnnnnnnnnnnnnnnnnnnnnnnnnnnnnnnnnnnnnnnnnnnnnnnnnnnnnnnnnnnnnnnnnnnnnnnnnnnnnnnnnnnnnnnnnnnnnnnnnnnnnnnnnnnnnnnnnnnnnnnnnnnnnnnnnnnnnnnnnnnnnnnnnnnnnnnnnnnnnnnnnnnnnnnnnnnnnnnnnnnnnnnnnnnnnnnnnnnnnnnnnnnnnnnnnnnnnnnnnnnnnnnnnnnnnnnnnnnnnnnnnnnnnnnnnnnnnnnnnnnnnnnnnnnnnnnnnnnnnnnnnnnnnnnnnnnnnnnnnnnnnnnnnnnnnnnnnnnnnnnnnnnnnnnnnnnnnnnnnnnnnnnnnnnnnnnnnnnnnnnnnnnnnnnnnnnnnnnnnnnnnnnnnnnnnnnnnnnnnnnnnnnnnnnnnnnnnnnnnnnnnnnnnnnnnnnnnnnnnnnnnnnnnnnnnnnnnnnnnnnnnnnnnnnnnnnnnnnnnnnnnnnnnnnnnnnnnnnnnnnnnnnnnnnnnnnnnnnnnnnnnnnnnnnnnnnnnnnnnnnnnnnnnnnnnnnnnnnnnnnnnnnnnnnnnnnnnnnnnnnnnnnnnnnnnnnnnnnnnnnnnnnnnnnnnnnnnnnnnnnnnnnnnnnnnnnnnnnnnnnnnnnnnnnnnnnnnnnnnnnnnnnnnnnnnnnnnnnnnnnnnnnnnnnnnnnnnnnnnnnnnnnnnnnnnnnnnnnnnnnnnnnnnnnnnnnnnnnnnnnnnnnnnnnnnnnnnnnnnnnnnnnnnnnnnnnnnnnnnnnnnnnnnnnnnnnnnnnnnnnnnnnnnnnnnnnnnnnnnnnnnnnnnnnnnnnnnnnnnnnnnnnnnnnnnnnnnnnnnnnnnnnnnnnnnnnnnnnnnnnnnnnnnnnnnnnnnnnnnnnnnnnnnnnnnnnnnnnnnnnnnnnnnnnnnnnnnnnnnnnnnnnnnnnnnnnnnnnnnnnnnnnnnnnnnnnnnnnnnnnnnnnnnnnnnnnnnnnnnnnnnnnnnnnnnnnnnnnnnnnnnnnnnnnnnnnnnnnnnnnnnnnnnnnnnnnnnnnnnnnnnnnnnnnnnnnnnnnnnnnnnnnnnnnnnnnnnnnnnnnnnnnnnnnnnnnnnnnnnnnnnnnnnnnnnnnnnnnnnnnnnnnnnnnnnnnnnnnnnnnnnnnnnnnnnnnnnnnnnnnnnnnnnnnnnnnnnnnnnnnnnnnnnnnnnnnnnnnnnnnnnnnnnnnnnnnnnnnnnnnnnnnnnnnnnnnnnnnnnnnnnnnnnnnnnnnnnnnnnnnnnnnnnnnnnnnnnnnnnnnnnnnnnnnnnnnnnnnnnnnnnnnnnnnnnnnnnnnnnnnnnnnnnnnnnnnnnnnnnnnnnnnnnnnnnnnnnnnnnnnnnnnnnnnnnnnnnnnnnnnnnnnnnnnnnnnnnnnnnnnnnnnnnnnnnnnnnnnnnnnnnnnnnnnnnnnnnnnnnnnnnnnnnnnnnnnnnnnnnnnnnnnnnnnnnnnnnnnnnnnnnnnnnnnnnnnnnnnnnnnnnnnnnnnnnnnnnnnnnnnnnnnnnnnnnnnnnnnnnnnnnnnnnnnnnnnnnnnnnnnnnnnnnnnnnnnnnnnnnnnnnnnnnnnnnnnnnnnnnnnnnnnnnnnnnnnnnnnnnnnnnnnnnnnnnnnnnnnnnnnnnnnnnnnnnnnnnnnnnnnnnnnnnnnnnnnnnnnnnnnnnnnnnnnnnnnnnnnnnnnnnnnnnnnnnnnnnnnnnnnnnnnnnnnnnnnnnnnnnnnnnnnnnnnnnnnnnnnnnnnnnnnnnnnnnnnnnnnnnnnnnnnnnnnnnnnnnnnnnnnnnnnnnnnnnnnnnnnnnnnnnnnnnnnnnnnnnnnnnnnnnnnnnnnnnnnnnnnnnnnnnnnnnnnnnnnnnnnnnnnnnnnnnnnnnnnnnnnnnnnnnnnnnnnnnnnnnnnnnnnnnnnnnnnnnnnnnnnnnnnnnnnnnnnnnnnnnnnnnnnnnnnnnnnnnnnnnnnnnnnnnnnnnnnnnnnnnnnnnnnnnnnnnnnnnnnnnnnnnnnnnnnnnnnnnnnnnnnnnnnnnnnnnnnnnnnnnnnnnnnnnnnnnnnnnnnnnnnnnnnnnnnnnnnnnnnnnnnnnnnnnnnnnnnnnnnnnnnnnnnnnnnnnnnnnnnnnnnnnnnnnnnnnnnnnnnnnnnnnnnnnnnnnnnnnnnnnnnnnnnnnnnnnnnnnnnnnnnnnnnnnnnnnnnnnnnnnnnnnnnnnnnnnnnnnnnnnnnnnnnnnnnnnnnnnnnnnnnnnnnnnnnnnnnnnnnnnnnnnnnnnnnnnnnnnnnnnnnnnnnnnnnnnnnnnnnnnnnnnnnnnnnnnnnnnnnnnnnnnnnnnnnnnnnnnnnnnnnnnnnnnnnnnnnnnnnnnnnnnnnnnnnnnnnnnnnnnnnnnnnnnnnnnnnnnnnnnnnnnnnnnnnnnnnnnnnnnnnnnnnnnnnnnnnnnnnnnnnnnnnnnnnnnnnnnnnnnnnnnnnnnnnnnnnnnnnnnnnnnnnnnnnnnnnnnnnnnnnnnnnnnnnnnnnnnnnnnnnnnnnnnnnnnnnnnnnnnnnnnnnnnnnnnnnnnnnnnnnnnnnnnnnnnnnnnnnnnnnnnnnnnnnnnnnnnnnnnnnnnnnnnnnnnnnnnnnnnnnnnnnnnnnnnnnnnnnnnnnnnnnnnnnnnnnnnnnnnnnnnnnnnnnnnnnnnnnnnnnnnnnnnnnnnnnnnnnnnnnnnnnnnnnnnnnnnnnnnnnnnnnnnnnnnnnnnnnnnnnnnnnnnnnnnnnnnnnnnnnnnnnnnnnnnnnnnnnnnnnnnnnnnnnnnnnnnnnnnnnnnnnnnnnnnnnnnnnnnnnnnnnnnnnnnnnnnnnnnnnnnnnnnnnnnnnnnnnnnnnnnnnnnnnnnnnnnnnnnnnnnnnnnnnnnnnnnnnnnnnnnnnnnnnnnnnnnnnnnnnnnnnnnnnnnnnnnnnnnnnnnnnnnnnnnnnnnnnnnnnnnnnnnnnnnnnnnnnnnnnnnnnnnnnnnnnnnnnnnnnnnnnnnnnnnnnnnnnnnnnnnnnnnnnnnnnnnnnnnnnnnnnnnnnnnnnnnnnnnnnnnnnnnnnnnnnnnnnnnnnnnnnnnnnnnnnnnnnnnnnnnnnnnnnnnnnnnnnnnnnnnnnnnnnnnnnnnnnnnnnnnnnnnnnnnnnnnnnnnnnnnnnnnnnnnnnnnnnnnnnnnnnnnnnnnnnnnnnnnnnnnnnnnnnnnnnnnnnnnnnnnnnnnnnnnnnnnnnnnnnnnnnnnnnnnnnnnnnnnnnnnnnnnnnnnnnnnnnnnnnnnnnnnnnnnnnnnnnnnnnnnnnnnnnnnnnnnnnnnnnnnnnnnnnnnnnnnnnnnnnnnnnnnnnnnnnnnnnnnnnnnnnnnnnnnnnnnnnnnnnnnnnnnnnnnnnnnnnnnnnnnnnnnnnnnnnnnnnnnnnnnnnnnnnnnnnnnnnnnnnnnnnnnnnnnnnnnnnnnnnnnnnnnnnnnnnnnnnnnnnnnnnnnnnnnnnnnnnnnnnnnnnnnnnnnnnnnnnnnnnnnnnnnnnnnnnnnnnnnnnnnnnnnnnnnnnnnnnnnnnnnnnnnnnnnnnnnnnnnnnnnnnnnnnnnnnnnnnnnnnnnnnnnnnnnnnnnnnnnnnnnnnnnnnnnnnnnnnnnnnnnnnnnnnnnnnnnnnnnnnnnnnnnnnnnnnnnnnnnnnnnnnnnnnnnnnnnnnnnnnnnnnnnnnnnnnnnnnnnnnnnnnnnnnnnnnnnnnnnnnnnnnnnnnnnnnnnnnnnnnnnnnnnnnnnnnnnnnnnnnnnnnnnnnnnnnnnnnnnnnnnnnnnnnnnnnnnnnnnnnnnnnnnnnnnnnnnnnnnnnnnnnnnnnnnnnnnnnnnnnnnnnnnnnnnnnnnnnnnnnnnnnnnnnnnnnnnnnnnnnnnnnnnnnnnnnnnnnnnnnnnnnnnnnnnnnnnnnnnnnnnnnnnnnnnnnnnnnnnnnnnnnnnnnnnnnnnnnnnnnnnnnnnnnnnnnnnnnnnnnnnnnnnnnnnnnnnnnnnnnnnnnnnnnnnnnnnnnnnnnnnnnnnnnnnnnnnnnnnnnnnnnnnnnnnnnnnnnnnnnnnnnnnnnnnnnnnnnnnnnnnnnnnnnnnnnnnnnnnnnnnnnnnnnnnnnnnnnnnnnnnnnnnnnnnnnnnnnnnnnnnnnnnnnnnnnnnnnnnnnnnnnnnnnnnnnnnnnnnnnnnnnnnnnnnnnnnnnnnnnnnnnnnnnnnnnnnnnnnnnnnnnnnnnnnnnnnnnnnnnnnnnnnnnnnnnnnnnnnnnnnnnnnnnnnnnnnnnnnnnnnnnnnnnnnnnnnnnnnnnnnnnnnnnnnnnnnnnnnnnnnnnnnnnnnnnnnnnnnnnnnnnnnnnnnnnnnnnnnnnnnnnnnnnnnnnnnnnnnnnnnnnnnnnnnnnnnnnnnnnnnnnnnnnnnnnnnnnnnnnnnnnnnnnnnnnnnnnnnnnnnnnnnnnnnnnnnnnnnnnnnnnnnnnnnnnnnnnnnnnnnnnnnnnnnnnnnnnnnnnnnnnnnnnnnnnnnnnnnnnnnnnnnnnnnnnnnnnnnnnnnnnnnnnnnnnnnnnnnnnnnnnnnnnnnnnnnnnnnnnnnnnnnnnnnnnnnnnnnnnnnnnnnnnnnnnnnnnnnnnnnnnnnnnnnnnnnnnnnnnnnnnnnnnnnnnnnnnnnnnnnnnnnnnnnnnnnnnnnnnnnnnnnnnnnnnnnnnnnnnnnnnnnnnnnnnnnnnnnnnnnnnnnnnnnnnnnnnnnnnnnnnnnnnnnnnnnnnnnnnnnnnnnnnnnnnnnnnnnnnnnnnnnnnnnnnnnnnnnnnnnnnnnnnnnnnnnnnnnnnnnnnnnnnnnnnnnnnnnnnnnnnnnnnnnnnnnnnnnnnnnnnnnnnnnnnnnnnnnnnnnnnnnnnnnnnnnnnnnnnnnnnnnnnnnnnnnnnnnnnnnnnnnnnnnnnnnnnnnnnnnnnnnnnnnnnnnnnnnnnnnnnnnnnnnnnnnnnnnnnnnnnnnnnnnnnnnnnnnnnnnnnnnnnnnnnnnnnnnnnnnnnnnnnnnnnnnnnnnnnnnnnnnnnnnnnnnnnnnnnnnnnnnnnnnnnnnnnnnnnnnnnnnnnnnnnnnnnnnnnnnnnnnnnnnnnnnnnnnnnnnnnnnnnnnnnnnnnnnnnnnnnnnnnnnnnnnnnnnnnnnnnnnnnnnnnnnnnnnnnnnnnnnnnnnnnnnnnnnnnnnnnnnnnnnnnnnnnnnnnnnnnnnnnnnnnnnnnnnnnnnnnnnnnnnnnnnnnnnnnnnnnnnnnnnnnnnnnnnnnnnnnnnnnnnnnnnnnnnnnnnnnnnnnnnnnnnnnnnnnnnnnnnnnnnnnnnnnnnnnnnnnnnnnnnnnnnnnnnnnnnnnnnnnnnnnnnnnnnnnnnnnnnnnnnnnnnnnnnnnnnnnnnnnnnnnnnnnnnnnnnnnnnnnnnnnnnnnnnnnnnnnnnnnnnnnnnnnnnnnnnnnnnnnnnnnnnnnnnnnnnnnnnnnnnnnnnnnnnnnnnnnnnnnnnnnnnnnnnnnnnnnnnnnnnnnnnnnnnnnnnnnnnnnnnnnnnnnnnnnnnnnnnnnnnnnnnnnnnnnnnnnnnnnnnnnnnnnnnnnnnnnnnnnnnnnnnnnnnnnnnnnnnnnnnnnnnnnnnnnnnnnnnnnnnnnnnnnnnnnnnnnnnnnnnnnnnnnnnnnnnnnnnnnnnnnnnnnnnnnnnnnnnnnnnnnnnnnnnnnnnnnnnnnnnnnnnnnnnnnnnnnnnnnnnnnnnnnnnnnnnnnnnnnnnnnnnnnnnnnnnnnnnnnnnnnnnnnnnnnnnnnnnnnnnnnnnnnnnnnnnnnnnnnnnnnnnnnnnnnnnnnnnnnnnnnnnnnnnnnnnnnnnnnnnnnnnnnnnnnnnnnnnnnnnnnnnnnnnnnnnnnnnnnnnnnnnnnnnnnnnnnnnnnnnnnnnnnnnnnnnnnnnnnnnnnnnnnnnnnnnnnnnnnnnnnnnnnnnnnnnnnnnnnnnnnnnnnnnnnnnnnnnnnnnnnnnnnnnnnnnnnnnnnnnnnnnnnnnnnnnnnnnnnnnnnnnnnnnnnnnnnnnnnnnnnnnnnnnnnnnnnnnnnnnnnnnnnnnnnnnnnnnnnnnnnnnnnnnnnnnnnnnnnnnnnnnnnnnnnnnnnnnnnnnnnnnnnnnnnnnnnnnnnnnnnnnnnnnnnnnnnnnnnnnnnnnnnnnnnnnnnnnnnnnnnnnnnnnnnnnnnnnnnnnnnnnnnnnnnnnnnnnnnnnnnnnnnnnnnnnnnnnnnnnnnnnnnnnnnnnnnnnnnnnnnnnnnnnnnnnnnnnnnnnnnnnnnnnnnnnnnnnnnnnnnnnnnnnnnnnnnnnnnnnnnnnnnnnnnnnnnnnnnnnnnnnnnnnnnnnnnnnnnnnnnnnnnnnnnnnnnnnnnnnnnnnnnnnnnnnnnnnnnnnnnnnnnnnnnnnnnnnnnnnnnnnnnnnnnnnnnnnnnnnnnnnnnnnnnnnnnnnnnnnnnnnnnnnnnnnnnnnnnnnnnnnnnnnnnnnnnnnnnnnnnnnnnnnnnnnnnnnnnnnnnnnnnnnnnnnnnnnnnnnnnnnnnnnnnnnnnnnnnnnnnnnnnnnnnnnnnnnnnnnnnnnnnnnnnnnnnnnnnnnnnnnnnnnnnnnnnnnnnnnnnnnnnnnnnnnnnnnnnnnnnnnnnnnnnnnnnnnnnnnnnnnnnnnnnnnnnnnnnnnnnnnnnnnnnnnnnnnnnnnnnnnnnnnnnnnnnnnnnnnnnnnnnnnnnnnnnnnnnnnnnnnnnnnnnnnnnnnnnnnnnnnnnnnnnnnnnnnnnnnnnnnnnnnnnnnnnnnnnnnnnnnnnnnnnnnnnnnnnnnnnnnnnnnnnnnnnnnnnnnnnnnnnnnnnnnnnnnnnnnnnnnnnnnnnnnnnnnnnnnnnnnnnnnnnnnnnnnnnnnnnnnnnnnnnnnnnnnnnnnnnnnnnnnnnnnnnnnnnnnnnnnnnnnnnnnnnnnnnnnnnnnnnnnnnnnnnnnnnnnnnnnnnnnnnnnnnnnnnnnnnnnnnnnnnnnnnnnnnnnnnnnnnnnnnnnnnnnnnnnnnnnnnnnnnnnnnnnnnnnnnnnnnnnnnnnnnnnnnnnnnnnnnnnnnnnnnnnnnnnnnnnnnnnnnnnnnnnnnnnnnnnnnnnnnnnnnnnnnnnnnnnnnnnnnnnnnnnnnnnnnnnnnnnnnnnnnnnnnnnnnnnnnnnnnnnnnnnnnnnnnnnnnnnnnnnnnnnnnnnnnnnnnnnnnnnnnnnnnnnnnnnnnnnnnnnnnnnnnnnnnnnnnnnnnnnnnnnnnnnnnnnnnnnnnnnnnnnnnnnnnnnnnnnnnnnnnnnnnnnnnnnnnnnnnnnnnnnnnnnnnnnnnnnnnnnnnnnnnnnnnnnnnnnnnnnnnnnnnnnnnnnnnnnnnnnnnnnnnnnnnnnnnnnnnnnnnnnnnnnnnnnnnnnnnnnnnnnnnnnnnnnnnnnnnnnnnnnnnnnnnnnnnnnnnnnnnnnnnnnnnnnnnnnnnnnnnnnnnnnnnnnnnnnnnnnnnnnnnnnnnnnnnnnnnnnnnnnnnnnnnnnnnnnnnnnnnnnnnnnnnnnnnnnnnnnnnnnnnnnnnnnnnnnnnnnnnnnnnnnnnnnnnnnnnnnnnnnnnnnnnnnnnnnnnnnnnnnnnnnnnnnnnnnnnnnnnnnnnnnnnnnnnnnnnnnnnnnnnnnnnnnnnnnnnnnnnnnnnnnnnnnnnnnnnnnnnnnnnnnnnnnnnnnnnnnnnnnnnnnnnnnnnnnnnnnnnnnnnnnnnnnnnnnnnnnnnnnnnnnnnnnnnnnnnnnnnnnnnnnnnnnnnnnnnnnnnnnnnnnnnnnnnnnnnnnnnnnnnnnnnnnnnnnnnnnnnnnnnnnnnnnnnnnnnnnnnnnnnnnnnnnnnnnnnnnnnnnnnnnnnnnnnnnnnnnnnnnnnnnnnnnnnnnnnnnnnnnnnnnnnnnnnnnnnnnnnnnnnnnnnnnnnnnnnnnnnnnnnnnnnnnnnnnnnnnnnnnnnnnnnnnnnnnnnnnnnnnnnnnnnnnnnnnnnnnnnnnnnnnnnnnnnnnnnnnnnnnnnnnnnnnnnnnnnnnnnnnnnnnnnnnnnnnnnnnnnnnnnnnnnnnnnnnnnnnnnnnnnnnnnnnnnnnnnnnnnnnnnnnnnnnnnnnnnnnnnnnnnnnnnnnnnnnnnnnnnnnnnnnnnnnnnnnnnnnnnnnnnnnnnnnnnnnnnnnnnnnnnnnnnnnnnnnnnnnnnnnnnnnnnnnnnnnnnnnnnnnnnnnnnnnnnnnnnnnnnnnnnnnnnnnnnnnnnnnnnnnnnnnnnnnnnnnnnnnnnnnnnnnnnnnnnnnnnnnnnnnnnnnnnnnnnnnnnnnnnnnnnnnnnnnnnnnnnnnnnnnnnnnnnnnnnnnnnnnnnnnnnnnnnnnnnnnnnnnnnnnnnnnnnnnnnnnnnnnnnnnnnnnnnnnnnnnnnnnnnnnnnnnnnnnnnnnnnnnnnnnnnnnnnnnnnnnnnnnnnnnnnnnnnnnnnnnnnnnnnnnnnnnnnnnnnnnnnnnnnnnnnnnnnnnnnnnnnnnnnnnnnnnnnnnnnnnnnnnnnnnnnnnnnnnnnnnnnnnnnnnnnnnnnnnnnnnnnnnnnnnnnnnnnnnnnnnnnnnnnnnnnnnnnnnnnnnnnnnnnnnnnnnnnnnnnnnnnnnnnnnnnnnnnnnnnnnnnnnnnnnnnnnnnnnnnnnnnnnnnnnnnnnnnnnnnnnnnnnnnnnnnnnnnnnnnnnnnnnnnnnnnnnnnnnnnnnnnnnnnnnnnnnnnnnnnnnnnnnnnnnnnnnnnnnnnnnnnnnnnnnnnnnnnnnnnnnnnnnnnnnnnnnnnnnnnnnnnnnnnnnnnnnnnnnnnnnnnnnnnnnnnnnnnnnnnnnnnnnnnnnnnnnnnnnnnnnnnnnnnnnnnnnnnnnnnnnnnnnnnnnnnnnnnnnnnnnnnnnnnnnnnnnnnnnnnnnnnnnnnnnnnnnnnnnnnnnnnnnnnnnnnnnnnnnnnnnnnnnnnnnnnnnnnnnnnnnnnnnnnnnnnnnnnnnnnnnnnnnnnnnnnnnnnnnnnnnnnnnnnnnnnnnnnnnnnnnnnnnnnnnnnnnnnnnnnnnnnnnnnnnnnnnnnnnnnnnnnnnnnnnnnnnnnnnnnnnnnnnnnnnnnnnnnnnnnnnnnnnnnnnnnnnnnnnnnnnnnnnnnnnnnnnnnnnnnnnnnnnnnnnnnnnnnnnnnnnnnnnnnnnnnnnnnnnnnnnnnnnnnnnnnnnnnnnnnnnnnnnnnnnnnnnnnnnnnnnnnnnnnnnnnnnnnnnnnnnnnnnnnnnnnnnnnnnnnnnnnnnnnnnnnnnnnnnnnnnnnnnnnnnnnnnnnnnnnnnnnnnnnnnnnnnnnnnnnnnnnnnnnnnnnnnnnnnnnnnnnnnnnnnnnnnnnnnnnnnnnnnnnnnnnnnnnnnnnnnnnnnnnnnnnnnnnnnnnnnnnnnnnnnnnnnnnnnnnnnnnnnnnnnnnnnnnnnnnnnnnnnnnnnnnnnnnnnnnnnnnnnnnnnnnnnnnnnnnnnnnnnnnnnnnnnnnnnnnnnnnnnnnnnnnnnnnnnnnnnnnnnnnnnnnnnnnnnnnnnnnnnnnnnnnnnnnnnnnnnnnnnnnnnnnnnnnnnnnnnnnnnnnnnnnnnnnnnnnnnnnnnnnnnnnnnnnnnnnnnnnnnnnnnnnnnnnnnnnnnnnnnnnnnnnnnnnnnnnnnnnnnnnnnnnnnnnnnnnnnnnnnnnnnnnnnnnnnnnnnnnnnnnnnnnnnnnnnnnnnnnnnnnnnnnnnnnnnnnnnnnnnnnnnnnnnnnnnnnnnnnnnnnnnnnnnnnnnnnnnnnnnnnnnnnnnnnnnnnnnnnnnnnnnnnnnnnnggaaagacgcgggcgtatttggcggcgttggcgcaaacttcgcacacggtggcgctggtgttgcccacgcaccagcttatcgaccaactgcttgccagtaccgatttagccgctacgggtttgtcgattgccgtttttcgccccgcccgtttgctggaaacccatgccgattaccaaaaacagcgcgaggcggcgcgtgcggcgcgggtcatgctctgcacggctgccagtgtggtgattgaccagcgtttgcaaggcgaataccacggtgctacgcggcgggatatgctgatttttgacgaagccgaccagcttcccgatatggctgctctgcaaagtgattgcgtgattgaagccagtttgctgcaaaaccagccgcttgccgtggcgctggaacgcattagcacgacttcatcccgacacattgccgccgaacaaaaagccgccgcgcgggtgatgctggaaattttggcagaacccgtgcgctacgcctcggtgggtttggatgaagcgggtaatgccgttttgcaccaccatttacccgcgcggttgatgaagaaaatcagcaatcgcaccagcacggtgtttatttctgccacgctatcgcacgcgggcaagtttgataattttcgccacgcaatggggctggaaaacatcagccgactttccaccagcatggaacccgaacgccacggcacactcgatttcaccttgcacgcgcacgaagtggaaactgaggcatggttcaccgcaaccctgcaaagcattcaaaccgccccgcgcccgaccttggtcgtaacgcccagccacgccttaaccgagcgtttacaagccgctatcggagaacaaacgggtttgctcatcaaagccggagcatgggcgggatttgataccccgacgcgctggcgaagcgtgattattccccgtgtgccattcggtgcgcccgtggtggtggatggaaaagcggtgacatcctaccttgacgcacacgccaccgccagccgccgaatgcgccaagccattgggcgcggaatccgtacaccggatgccgtttgtagcgtgacggttttggatgcacgggcaagcaaactgggggcatttgtgccggaacgcttcacgccccaatgggaacagcgccgcgtgtttgaagaaggcgcaagaatcgaactcgtgctatcaaaagcagagcgtgatgcgggcttgcgtaaagcggctttgaagcattacggcgaaaaatgccagcatccgcaatgcaatgtgacacagccgcatttattggatgtgcatcaccttgacccgattagtgaaggcatccgcaaaaccacattgaaagatgtcaccgtgttgtgtgccaatcaccaccgcgaagcgcattttttgggatttgttagacaatcgcagcatgaacccattgattaaatcccctgaacttctcctccccgctggctcgttggacaaaatgcgagccgcttacgattttggcgcagatgccgtgtatgcggggcaaccgcgctacagtttgcgggcgcgtaataacgaattcaagattgagcaaatcgaaatcggcattcgtgaagcgcatgaacgtggcaaaaaattctttgtcaccagcaatttgctgccgcataacgacaaggttcgcacttatctgcgcgatattgaacccgtcattgcgatgaaacccgatggtctcatcatggccgaccccggtctcatcatgatggtacgcgagggcatggacaaaggcaattatgcggatgtgccaatccacctttccgtgcaagccaacaccgtgaactatatggcggtgaaattttggcaaaaagtgggcgtgaaacgcatcattttgtcgcgcgaattgagcttggacgaaatcgaaaaaatccgccaagaatgccccgatatggagctggaagtattcgtgcatggcgcgttgtgcattgcgtattcggggcgctgtttgctctcgggctacttcaatcgccgtgacccgaaccaaggaacgtgtaccaacgcctgccgctggaattacgccacgcagccgagcgccgaaaaccccaatacgggcgaagcgattccggtggcgatggacaaaaatttcaatttcaaccaagcgcaagaggaagccgaacaatccttcgcggcgtgcggcggtagtgcgcgtcaccccgaagcggataaggtgtatttgctggaagaagcgggtcgcgcggggcaactcatgccgattatggaagacgagcacggcacgtacatcatgaacagcaaggatttacgcgccattgaacacgttgaacgcttggcgaaaatcggggtggattcgctcaaagtcgaagggcgcacgaaaagcctgtattacgtcgcccgcaccgcccaagcctaccgccgcgcgattgacgatgcggtggcgggtcgcgcctttaatccgaatttaatcactgagttagaaggattggcgaatcgcggattcaccagcggcttcttggagcgccgcccctcgcaagattatcaaaattacgaaaccggacattcggatattggacacagccattttgtcggcgaaattcgcagtattgaaaatggctgggctgaagtcgaagtgaaaaataaattcgaggtcggcgacacgatggaagtcattcaccccagcggcaatcaccgtttcaaactggaaaaaatccacaccctccaaggcgaggaattaaccaacgcccccggcagcccgtggcaagtgcggattccgctggaagagcggtttaagggagcgttgttggcgcgggttatggcgggtgtgggcggggcagcgaccgcgtaatcaatacgtaatcgtcaacgaatcggcatccacggtgatgaccggtttgcccaaaaccgcactggtggcgcgtgcgaaggtgtgcgcccattcggattcggcaaacttggcagggccagcgccttgggcaaccacgaccacgcgatccgccatgagcaacttgcccgtagcacgcaagggttcgcattcaaaggcgataaattgttcatccagccactcgcgggcttcatcgcggggcatggcttgctcggtggtcaattcaaccgtgatggggtctttgtctttgaaaataacggtaacaaggctgtgcatagtggtttaactccaaaatatcatccccgaatcatagaacgaatttgggggctatcgtacaaatttccaataacgcccttgttggctgtcgatacggtgcagcccaaaacgattgtcggcgcgttgttcattccgaatcaaataaaacaaatccgatagcaccgaacgggtttccgcaaaatacgaatgccccaaaaagctggtatcggttcccgtagcatcaatggtttcaattcccggaacgataatcaaactgctacccgaatcacccgcacgcggattgccatgcacttttttcgatgccatgagcgccttgtctttggacgaagcgtagagggttatggggcgtttggcggcggtgagggcgggggcgatgtcgcgtttgaacacatcggcatcaatatcgggggcggtgaggataatttctttcaatcggctgcgtaccgaaggctggtcgtttagcagcgatgccaccgcccgtgtgagcgcacggttacccatgctgtgggcaatcaaatacacgttttgcgcttgcgaacgggcaaagaaatcttccaaaaaccgccgtagattcgcttgtgtccattcgatattttgctcgtctaccgtgtaacgcgattctcgaccttgtgaaggccagctataaaaaatcgggacaccatcaaaattcaggtcatacgccatttgcgccgaacgccgcgcggcatcttcaaacgtgacgttgtagccgtgaataaaaataaaagcgctgtcctttgccgattttttgatttggttggcgaggttgctaaaaaacgcatctttggcactgatggacgtagtgagcaacataacgtgcttggagggcttcttttgaaactctaaacgccagatggaaggcgattccagctcacccatacggtggtcgcgcgggatgctgacttcgcacactccatagctcaacgcggcacgctgtgtgccaaaaacggcatcgggcttcttactgccagtcacattacggtcagtggcaaaaaaggtttgcacgaccgtgtaattggcattttttgtcacgcccttatcggaatttctatccaccggaacggctgcaccgctttgtacgggcatcgggggtggctcgggttgtatctgcggaatcgtgacttgggagtcgatggcggcctgtgccaaatagggtaaaacctctttggtacagcttaaagggtcggggtggctgcgtccgttacgggcttggatcaggcgctgtagcccttcgccctgctctttcgataacacaatatcttctttagcacccgccacccgtacccgcatcgacgctttggggcttttagaaccctctttcgcctcaaataggatagccgatgccttgccctgctgaatccaattgcaaatgatgtgcgctgcctgcgccgtttcaaccgccttatcgaatgccaaggcattgctactcccgacggcaatcagtaaaagaaacggcaggaacacgaatggaggaaagaaaaaccggaacacttttttcattttcgactcttcaaaaagtggctatggtcggaatcatagcgtttcaagtagagcgtgcgcggataagccccgaccagacgtaacaagttacaaaccctgttaccattttgacgacatcgaccaaactgacaaaaaagcccgctaaccgagaggctgcgggcttttggcgaaaagtggcggaagctgttgctttcgtaccactagaggactaaaggaactgtcaaagtatcaatcggagaatcatcaaccttcacaggacgaccgcgctttttctcagcaacgggcttttcaggcttcgccaccgccaactttaccggcttcgcagaaagacgattcagcaaatcagcgttttgctcaaacagtgcaacattgcgaccagcagctttagacaaatccgactcaaggcgtgaaacgacttcattggattttttcaattcaaactgcaaggcttgcaactgattctccaaacgcttaatttcagattgagcctcgctcaaatcggatgccatgcccagcttttcgtcctcaaaattttggcgcatggtttcaatatcacgaccagccgccgaatctgccgctttccaaacaaccatcatagccttcattaactcagattcgacctcgggcggaagcatccgaacaggcactttagcggcttcgtccgctaaaaaagtagtcaagtgcgcttgaatcgtagtaaagctaccctgattcccaagctccacacgcaacgcggaaaccgtaggcttaccgccgcgtgcaatgatggattgcgccgcgtctttaacttggtcgtaagtaagtgatgatgtacgccccatgatttactcctttttgataacgtaatcatattataacgtaattacattacgttattatcttattacgcatctttcaacagagagatgagctatccggcttcgatacccggtaaatcgcccgcttgaccgatgattgatggatgccgaaatagatagaaagggatttcatggtgtatttgccggaagcgtgcatacggatcaattcggcttctttttccttcggcaaagagcgagggcggccacaatgaacaccattggcgcgtgcaatcgtttgcccagcaatcgaacgctcacgaatcatagaccgttcaaactcggcaaaaatccccaagagttggagcatcatcatgcccagcgcgttgctggtatcaatcggctgggtgatgctgtggaaagttgcaccagcggcatcaatccggcgcataacgtcagagagatgcacaaagctacgggcgaagcggtcaatcttccacacataaaccttgtcaccctttttcaatttgcgcaaaagtgctttgagctttgggcgatcagaaataccgccgcacttttcttgcacgatttcatcgacaccgacacgatgaagggcatctagttggagggtagtttcttgttccgtggtgcttacacgggcgtatccataaatcatcgacattcctttataaagtgaatgccgtgggcgtgactaacccaaccagcaacaacgcgcaaacggaataccctgctttcaatgtgcgagtgaaagcacagcagcgcaaacaccaacaccgcacccaagcggcaacaaagcgcacgcatctttaataccgcgccgcttcgctaccatgggggctaagtgcgcccccatccctacgctacgctacggccctgcacggagcagcgcagcgcggaaagcacggggtggaattagagccgctgaacttgcagcacaagaagaatctgcgttttcgacttttcagaaccgcgagagcgcagccaatcaggaaggaacgaaacgccggaagaatccgaaccgtctttatcctgatctaagccacccagcaccaacaaatcgccatctttagcggttacgactgtcttcaattctcgcttttggagagtgggggaattattaacgcccgtggtagtttggacgaaattagaaatctgttgcaatatgtcgaggtcaatagacgactcccgaaccgttggcttgacttggaagatggttccagatggtttgtattcgaccgactggatagggttaccgtttttgtcgagttgcacgctaccgagtaccgggacatccgcacccaccgagaaacgagcatcaccaccagagcggacacgcaacgatggagtggtgacggtacgaaagcgggaatcagttgataaagcggataaaacggtatctaacgcaccagtgcgaagggttagagaattgccggaaacaacgccgtagctaatgcccaaggtgttaccgagaatgtcagcaaagaggcgaatagcgtttgtttccttatcgccaacggacacctcataaagcaccgctttaacgagtacctcaccaatcgggacatccaactgtaaaagaagtgccttgagttgctgaacttcgctttttgtaccgtgaaaaacgaaagaatctctatcggacttatccagcatcgagaacgcggaactgccagtatcgcgaggaacgggaggcgtgaggggtgatttactaacgccgttagctcctagagtgggagattgtggaatggctaaaggtgatgatgagcgaatagaacgctgacccgtaaaactgcccttagaaaatatagatgcagttaaatccatcaattcagataccgagcgatgagagggacggtaatggaatgtttccagttcttcctctttttttggagaagacggacgaatgaaaacataacccgaacgattttcaacttctaaagaaaaaacggataaaagagaagaaataaatgcgggaactttaagaatatcggattctttatagtgaactgtaacgagtttttgagaatccaataaatcagggtgaagagagtaattcttcttcaaaatatcaccataaaccaaccgtaaaaaatcattcaaaggtaatttatcgaaattcagagaaacaaacggaggagatttagaagggagtttaccgagtgtatcgatagaaggaggtggaacaggcgaagcagcaaagcaagaggacgacaacaccgccaataaaaaagtaatgataattctcatggtgcagggcgtgatgattggggagatgatgaaaaaagcgagggtgaaaagccagaagatgtacccgaccaattagaaaccggagcgccatccaaaaatcccgaaatatggattccgtcaacgttaaagccagggggattgagcaaagttcgatatttatcgggaggctgaaaaagaaaaacatatctgtaatatccaatttgataatagccaagtattcgccagtcagatttaagaggaggagaaggaggggattgagaagaaga

SEQ ID NO: 58 - DNA, 17819 bp, Artificial Sequence
  Synthetic Oligonucleotide
  misc_feature (1)..(9694): n is a, c, g, or t
nnnnnnnnnnnnnnnnnnnnnnnnnnnnnnnnnnnnnnnnnnnnnnnnnnnnnnnnnnnnnnnnnnnnnnnnnnnnnnnnnnnnnnnnnnnnnnnnnnnnnnnnnnnnnnnnnnnnnnnnnnnnnnnnnnnnnnnnnnnnnnnnnnnnnnnnnnnnnnnnnnnnnnnnnnnnnnnnnnnnnnnnnnnnnnnnnnnnnnnnnnnnnnnnnnnnnnnnnnnnnnnnnnnnnnnnnnnnnnnnnnnnnnnnnnnnnnnnnnnnnnnnnnnnnnnnnnnnnnnnnnnnnnnnnnnnnnnnnnnnnnnnnnnnnnnnnnnnnnnnnnnnnnnnnnnnnnnnnnnnnnnnnnnnnnnnnnnnnnnnnnnnnnnnnnnnnnnnnnnnnnnnnnnnnnnnnnnnnnnnnnnnnnnnnnnnnnnnnnnnnnnnnnnnnnnnnnnnnnnnnnnnnnnnnnnnnnnnnnnnnnnnnnnnnnnnnnnnnnnnnnnnnnnnnnnnnnnnnnnnnnnnnnnnnnnnnnnnnnnnnnnnnnnnnnnnnnnnnnnnnnnnnnnnnnnnnnnnnnnnnnnnnnnnnnnnnnnnnnnnnnnnnnnnnnnnnnnnnnnnnnnnnnnnnnnnnnnnnnnnnnnnnnnnnnnnnnnnnnnnnnnnnnnnnnnnnnnnnnnnnnnnnnnnnnnnnnnnnnnnnnnnnnnnnnnnnnnnnnnnnnnnnnnnnnnnnnnnnnnnnnnnnnnnnnnnnnnnnnnnnnnnnnnnnnnnnnnnnnnnnnnnnnnnnnnnnnnnnnnnnnnnnnnnnnnnnnnnnnnnnnnnnnnnnnnnnnnnnnnnnnnnnnnnnnnnnnnnnnnnnnnnnnnnnnnnnnnnnnnnnnnnnnnnnnnnnnnnnnnnnnnnnnnnnnnnnnnnnnnnnnnnnnnnnnnnnnnnnnnnnnnnnnnnnnnnnnnnnnnnnnnnnnnnnnnnnnnnnnnnnnnnnnnnnnnnnnnnnnnnnnnnnnnnnnnnnnnnnnnnnnnnnnnnnnnnnnnnnnnnnnnnnnnnnnnnnnnnnnnnnnnnnnnnnnnnnnnnnnnnnnnnnnnnnnnnnnnnnnnnnnnnnnnnnnnnnnnnnnnnnnnnnnnnnnnnnnnnnnnnnnnnnnnnnnnnnnnnnnnnnnnnnnnnnnnnnnnnnnnnnnnnnnnnnnnnnnnnnnnnnnnnnnnnnnnnnnnnnnnnnnnnnnnnnnnnnnnnnnnnnnnnnnnnnnnnnnnnnnnnnnnnnnnnnnnnnnnnnnnnnnnnnnnnnnnnnnnnnnnnnnnnnnnnnnnnnnnnnnnnnnnnnnnnnnnnnnnnnnnnnnnnnnnnnnnnnnnnnnnnnnnnnnnnnnnnnnnnnnnnnnnnnnnnnnnnnnnnnnnnnnnnnnnnnnnnnnnnnnnnnnnnnnnnnnnnnnnnnnnnnnnnnnnnnnnnnnnnnnnnnnnnnnnnnnnnnnnnnnnnnnnnnnnnnnnnnnnnnnnnnnnnnnnnnnnnnnnnnnnnnnnnnnnnnnnnnnnnnnnnnnnnnnnnnnnnnnnnnnnnnnnnnnnnnnnnnnnnnnnnnnnnnnnnnnnnnnnnnnnnnnnnnnnnnnnnnnnnnnnnnnnnnnnnnnnnnnnnnnnnnnnnnnnnnnnnnnnnnnnnnnnnnnnnnnnnnnnnnnnnnnnnnnnnnnnnnnnnnnnnnnnnnnnnnnnnnnnnnnnnnnnnnnnnnnnnnnnnnnnnnnnnnnnnnnnnnnnnnnnnnnnnnnnnnnnnnnnnnnnnnnnnnnnnnnnnnnnnnnnnnnnnnnnnnnnnnnnnnnnnnnnnnnnnnnnnnnnnnnnnnnnnnnnnnnnnnnnnnnnnnnnnnnnnnnnnnnnnnnnnnnnnnnnnnnnnnnnnnnnnnnnnnnnnnnnnnnnnnnnnnnnnnnnnnnnnnnnnnnnnnnnnnnnnnnnnnnnnnnnnnnnnnnnnnnnnnnnnnnnnnnnnnnnnnnnnnnnnnnnnnnnnnnnnnnnnnnnnnnnnnnnnnnnnnnnnnnnnnnnnnnnnnnnnnnnnnnnnnnnnnnnnnnnnnnnnnnnnnnnnnnnnnnnnnnnnnnnnnnnnnnnnnnnnnnnnnnnnnnnnnnnnnnnnnnnnnnnnnnnnnnnnnnnnnnnnnnnnnnnnnnnnnnnnnnnnnnnnnnnnnnnnnnnnnnnnnnnnnnnnnnnnnnnnnnnnnnnnnnnnnnnnnnnnnnnnnnnnnnnnnnnnnnnnnnnnnnnnnnnnnnnnnnnnnnnnnnnnnnnnnnnnnnnnnnnnnnnnnnnnnnnnnnnnnnnnnnnnnnnnnnnnnnnnnnnnnnnnnnnnnnnnnnnnnnnnnnnnnnnnnnnnnnnnnnnnnnnnnnnnnnnnnnnnnnnnnnnnnnnnnnnnnnnnnnnnnnnnnnnnnnnnnnnnnnnnnnnnnnnnnnnnnnnnnnnnnnnnnnnnnnnnnnnnnnnnnnnnnnnnnnnnnnnnnnnnnnnnnnnnnnnnnnnnnnnnnnnnnnnnnnnnnnnnnnnnnnnnnnnnnnnnnnnnnnnnnnnnnnnnnnnnnnnnnnnnnnnnnnnnnnnnnnnnnnnnnnnnnnnnnnnnnnnnnnnnnnnnnnnnnnnnnnnnnnnnnnnnnnnnnnnnnnnnnnnnnnnnnnnnnnnnnnnnnnnnnnnnnnnnnnnnnnnnnnnnnnnnnnnnnnnnnnnnnnnnnnnnnnnnnnnnnnnnnnnnnnnnnnnnnnnnnnnnnnnnnnnnnnnnnnnnnnnnnnnnnnnnnnnnnnnnnnnnnnnnnnnnnnnnnnnnnnnnnnnnnnnnnnnnnnnnnnnnnnnnnnnnnnnnnnnnnnnnnnnnnnnnnnnnnnnnnnnnnnnnnnnnnnnnnnnnnnnnnnnnnnnnnnnnnnnnnnnnnnnnnnnnnnnnnnnnnnnnnnnnnnnnnnnnnnnnnnnnnnnnnnnnnnnnnnnnnnnnnnnnnnnnnnnnnnnnnnnnnnnnnnnnnnnnnnnnnnnnnnnnnnnnnnnnnnnnnnnnnnnnnnnnnnnnnnnnnnnnnnnnnnnnnnnnnnnnnnnnnnnnnnnnnnnnnnnnnnnnnnnnnnnnnnnnnnnnnnnnnnnnnnnnnnnnnnnnnnnnnnnnnnnnnnnnnnnnnnnnnnnnnnnnnnnnnnnnnnnnnnnnnnnnnnnnnnnnnnnnnnnnnnnnnnnnnnnnnnnnnnnnnnnnnnnnnnnnnnnnnnnnnnnnnnnnnnnnnnnnnnnnnnnnnnnnnnnnnnnnnnnnnnnnnnnnnnnnnnnnnnnnnnnnnnnnnnnnnnnnnnnnnnnnnnnnnnnnnnnnnnnnnnnnnnnnnnnnnnnnnnnnnnnnnnnnnnnnnnnnnnnnnnnnnnnnnnnnnnnnnnnnnnnnnnnnnnnnnnnnnnnnnnnnnnnnnnnnnnnnnnnnnnnnnnnnnnnnnnnnnnnnnnnnnnnnnnnnnnnnnnnnnnnnnnnnnnnnnnnnnnnnnnnnnnnnnnnnnnnnnnnnnnnnnnnnnnnnnnnnnnnnnnnnnnnnnnnnnnnnnnnnnnnnnnnnnnnnnnnnnnnnnnnnnnnnnnnnnnnnnnnnnnnnnnnnnnnnnnnnnnnnnnnnnnnnnnnnnnnnnnnnnnnnnnnnnnnnnnnnnnnnnnnnnnnnnnnnnnnnnnnnnnnnnnnnnnnnnnnnnnnnnnnnnnnnnnnnnnnnnnnnnnnnnnnnnnnnnnnnnnnnnnnnnnnnnnnnnnnnnnnnnnnnnnnnnnnnnnnnnnnnnnnnnnnnnnnnnnnnnnnnnnnnnnnnnnnnnnnnnnnnnnnnnnnnnnnnnnnnnnnnnnnnnnnnnnnnnnnnnnnnnnnnnnnnnnnnnnnnnnnnnnnnnnnnnnnnnnnnnnnnnnnnnnnnnnnnnnnnnnnnnnnnnnnnnnnnnnnnnnnnnnnnnnnnnnnnnnnnnnnnnnnnnnnnnnnnnnnnnnnnnnnnnnnnnnnnnnnnnnnnnnnnnnnnnnnnnnnnnnnnnnnnnnnnnnnnnnnnnnnnnnnnnnnnnnnnnnnnnnnnnnnnnnnnnnnnnnnnnnnnnnnnnnnnnnnnnnnnnnnnnnnnnnnnnnnnnnnnnnnnnnnnnnnnnnnnnnnnnnnnnnnnnnnnnnnnnnnnnnnnnnnnnnnnnnnnnnnnnnnnnnnnnnnnnnnnnnnnnnnnnnnnnnnnnnnnnnnnnnnnnnnnnnnnnnnnnnnnnnnnnnnnnnnnnnnnnnnnnnnnnnnnnnnnnnnnnnnnnnnnnnnnnnnnnnnnnnnnnnnnnnnnnnnnnnnnnnnnnnnnnnnnnnnnnnnnnnnnnnnnnnnnnnnnnnnnnnnnnnnnnnnnnnnnnnnnnnnnnnnnnnnnnnnnnnnnnnnnnnnnnnnnnnnnnnnnnnnnnnnnnnnnnnnnnnnnnnnnnnnnnnnnnnnnnnnnnnnnnnnnnnnnnnnnnnnnnnnnnnnnnnnnnnnnnnnnnnnnnnnnnnnnnnnnnnnnnnnnnnnnnnnnnnnnnnnnnnnnnnnnnnnnnnnnnnnnnnnnnnnnnnnnnnnnnnnnnnnnnnnnnnnnnnnnnnnnnnnnnnnnnnnnnnnnnnnnnnnnnnnnnnnnnnnnnnnnnnnnnnnnnnnnnnnnnnnnnnnnnnnnnnnnnnnnnnnnnnnnnnnnnnnnnnnnnnnnnnnnnnnnnnnnnnnnnnnnnnnnnnnnnnnnnnnnnnnnnnnnnnnnnnnnnnnnnnnnnnnnnnnnnnnnnnnnnnnnnnnnnnnnnnnnnnnnnnnnnnnnnnnnnnnnnnnnnnnnnnnnnnnnnnnnnnnnnnnnnnnnnnnnnnnnnnnnnnnnnnnnnnnnnnnnnnnnnnnnnnnnnnnnnnnnnnnnnnnnnnnnnnnnnnnnnnnnnnnnnnnnnnnnnnnnnnnnnnnnnnnnnnnnnnnnnnnnnnnnnnnnnnnnnnnnnnnnnnnnnnnnnnnnnnnnnnnnnnnnnnnnnnnnnnnnnnnnnnnnnnnnnnnnnnnnnnnnnnnnnnnnnnnnnnnnnnnnnnnnnnnnnnnnnnnnnnnnnnnnnnnnnnnnnnnnnnnnnnnnnnnnnnnnnnnnnnnnnnnnnnnnnnnnnnnnnnnnnnnnnnnnnnnnnnnnnnnnnnnnnnnnnnnnnnnnnnnnnnnnnnnnnnnnnnnnnnnnnnnnnnnnnnnnnnnnnnnnnnnnnnnnnnnnnnnnnnnnnnnnnnnnnnnnnnnnnnnnnnnnnnnnnnnnnnnnnnnnnnnnnnnnnnnnnnnnnnnnnnnnnnnnnnnnnnnnnnnnnnnnnnnnnnnnnnnnnnnnnnnnnnnnnnnnnnnnnnnnnnnnnnnnnnnnnnnnnnnnnnnnnnnnnnnnnnnnnnnnnnnnnnnnnnnnnnnnnnnnnnnnnnnnnnnnnnnnnnnnnnnnnnnnnnnnnnnnnnnnnnnnnnnnnnnnnnnnnnnnnnnnnnnnnnnnnnnnnnnnnnnnnnnnnnnnnnnnnnnnnnnnnnnnnnnnnnnnnnnnnnnnnnnnnnnnnnnnnnnnnnnnnnnnnnnnnnnnnnnnnnnnnnnnnnnnnnnnnnnnnnnnnnnnnnnnnnnnnnnnnnnnnnnnnnnnnnnnnnnnnnnnnnnnnnnnnnnnnnnnnnnnnnnnnnnnnnnnnnnnnnnnnnnnnnnnnnnnnnnnnnnnnnnnnnnnnnnnnnnnnnnnnnnnnnnnnnnnnnnnnnnnnnnnnnnnnnnnnnnnnnnnnnnnnnnnnnnnnnnnnnnnnnnnnnnnnnnnnnnnnnnnnnnnnnnnnnnnnnnnnnnnnnnnnnnnnnnnnnnnnnnnnnnnnnnnnnnnnnnnnnnnnnnnnnnnnnnnnnnnnnnnnnnnnnnnnnnnnnnnnnnnnnnnnnnnnnnnnnnnnnnnnnnnnnnnnnnnnnnnnnnnnnnnnnnnnnnnnnnnnnnnnnnnnnnnnnnnnnnnnnnnnnnnnnnnnnnnnnnnnnnnnnnnnnnnnnnnnnnnnnnnnnnnnnnnnnnnnnnnnnnnnnnnnnnnnnnnnnnnnnnnnnnnnnnnnnnnnnnnnnnnnnnnnnnnnnnnnnnnnnnnnnnnnnnnnnnnnnnnnnnnnnnnnnnnnnnnnnnnnnnnnnnnnnnnnnnnnnnnnnnnnnnnnnnnnnnnnnnnnnnnnnnnnnnnnnnnnnnnnnnnnnnnnnnnnnnnnnnnnnnnnnnnnnnnnnnnnnnnnnnnnnnnnnnnnnnnnnnnnnnnnnnnnnnnnnnnnnnnnnnnnnnnnnnnnnnnnnnnnnnnnnnnnnnnnnnnnnnnnnnnnnnnnnnnnnnnnnnnnnnnnnnnnnnnnnnnnnnnnnnnnnnnnnnnnnnnnnnnnnnnnnnnnnnnnnnnnnnnnnnnnnnnnnnnnnnnnnnnnnnnnnnnnnnnnnnnnnnnnnnnnnnnnnnnnnnnnnnnnnnnnnnnnnnnnnnnnnnnnnnnnnnnnnnnnnnnnnnnnnnnnnnnnnnnnnnnnnnnnnnnnnnnnnnnnnnnnnnnnnnnnnnnnnnnnnnnnnnnnnnnnnnnnnnnnnnnnnnnnnnnnnnnnnnnnnnnnnnnnnnnnnnnnnnnnnnnnnnnnnnnnnnnnnnnnnnnnnnnnnnnnnnnnnnnnnnnnnnnnnnnnnnnnnnnnnnnnnnnnnnnnnnnnnnnnnnnnnnnnnnnnnnnnnnnnnnnnnnnnnnnnnnnnnnnnnnnnnnnnnnnnnnnnnnnnnnnnnnnnnnnnnnnnnnnnnnnnnnnnnnnnnnnnnnnnnnnnnnnnnnnnnnnnnnnnnnnnnnnnnnnnnnnnnnnnnnnnnnnnnnnnnnnnnnnnnnnnnnnnnnnnnnnnnnnnnnnnnnnnnnnnnnnnnnnnnnnnnnnnnnnnnnnnnnnnnnnnnnnnnnnnnnnnnnnnnnnnnnnnnnnnnnnnnnnnnnnnnnnnnnnnnnnnnnnnnnnnnnnnnnnnnnnnnnnnnnnnnnnnnnnnnnnnnnnnnnnnnnnnnnnnnnnnnnnnnnnnnnnnnnnnnnnnnnnnnnnnnnnnnnnnnnnnnnnnnnnnnnnnnnnnnnnnnnnnnnnnnnnnnnnnnnnnnnnnnnnnnnnnnnnnnnnnnnnnnnnnnnnnnnnnnnnnnnnnnnnnnnnnnnnnnnnnnnnnnnnnnnnnnnnnnnnnnnnnnnnnnnnnnnnnnnnnnnnnnnnnnnnnnnnnnnnnnnnnnnnnnnnnnnnnnnnnnnnnnnnnnnnnnnnnnnnnnnnnnnnnnnnnnnnnnnnnnnnnnnnnnnnnnnnnnnnnnnnnnnnnnnnnnnnnnnnnnnnnnnnnnnnnnnnnnnnnnnnnnnnnnnnnnnnnnnnnnnnnnnnnnnnnnnnnnnnnnnnnnnnnnnnnnnnnnnnnnnnnnnnnnnnnnnnnnnnnnnnnnnnnnnnnnnnnnnnnnnnnnnnnnnnnnnnnnnnnnnnnnnnnnnnnnnnnnnnnnnnnnnnnnnnnnnnnnnnnnnnnnnnnnnnnnnnnnnnnnnnnnnnnnnnnnnnnnnnnnnnnnnnnnnnnnnnnnnnnnnnnnnnnnnnnnnnnnnnnnnnnnnnnnnnnnnnnnnnnnnnnnnnnnnnnnnnnnnnnnnnnnnnnnnnnnnnnnnnnnnnnnnnnnnnnnnnnnnnnnnnnnnnnnnnnnnnnnnnnnnnnnnnnnnnnnnnnnnnnnnnnnnnnnnnnnnnnnnnnnnnnnnnnnnnnnnnnnnnnnnnnnnnnnnnnnnnnnnnnnnnnnnnnnnnnnnnnnnnnnnnnnnnnnnnnnnnnnnnnnnnnnnnnnnnnnnnnnnnnnnnnnnnnnnnnnnnnnnnnnnnnnnnnnnnnnnnnnnnnnnnnnnnnnnnnnnnnnnnnnnnnnnnnnnnnnnnnnnnnnnnnnnnnnnnnnnnnnnnnnnnnnnnnnnnnnnnnnnnnnnnnnnnnnnnnnnnnnnnnnnnnnnnnnnnnnnnnnnnnnnnnnnnnnnnnnnnnnnnnnnnnnnnnnnnnnnnnnnnnnnnnnnnnnnnnnnnnnnnnnnnnnnnnnnnnnnnnnnnnnnnnnnnnnnnnnnnnnnnnnnnnnnnnnnnnnnnnnnnnnnnnnnnnnnnnnnnnnnnnnnnnnnnnnnnnnnnnnnnnnnnnnnnnnnnnnnnnnnnnnnnnnnnnnnnnnnnnnnnnnnnnnnnnnnnnnnnnnnnnnnnnnnnnnnnnnnnnnnnnnnnnnnnnnnnnnnnnnnnnnnnnnnnnnnnnnnnnnnnnnnnnnnnnnnnnnnnnnnnnnnnnnnnnnnnnnnnnnnnnnnnnnnnnnnnnnnnnnnnnnnnnnnnnnnnnnnnnnnnnnnnnnnnnnnnnnnnnnnnnnnnnnnnnnnnnnnnnnnnnnnnnnnnnnnnnnnnnnnnnnnnnnnnnnnnnnnnnnnnnnnnnnnnnnnnnnnnnnnnnnnnnnnnnnnnnnnnnnnnnnnnnnnnnnnnnnnnnnnnnnnnnnnnnnnnnnnnnnnnnnnnnnnnnnnnnnnnnnnnnnnnnnnnnnnnnnnnnnnnnnnnnnnnnnnnnnnnnnnnnnnnnnnnnnnnnnnnnnnnnnnnnnnnnnnnnnnnnnnnnnnnnnnnnnnnnnnnnnnnnnnnnnnnnnnnnnnnnnnnnnnnnnnnnnnnnnnnnnnnnnnnnnnnnnnnnnnnnnnnnnnnnnnnnnnnnnnnnnnnnnnnnnnnnnnnnnnnnnnnnnnnnnnnnnnnnnnnnnnnnnnnnnnnnnnnnnnnnnnnnnnnnnnnnnnnnnnnnnnnnnnnnnnnnnnnnnnnnnnnnnnnnnnnnnnnnnnnnnnnnnnnnnnnnnnnnnnnnnnnnnnnnnnnnnnnnnnnnnnnnnnnnnnnnnnnnnnnnnnnnnnnnnnnnnnnnnnnnnnnnnnnnnnnnnnnnnnnnnnnnnnnnnnnnnnnnnnnnnnnnnnnnnnnnnnnnnnnnnnnnnnnnnnnnnnnnnnnnnnnnnnnnnnnnnnnnnnnnnnnnnnnnnnnnnnnnnnnnnnnnnnnnnnnnnnnnnnnnnnnnnnnnnnnnnnnnnnnnnnnnnnnnnnnnnnnnnnnnnnnnnnnnnnnnnnnnnnnnnnnnnnnnnnnnnnnnnnnnnnnnnnnnnnnnnnnnnnnnnnnnnnnnnnnnnnnnnnnnnnnnnnnnnnnnnnnnnnnnnnnnnnnnnnnnnnnnnnnnnnnnnnnnnnnnnnnnnnnnnnnnnnnnnnnnnnnnnnnnnnnnnnnnnnnnnnnnnnnnnnnnnnnnnnnnnnnnnnnnnnnnnnnnnnnnnnnnnnnnnnnnnnnnnnnnnnnnnnnnnnnnnnnnnnnnnnnnnnnnnnnnnnnnnnnnnnnnnnnnnnnnnnnnnnnnnnnnnnnnnnnnnnnnnnnnnnnnnnnnnnnnnnnnnnnnnnnnnnnnnnnnnnnnnnnnnnnnnnnnnnnnnnnnnnnnnnnnnnnnnnnnnnnnnnnnnnnnnnnnnnnnnnnnnnnnnnnnnnnnnnnnnnnnnnnnnnnnnnnnnnnnnnnnnnnnnnnnnnnnnnnnnnnnnnnnnnnnnnnnnnnnnnnnnnnnnnnnnnnnnnnnnnnnnnnnnnnnnnnnnnnnnnnnnnnnnnnnnnnnnnnnnnnnnnnnnnnnnnnnnnnnnnnnnnnnnnnnnnnnnnnnnnnnnnnnnnnnnnnnnnnnnnnnnnnnnnnnnnnnnnnnnnnnnnnnnnnnnnnnnnnnnnnnnccactctttaaacgggtggttactggaactcgagggagatcagaatcaccgtcagcaacgatcaagccactctgcgcatgggtggttactggaactacgtcacctggaagggcgctaagtttgtcgatcaagccactccgtaaatgagtggttactggaacacgcgtgggactttcgcgcaaaagcacgtaggttaagccactcggtaaatgggtggttaccgaaacacccacagaacgggcctgctgacggcaaaggatcaagcctccaaacccgttttttgctaattgaaatagggtaagagaatgtttcgctcaacagaacaatcaaacgttgcagtaatcgttgccaagcacatgaccgttgatgatgccactctgttgctccaaggcggtacgggcatcggaaagacccgtgcctacctgtctgcgctaattcgatctggccgacgggtcgctatcgtcctacccactcatccgttgattgaccaattgcttgcatcaaacgatctggcggtaactcgaggcgaggccacaatcgcagcgttccgcccggcacgaatgtttgacagcaaggttggatacgaacaaaacaagcgagaggctattgccgctcaagtgatgctctgcaccgccgccagcgtgattattgaccaacgcttggatggcgaatacaacggctccaccacgcgttcctatatcttgttcgacgaagctgaccaactaccggacatggcagccctacaaagcgatttcaccatcacgcaggccgaactcacagagatgggcatccgcctgacgaccgtgagggaaaccttgcaggcgattctcgcgaagaaaccgcgcatcgtcgaacccgaaatcagggccgccgcacggatcattctcgacgccatcgaggaacctgtgcgatatcaatctgccggcatcagcgacgacggcgacatcatgctcacgcacaaactgcctgggcgactgttgaaacaaatcagcaaccggagcaacgtggccttcgtttctgcaacgctgaccgtcgggggttacttcagggattttcagaattcgatgggcatcgccagcatcagccgcctgtcggctgcgattgaaccggagcagcacggtacgctcgattttcacataatcccgatggaagtcgacacgccggaatggatggccgctgttatgcaaatggccaacgctgcacccaggccactgctgatcgccaccacttcgcacgacctgtcgagcctgctcggtgagcaactggtaggggcagtgatccgcactgccgaagaaacagcgtcacaggctgcagcgcgagttcctgccgatggaatattggtctccgctggcgcatgggccggtctggatacccccctgcgctggcgatcggtcatcgtgccgcgtgtgccgtacagccagccggttgtggtcgatggcgaaatcacgaccagctatcttgacgcaaaaaacacggcagttcgccgcttgcggcaggtcatcgggcgtggactgcgaacaccggacgccgtgtgcagcgtctatgtcgtcgatggccgcgccgagaaattgggctccttcgttccggagcgtttcgctgcggcatgggatggccgaacctatctggaaggcgcaaagaaagaactgcagatctccaagtccgaacgcgatccggcaatacgtcgggccgcgctcaaccactacggacggaagtgcatggccactggctgcggattcgtgccgaaggtcgattcgcaactcgatgtccaccacctcgacccgattgccgatggtgtgcgtcccaccaaactgaaggacgtggtggttttctgtgtcaactgccaccgactagcgcactcagccacgcccccacttctactatgttgaacgtgggcaagagcaatcaacggcgcgggccaaatcaccacgcaacaaattggctggactaggccgacccaccctggcaccctcagcgcgcttgcgcgagcagggcgtccaggcgcatcgacgccgcatcgcgtgaaacacctttcggcaacagcggctccgggctgtccatggcttcgcgcaagcactcaatcacgtccttgcgatcggctggcttccgggcgaggcgacaggacatggcgaggccagcgagcaaggcccgatcatcctggggtaagcgcaagacgtcaggccacaccagctccagcttctcaatgtcggcatgcgcctgctcatgacctgcccactggccaacggcagcagccaaggcggtggcgatgaggccggagatcaaaaggatgcgttggaattgcgtcatcgaggtctttgttgagcaggcagttggggctgaaatatatcatggcccccaatgcgcagcctgcagcgctggggacagctcaaatcccgccgcggaacgaaagcgttcggcagacgcgcggatgtagtcgagtatccactccgcagtgatccacttgcgaccgagctcctcagcggcctttgccgtggtcagtttgcctccgaaaggatcggcaatcagatcgcctggctcggaaaggaagcggatcaggaagctggccagcgagagcggaaacggcgctccgtgtgcctgcagaccgagcgcggcggcatctttgcggtactgccgatgatcggggcagctgtgcccaaggctgagcacgtttcgcggaattctccctgccgtcggattcccatagcttccggggcggatgttgtacgcaccatcagcgaagctcgccgcgcgcttctcgccgccggccgcaatcaacgcgagatggcgcgccgaatgaggctccagcacccgacgattgtcagacttaaccagctgcgggtcattggtgagccaatacaccgttctcccacgcaacgttaagctgcacccgctctttgctcgcccattgaatcgggccaggaggtttcgacttgttgtgccagaccaagcggtccatcagatgaagacccaagcggtcatgaagcgccaacagcatcctttccagatagagcgatcgggcgggcgtacccgtctcgaaaatgtcattgctcacattcagacagagcgaaccgccaggggcgagatttgcgaccacgggctcaagggtccgacatatgaaatcgacgtattcgtgttcgcctggatttccgtaggcacgaggttttcgcagaggatagggcggactggtgatcgccaaaacgataggcgtatccagtctcggaaaaacacgctgacagctgccccagatggcgatgccaaggtcagttgagaaagccagcatcccgacgtcgggcagggcacgccgcagtttcttttcgccgaggtcggtcaggcgccacagcccgcgctcaccgtcgacgtgctcaatcagccccaggtgcttgagcgtctgttggtgccagcgaattttccgcttgagcagactgtgttcctgccggcttctcccgatggggacgcggctggccaattcatcgcaactgatcccggcccgactggcgacggtttggtacagggtcttgttgcccagccgaccgtcgtgcgtggaaccataggttgaggagacgtggtcgaagaggtcgagttgggaggatggcccggcgggaatcggcgaggaggctgcgaactttaaagggacttgcacgctcaactccagatttcagtgactttgtgtgacatcacgatatccgagcgcagctgcaaaaccagtccccaaaatgcgccagcgggaatcgatcggcggcggttcttgttgtttggttgctgcctaccggcaggacaacaacggcaaagccatcgaaacggcggtcaaagacgctgccgaccaaccagccgcacaaaggcctcagcggacgccgcaggaatcgtcgtcccaagaatcgcctgcttccaaccctttgccggcggccaggccacgccgagcaattccagctgggccttcgaccatccccccttggcgctcatcccggcttcgagcaggtcggcggagacaacaacgaggaagtgcggggcggacgattccatgctgcgacgcgacctgatgagaaaaagaaaacaataccatccggcatggggtttgcgcgcagccgagagaacgactcttcattggtgttcttcctgccggaatttcctatgcggatcgccatcgagagaaacaaaccgcagtcgggcgccaaattgcgggagtgcgcttgcatctcggcgatcatcatcatgcgcagcgaatttcggaatctggcatttgcccccttgcgtgctccgcaaggagtgggacaattggagcttaccttgagaacgaaaaaaaaaatggctttgtcgaaactcacacttgccgatcaaagcgtccttagcctgatgacaaaggggacgatcatattccgtgggcaccgcgggtccgctcgtccgttaggaaaagtaatcacggcccaaggtgcgtttattgaggtgtcatccatgatgctgcatcggttcgaaaacgcgggaattccaatggagacctaccaaaacaacgccactacgggatgggaaacggtcattcctcagaagaatcgtgatgcagtcgcggcgatgattgaagccgcctcatatcatgtcaccatgtaacgatacggaaaagacgggcctacatgaatccagacgacttcaacgaacgcaaactcaaaccccgcccgatcactgcctccggtcgggcgctcctggcgcttatgcgcctatccgacatcacggaaaatcgcttgcaggaaaaggttagggctctataccttcagcgggagttgcatgaagtgtcgtcagcccttatgaggccatgccccgatgcagcccgattggtagttgcgtcggagtacgaacgactgaccgatgccgttgttttccgagaacgtaatgggtatttcgagccatgctactcgattaaagatttgggcgatccgtctcccatggacacagcgtgtctcataggcgcttcgttcctagtgcgcgcccagcgtagcgatttgactgaaccggaagtcatcgatatttcggcccaaatgggtcatgagatcgtcaaagcgattagcggcctgagtgcttggcaaattgattttcccgtccctgatgcgttctggcatggtgaggcatttcctggcaacttgaaactgaatgtcctgtttgaactgatggctctggggtcatccgctcaactgcaacaacgatccgtcttggacgtcgtacggcatctgcggcgtgagatgttggagaggcggaatgcagatccgctggatcggtccctatcgttgccggtgactctgtttggttatgcgcgccggcggaatatttctgagcgtgggacggctgcgctggaatacgccacccacggctttgaggctgaactacaagagagcattgaggatatagaacggaagtgcaataacatcgacctcaacggctatccagtctcattcatgcgtctggatctattttcagcggctcaagaaacagccgaaacggtgtcccgcgggtctcacttcctctcactccttgatacgtcgcgggagcgcgcaacgacagacccgcttgttgtttccgccgtcccgatctcgcgcggcgacctggagttacgtctggatgctctcaggattggcgtatggcgggactcgggcgcttttgtgtatgggacggaatgggtgactaaaccgcgtgagacgatgcagatgctcaccaacatgctcacggatatcggtcaaagcgaaaacataccagtttgcgttcatccgcagatattgagcaaagaagtcccgacggcggtgaatgcaaccctgtatccgacacgctccggcgactggctcgatccaaaggtcgcccaagcgggtgctggcgcccatcttctcaagacggtgaactggacatatccaggtcttgacgatcttgatgaggcgaggatgcgcaacctgccaatgcctcgccgttttctggcggcaggcctggtcgagatgatccagcaacactatgtcccggatgtctaccgaaaactcaaggagcttctttcggatttatcgttctctgatgagttagtgacggatgaattggtcaaggcattccccacctttgcggaattgctccataacgctccgcatggcgcgctgccgacggatgcagagatcagcgccttgcgatggcactggacaaaatcgcctctcttccttatccgcccagaattgacagagcgtttgcagctaaccgatctggggctcgatgtagaggcgagttttgcgatcatgccctatcccctcttctatattcattttcccggcgggcgctcggacttgtcttgggttgatgtcagcgaagaatctttgaaggtgaccggtgcttttgtgcatcaacatggaatggcatcggctgaacctggcaggccgagaatcctggacattctcttttgtgctgattcgaccgatccgcaatcggaggcctgggggttcgtggatcttcgtctgacaatcgaagatgaggccgaaactctcgaacaagtcttccagcggtgggtcgcttctaacaagcctgaagagatggacgatgagtgggtcgctttctcgcggatactcatcgatgaggtgcttaaaattctcgtctatcttggcatgcgtgatgcgcgtaaggaagatcggccggagcgcacgaaattcctaaagacggccagcaacaagacaccggggcagcggctaactactgcggccaaagctcgttggctcttcgattacatctacgttggacctgaagaaagtgtcgataatattgccgccacaggtctgacgaaccgcaaggtcaaaccgcacttcaggcgaggccaccgccacacggtatgttacggtcgagggcgcgagcagcggcgccttgccttgtatccgccagtcattgtcaatgccgacatgatcggccacggcgtcgagatcaggccgaaggattacattgttcgatgattcgacaaggaaaagacgatgaatgtggtaagtgattggcggtaccgatcggacgcgctctactagggaaccacggaaccatgtgaggcatgggaggcgtccggaaacatcggcggtcgtactccatcgagccagtccaattctgcggaaaaaccggaaaacatgatggcttcaaagaagcgggcaagcaaaggtgatacttgggatgatgtgatggacgatatttcgcagatcatgcctatcccgttgttcgtcattttgatcatcgctggtgtagttggccgcatcttcggctatatctgatcggaaagaagctcatgacggcagtagcaaatgacgaagcctgcagcggttgcggttgtgatcgcaaagaaggctgtctgcgccacgccgttctgcgaggggatgtgccgtgcttcccagtggccgacaatatttgcggccaaggcagcgactacgctgcttttgtgcaatggaaccggatgggtagaccgatggcgacccccggcctcttccaatagagagggaaagacgctatggataagcagcaagccaaggacaagatcgtggcatccgaaaaggccagcatgacggcgctcgctggcatgaggaaggccggaaacgctctgctggtcaatgtgcctgtcaacggcttcggcgtgattcgcgaccatcaagcaatgcgccgccagcttgaagttgcacagtcaccaagttgcccgagaagcatcgtcgttaagggcggtgagggatagggcaggatctttgttcgcacggtcaaccccaacggtaactgtacgttaacacagtatgagacgttgcacgaagatcgtcagaaccctccgccagcgtgtcaaggacaagcacgcgcgcgtcctcggggagatggcccgggacgttaacctgacgtggaatttctgcaacgaactgtcgttcaaaatcctcgaacgcgaacaccgcttctgcaattccgccgaactccagaagtatctgaacggcgcgagccgcgaaggtctgcgtgtcggttcggctgtcttccagcaggtggcggatgaatacgtcacccgtcgggtacagcacaagaaacggcgcctgaactggcggcgatctggtggatcgcggcgctcgctcggctggatcccgttcaaggatcgcgccgttcagtaccggaacgg

SEQ ID NO: 59 - DNA, 17819 bp, Artificial Sequence; identical to SEQ ID NO: 58
  Synthetic Oligonucleotide
  misc_feature (1)..(9694): n is a, c, g, or t

SEQ ID NO: 60 - DNA, 17732 bp, Artificial Sequence
  Synthetic Oligonucleotide
  misc_feature (1)..(9997): n is a, c, g, or t
nnnnnnnnnnnnnnnnnnnnnnnnnnnnnnnnnnnnnnnnnnnnnnnnnnnnnnnnnnnnnnnnnnnnnnnnnnnnnnnnnnnnnnnnnnnnnnnnnnnnnnnnnnnnnnnnnnnnnnnnnnnnnnnnnnnnnnnnnnnnnnnnnnnnnnnnnnnnnnnnnnnnnnnnnnnnnnnnnnnnnnnnnnnnnnnnnnnnnnnnnnnnnnnnnnnnnnnnnnnnnnnnnnnnnnnnnnnnnnnnnnnnnnnnnnnnnnnnnnnnnnnnnnnnnnnnnnnnnnnnnnnnnnnnnnnnnnnnnnnnnnnnnnnnnnnnnnnnnnnnnnnnnnnnnnnnnnnnnnnnnnnnnnnnnnnnnnnnnnnnnnnnnnnnnnnnnnnnnnnnnnnnnnnnnnnnnnnnnnnnnnnnnnnnnnnnnnnnnnnnnnnnnnnnnnnnnnnnnnnnnnnnnnnnnnnnnnnnnnnnnnnnnnnnnnnnnnnnnnnnnnnnnnnnnnnnnnnnnnnnnnnnnnnnnnnnnnnnnnnnnnnnnnnnnnnnnnnnnnnnnnnnnnnnnnnnnnnnnnnnnnnnnnnnnnnnnnnnnnnnnnnnnnnnnnnnnnnnnnnnnnnnnnnnnnnnnnnnnnnnnnnnnnnnnnnnnnnnnnnnnnnnnnnnnnnnnnnnnnnnnnnnnnnnnnnnnnnnnnnnnnnnnnnnnnnnnnnnnnnnnnnnnnnnnnnnnnnnnnnnnnnnnnnnnnnnnnnnnnnnnnnnnnnnnnnnnnnnnnnnnnnnnnnnnnnnnnnnnnnnnnnnnnnnnnnnnnnnnnnnnnnnnnnnnnnnnnnnnnnnnnnnnnnnnnnnnnnnnnnnnnnnnnnnnnnnnnnnnnnnnnnnnnnnnnnnnnnnnnnnnnnnnnnnnnnnnnnnnnnnnnnnnnnnnnnnnnnnnnnnnnnnnnnnnnnnnnnnnnnnnnnnnnnnnnnnnnnnnnnnnnnnnnnnnnnnnnnnnnnnnnnnnnnnnnnnnnnnnnnnnnnnnnnnnnnnnnnnnnnnnnnnnnnnnnnnnnnnnnnnnnnnnnnnnnnnnnnnnnnnnnnnnnnnnnnnnnnnnnnnnnnnnnnnnnnnnnnnnnnnnnnnnnnnnnnnnnnnnnnnnnnnnnnnnnnnnnnnnnnnnnnnnnnnnnnnnnnnnnnnnnnnnnnnnnnnnnnnnnnnnnnnnnnnnnnnnnnnnnnnnnnnnnnnnnnnnnnnnnnnnnnnnnnnnnnnnnnnnnnnnnnnnnnnnnnnnnnnnnnnnnnnnnnnnnnnnnnnnnnnnnnnnnnnnnnnnnnnnnnnnnnnnnnnnnnnnnnnnnnnnnnnnnnnnnnnnnnnnnnnnnnnnnnnnnnnnnnnnnnnnnnnnnnnnnnnnnnnnnnnnnnnnnnnnnnnnnnnnnnnnnnnnnnnnnnnnnnnnnnnnnnnnnnnnnnnnnnnnnnnnnnnnnnnnnnnnnnnnnnnnnnnnnnnnnnnnnnnnnnnnnnnnnnnnnnnnnnnnnnnnnnnnnnnnnnnnnnnnnnnnnnnnnnnnnnnnnnnnnnnnnnnnnnnnnnnnnnnnnnnnnnnnnnnnnnnnnnnnnnnnnnnnnnnnnnnnnnnnnnnnnnnnnnnnnnnnnnnnnnnnnnnnnnnnnnnnnnnnnnnnnnnnnnnnnnnnnnnnnnnnnnnnnnnnnnnnnnnnnnnnnnnnnnnnnnnnnnnnnnnnnnnnnnnnnnnnnnnnnnnnnnnnnnnnnnnnnnnnnnnnnnnnnnnnnnnnnnnnnnnnnnnnnnnnnnnnnnnnnnnnnnnnnnnnnnnnnnnnnnnnnnnnnnnnnnnnnnnnnnnnnnnnnnnnnnnnnnnnnnnnnnnnnnnnnnnnnnnnnnnnnnnnnnnnnnnnnnnnnnnnnnnnnnnnnnnnnnnnnnnnnnnnnnnnnnnnnnnnnnnnnnnnnnnnnnnnnnnnnnnnnnnnnnnnnnnnnnnnnnnnnnnnnnnnnnnnnnnnnnnnnnnnnnnnnnnnnnnnnnnnnnnnnnnnnnnnnnnnnnnnnnnnnnnnnnnnnnnnnnnnnnnnnnnnnnnnnnnnnnnnnnnnnnnnnnnnnnnnnnnnnnnnnnnnnnnnnnnnnnnnnnnnnnnnnnnnnnnnnnnnnnnnnnnnnnnnnnnnnnnnnnnnnnnnnnnnnnnnnnnnnnnnnnnnnnnnnnnnnnnnnnnnnnnnnnnnnnnnnnnnnnnnnnnnnnnnnnnnnnnnnnnnnnnnnnnnnnnnnnnnnnnnnnnnnnnnnnnnnnnnnnnnnnnnnnnnnnnnnnnnnnnnnnnnnnnnnnnnnnnnnnnnnnnnnnnnnnnnnnnnnnnnnnnnnnnnnnnnnnnnnnnnnnnnnnnnnnnnnnnnnnnnnnnnnnnnnnnnnnnnnnnnnnnnnnnnnnnnnnnnnnnnnnnnnnnnnnnnnnnnnnnnnnnnnnnnnnnnnnnnnnnnnnnnnnnnnnnnnnnnnnnnnnnnnnnnnnnnnnnnnnnnnnnnnnnnnnnnnnnnnnnnnnnnnnnnnnnnnnnnnnnnnnnnnnnnnnnnnnnnnnnnnnnnnnnnnnnnnnnnnnnnnnnnnnnnnnnnnnnnnnnnnnnnnnnnnnnnnnnnnnnnnnnnnnnnnnnnnnnnnnnnnnnnnnnnnnnnnnnnnnnnnnnnnnnnnnnnnnnnnnnnnnnnnnnnnnnnnnnnnnnnnnnnnnnnnnnnnnnnnnnnnnnnnnnnnnnnnnnnnnnnnnnnnnnnnnnnnnnnnnnnnnnnnnnnnnnnnnnnnnnnnnnnnnnnnnnnnnnnnnnnnnnnnnnnnnnnnnnnnnnnnnnnnnnnnnnnnnnnnnnnnnnnnnnnnnnnnnnnnnnnnnnnnnnnnnnnnnnnnnnnnnnnnnnnnnnnnnnnnnnnnnnnnnnnnnnnnnnnnnnnnnnnnnnnnnnnnnnnnnnnnnnnnnnnnnnnnnnnnnnnnnnnnnnnnnnnnnnnnnnnnnnnnnnnnnnnnnnnnnnnnnnnnnnnnnnnnnnnnnnnnnnnnnnnnnnnnnnnnnnnnnnnnnnnnnnnnnnnnnnnnnnnnnnnnnnnnnnnnnnnnnnnnnnnnnnnnnnnnnnnnnnnnnnnnnnnnnnnnnnnnnnnnnnnnnnnnnnnnnnnnnnnnnnnnnnnnnnnnnnnnnnnnnnnnnnnnnnnnnnnnnnnnnnnnnnnnnnnnnnnnnnnnnnnnnnnnnnnnnnnnnnnnnnnnnnnnnnnnnnnnnnnnnnnnnnnnnnnnnnnnnnnnnnnnnnnnnnnnnnnnnnnnnnnnnnnnnnnnnnnnnnnnnnnnnnnnnnnnnnnnnnnnnnnnnnnnnnnnnnnnnnnnnnnnnnnnnnnnnnnnnnnnnnnnnnnnnnnnnnnnnnnnnnnnnnnnnnnnnnnnnnnnnnnnnnnnnnnnnnnnnnnnnnnnnnnnnnnnnnnnnnnnnnnnnnnnnnnnnnnnnnnnnnnnnnnnnnnnnnnnnnnnnnnnnnnnnnnnnnnnnnnnnnnnnnnnnnnnnnnnnnnnnnnnnnnnnnnnnnnnnnnnnnnnnnnnnnnnnnnnnnnnnnnnnnnnnnnnnnnnnnnnnnnnnnnnnnnnnnnnnnnnnnnnnnnnnnnnnnnnnnnnnnnnnnnnnnnnnnnnnnnnnnnnnnnnnnnnnnnnnnnnnnnnnnnnnnnnnnnnnnnnnnnnnnnnnnnnnnnnnnnnnnnnnnnnnnnnnnnnnnnnnnnnnnnnnnnnnnnnnnnnnnnnnnnnnnnnnnnnnnnnnnnnnnnnnnnnnnnnnnnnnnnnnnnnnnnnnnnnnnnnnnnnnnnnnnnnnnnnnnnnnnnnnnnnnnnnnnnnnnnnnnnnnnnnnnnnnnnnnnnnnnnnnnnnnnnnnnnnnnnnnnnnnnnnnnnnnnnnnnnnnnnnnnnnnnnnnnnnnnnnnnnnnnnnnnnnnnnnnnnnnnnnnnnnnnnnnnnnnnnnnnnnnnnnnnnnnnnnnnnnnnnnnnnnnnnnnnnnnnnnnnnnnnnnnnnnnnnnnnnnnnnnnnnnnnnnnnnnnnnnnnnnnnnnnnnnnnnnnnnnnnnnnnnnnnnnnnnnnnnnnnnnnnnnnnnnnnnnnnnnnnnnnnnnnnnnnnnnnnnnnnnnnnnnnnnnnnnnnnnnnnnnnnnnnnnnnnnnnnnnnnnnnnnnnnnnnnnnnnnnnnnnnnnnnnnnnnnnnnnnnnnnnnnnnnnnnnnnnnnnnnnnnnnnnnnnnnnnnnnnnnnnnnnnnnnnnnnnnnnnnnnnnnnnnnnnnnnnnnnnnnnnnnnnnnnnnnnnnnnnnnnnnnnnnnnnnnnnnnnnnnnnnnnnnnnnnnnnnnnnnnnnnnnnnnnnnnnnnnnnnnnnnnnnnnnnnnnnnnnnnnnnnnnnnnnnnnnnnnnnnnnnnnnnnnnnnnnnnnnnnnnnnnnnnnnnnnnnnnnnnnnnnnnnnnnnnnnnnnnnnnnnnnnnnnnnnnnnnnnnnnnnnnnnnnnnnnnnnnnnnnnnnnnnnnnnnnnnnnnnnnnnnnnnnnnnnnnnnnnnnnnnnnnnnnnnnnnnnnnnnnnnnnnnnnnnnnnnnnnnnnnnnnnnnnnnnnnnnnnnnnnnnnnnnnnnnnnnnnnnnnnnnnnnnnnnnnnnnnnnnnnnnnnnnnnnnnnnnnnnnnnnnnnnnnnnnnnnnnnnnnnnnnnnnnnnnnnnnnnnnnnnnnnnnnnnnnnnnnnnnnnnnnnnnnnnnnnnnnnnnnnnnnnnnnnnnnnnnnnnnnnnnnnnnnnnnnnnnnnnnnnnnnnnnnnnnnnnnnnnnnnnnnnnnnnnnnnnnnnnnnnnnnnnnnnnnnnnnnnnnnnnnnnnnnnnnnnnnnnnnnnnnnnnnnnnnnnnnnnnnnnnnnnnnnnnnnnnnnnnnnnnnnnnnnnnnnnnnnnnnnnnnnnnnnnnnnnnnnnnnnnnnnnnnnnnnnnnnnnnnnnnnnnnnnnnnnnnnnnnnnnnnnnnnnnnnnnnnnnnnnnnnnnnnnnnnnnnnnnnnnnnnnnnnnnnnnnnnnnnnnnnnnnnnnnnnnnnnnnnnnnnnnnnnnnnnnnnnnnnnnnnnnnnnnnnnnnnnnnnnnnnnnnnnnnnnnnnnnnnnnnnnnnnnnnnnnnnnnnnnnnnnnnnnnnnnnnnnnnnnnnnnnnnnnnnnnnnnnnnnnnnnnnnnnnnnnnnnnnnnnnnnnnnnnnnnnnnnnnnnnnnnnnnnnnnnnnnnnnnnnnnnnnnnnnnnnnnnnnnnnnnnnnnnnnnnnnnnnnnnnnnnnnnnnnnnnnnnnnnnnnnnnnnnnnnnnnnnnnnnnnnnnnnnnnnnnnnnnnnnnnnnnnnnnnnnnnnnnnnnnnnnnnnnnnnnnnnnnnnnnnnnnnnnnnnnnnnnnnnnnnnnnnnnnnnnnnnnnnnnnnnnnnnnnnnnnnnnnnnnnnnnnnnnnnnnnnnnnnnnnnnnnnnnnnnnnnnnnnnnnnnnnnnnnnnnnnnnnnnnnnnnnnnnnnnnnnnnnnnnnnnnnnnnnnnnnnnnnnnnnnnnnnnnnnnnnnnnnnnnnnnnnnnnnnnnnnnnnnnnnnnnnnnnnnnnnnnnnnnnnnnnnnnnnnnnnnnnnnnnnnnnnnnnnnnnnnnnnnnnnnnnnnnnnnnnnnnnnnnnnnnnnnnnnnnnnnnnnnnnnnnnnnnnnnnnnnnnnnnnnnnnnnnnnnnnnnnnnnnnnnnnnnnnnnnnnnnnnnnnnnnnnnnnnnnnnnnnnnnnnnnnnnnnnnnnnnnnnnnnnnnnnnnnnnnnnnnnnnnnnnnnnnnnnnnnnnnnnnnnnnnnnnnnnnnnnnnnnnnnnnnnnnnnnnnnnnnnnnnnnnnnnnnnnnnnnnnnnnnnnnnnnnnnnnnnnnnnnnnnnnnnnnnnnnnnnnnnnnnnnnnnnnnnnnnnnnnnnnnnnnnnnnnnnnnnnnnnnnnnnnnnnnnnnnnnnnnnnnnnnnnnnnnnnnnnnnnnnnnnnnnnnnnnnnnnnnnnnnnnnnnnnnnnnnnnnnnnnnnnnnnnnnnnnnnnnnnnnnnnnnnnnnnnnnnnnnnnnnnnnnnnnnnnnnnnnnnnnnnnnnnnnnnnnnnnnnnnnnnnnnnnnnnnnnnnnnnnnnnnnnnnnnnnnnnnnnnnnnnnnnnnnnnnnnnnnnnnnnnnnnnnnnnnnnnnnnnnnnnnnnnnnnnnnnnnnnnnnnnnnnnnnnnnnnnnnnnnnnnnnnnnnnnnnnnnnnnnnnnnnnnnnnnnnnnnnnnnnnnnnnnnnnnnnnnnnnnnnnnnnnnnnnnnnnnnnnnnnnnnnnnnnnnnnnnnnnnnnnnnnnnnnnnnnnnnnnnnnnnnnnnnnnnnnnnnnnnnnnnnnnnnnnnnnnnnnnnnnnnnnnnnnnnnnnnnnnnnnnnnnnnnnnnnnnnnnnnnnnnnnnnnnnnnnnnnnnnnnnnnnnnnnnnnnnnnnnnnnnnnnnnnnnnnnnnnnnnnnnnnnnnnnnnnnnnnnnnnnnnnnnnnnnnnnnnnnnnnnnnnnnnnnnnnnnnnnnnnnnnnnnnnnnnnnnnnnnnnnnnnnnnnnnnnnnnnnnnnnnnnnnnnnnnnnnnnnnnnnnnnnnnnnnnnnnnnnnnnnnnnnnnnnnnnnnnnnnnnnnnnnnnnnnnnnnnnnnnnnnnnnnnnnnnnnnnnnnnnnnnnnnnnnnnnnnnnnnnnnnnnnnnnnnnnnnnnnnnnnnnnnnnnnnnnnnnnnnnnnnnnnnnnnnnnnnnnnnnnnnnnnnnnnnnnnnnnnnnnnnnnnnnnnnnnnnnnnnnnnnnnnnnnnnnnnnnnnnnnnnnnnnnnnnnnnnnnnnnnnnnnnnnnnnnnnnnnnnnnnnnnnnnnnnnnnnnnnnnnnnnnnnnnnnnnnnnnnnnnnnnnnnnnnnnnnnnnnnnnnnnnnnnnnnnnnnnnnnnnnnnnnnnnnnnnnnnnnnnnnnnnnnnnnnnnnnnnnnnnnnnnnnnnnnnnnnnnnnnnnnnnnnnnnnnnnnnnnnnnnnnnnnnnnnnnnnnnnnnnnnnnnnnnnnnnnnnnnnnnnnnnnnnnnnnnnnnnnnnnnnnnnnnnnnnnnnnnnnnnnnnnnnnnnnnnnnnnnnnnnnnnnnnnnnnnnnnnnnnnnnnnnnnnnnnnnnnnnnnnnnnnnnnnnnnnnnnnnnnnnnnnnnnnnnnnnnnnnnnnnnnnnnnnnnnnnnnnnnnnnnnnnnnnnnnnnnnnnnnnnnnnnnnnnnnnnnnnnnnnnnnnnnnnnnnnnnnnnnnnnnnnnnnnnnnnnnnnnnnnnnnnnnnnnnnnnnnnnnnnnnnnnnnnnnnnnnnnnnnnnnnnnnnnnnnnnnnnnnnnnnnnnnnnnnnnnnnnnnnnnnnnnnnnnnnnnnnnnnnnnnnnnnnnnnnnnnnnnnnnnnnnnnnnnnnnnnnnnnnnnnnnnnnnnnnnnnnnnnnnnnnnnnnnnnnnnnnnnnnnnnnnnnnnnnnnnnnnnnnnnnnnnnnnnnnnnnnnnnnnnnnnnnnnnnnnnnnnnnnnnnnnnnnnnnnnnnnnnnnnnnnnnnnnnnnnnnnnnnnnnnnnnnnnnnnnnnnnnnnnnnnnnnnnnnnnnnnnnnnnnnnnnnnnnnnnnnnnnnnnnnnnnnnnnnnnnnnnnnnnnnnnnnnnnnnnnnnnnnnnnnnnnnnnnnnnnnnnnnnnnnnnnnnnnnnnnnnnnnnnnnnnnnnnnnnnnnnnnnnnnnnnnnnnnnnnnnnnnnnnnnnnnnnnnnnnnnnnnnnnnnnnnnnnnnnnnnnnnnnnnnnnnnnnnnnnnnnnnnnnnnnnnnnnnnnnnnnnnnnnnnnnnnnnnnnnnnnnnnnnnnnnnnnnnnnnnnnnnnnnnnnnnnnnnnnnnnnnnnnnnnnnnnnnnnnnnnnnnnnnnnnnnnnnnnnnnnnnnnnnnnnnnnnnnnnnnnnnnnnnnnnnnnnnnnnnnnnnnnnnnnnnnnnnnnnnnnnnnnnnnnnnnnnnnnnnnnnnnnnnnnnnnnnnnnnnnnnnnnnnnnnnnnnnnnnnnnnnnnnnnnnnnnnnnnnnnnnnnnnnnnnnnnnnnnnnnnnnnnnnnnnnnnnnnnnnnnnnnnnnnnnnnnnnnnnnnnnnnnnnnnnnnnnnnnnnnnnnnnnnnnnnnnnnnnnnnnnnnnnnnnnnnnnnnnnnnnnnnnnnnnnnnnnnnnnnnnnnnnnnnnnnnnnnnnnnnnnnnnnnnnnnnnnnnnnnnnnnnnnnnnnnnnnnnnnnnnnnnnnnnnnnnnnnnnnnnnnnnnnnnnnnnnnnnnnnnnnnnnnnnnnnnnnnnnnnnnnnnnnnnnnnnnnnnnnnnnnnnnnnnnnnnnnnnnnnnnnnnnnnnnnnnnnnnnnnnnnnnnnnnnnnnnnnnnnnnnnnnnnnnnnnnnnnnnnnnnnnnnnnnnnnnnnnnnnnnnnnnnnnnnnnnnnnnnnnnnnnnnnnnnnnnnnnnnnnnnnnnnnnnnnnnnnnnnnnnnnnnnnnnnnnnnnnnnnnnnnnnnnnnnnnnnnnnnnnnnnnnnnnnnnnnnnnnnnnnnnnnnnnnnnnnnnnnnnnnnnnnnnnnnnnnnnnnnnnnnnnnnnnnnnnnnnnnnnnnnnnnnnnnnnnnnnnnnnnnnnnnnnnnnnnnnnnnnnnnnnnnnnnnnnnnnnnnnnnnnnnnnnnnnnnnnnnnnnnnnnnnnnnnnnnnnnnnnnnnnnnnnnnnnnnnnnnnnnnnnnnnnnnnnnnnnnnnnnnnnnnnnnnnnnnnnnnnnnnnnnnnnnnnnnnnnnnnnnnnnnnnnnnnnnnnnnnnnnnnnnnnnnnnnnnnnnnnnnnnnnnnnnnnnnnnnnnnnnnnnnnnnnnnnnnnnnnnnnnnnnnnnnnnnnnnnnnnnnnnnnnnnnnnnnnnnnnnnnnnnnnnnnnnnnnnnnnnnnnnnnnnnnnnnnnnnnnnnnnnnnnnnnnnnnnnnnnnnnnnnnnnnnnnnnnnnnnnnnnnnnnnnnnnnnnnnnnnnnnnnnnnnnnnnnnnnnnnnnnnnnnnnnnnnnnnnnnnnnnnnnnnnnnnnnnnnnnnnnnnnnnnnnnnnnnnnnnnnnnnnnnnnnnnnnnnnnnnnnnnnnnnnnnnnnnnnnnnnnnnnnnnnnnnnnnnnnnnnnnnnnnnnnnnnnnnnnnnnnnnnnnnnnnnnnnnnnnnnnnnnnnnnnnnnnnnnnnnnnnnnnnnnnnnnnnnnnnnnnnnnnnnnnnnnnnnnnnnnnnnnnnnnnnnnnnnnnnnnnnnnnnnnnnnnnnnnnnnnnnnnnnnnnnnnnnnnnnnnnnnnnnnnnnnnnnnnnnnnnnnnnnnnnnnnnnnnnnnnnnnnnnnnnnnnnnnnnnnnnnnnnnnnnnnnnnnnnnnnnnnnnnnnnnnnnnnnnnnnnnnnnnnnnnnnnnnnnnnnnnnnnnnnnnnnnnnnnnnnnnnnnnnnnnnnnnnnnnnnnnnnnnnnnnnnnnnnnnnnnnnnnnnnnnnnnnnnnnnnnnnnnnnnnnnnnnnnnnnnnnnnnnnnnnnnnnnnnnnnnnnnnnnnnnnnnnnnnnnnnnnnnnnnnnnnnnnnnnnnnnnnnnnnnnnnnnnnnnnnnnnnnnnnnnnnnnnnnnnnnnnnnnnnnnnnnnnnnnnnnnnnnnnnnnnnnnnnnnnnnnnnnnnnnnnnnnnnnnnnnnnnnnnnnnnnnnnnnnnnnnnnnnnnnnnnnnnnnnnnnnnnnnnnnnnnnnnnnnnnnnnnnnnnnnnnnnnnnnnnnnnnnnnnnnnnnnnnnnnnnnnnnnnnnnnnnnnnnnnnnnnnnnnnnnnnnnnnnnnnnnnnnnnnnnnnnnnnnnnnnnnnnnnnnnnnnnnnnnnnnnnnnnnnnnnnnnnnnnnnnnnnnnnnnnnnnnnnnnnnnnnnnnnnnnnnnnnnnnnnnnnnnnnnnnnnnnnnnnnnnnnnnnnnnnnnnnnnnnnnacccatcggaaacattccgccagttgaagccgaacaacgctactacgccatgctggacgaaccagccatggcagcataacttaaaccaaatagcctccgacaattccggggcggttcagatcgccaagttcacacctcaagagaacaaggtaatggcccccttaatttgtggggcaaactcgatgaagggaagtggcgtggaatttagatcagaaaaacaaaaggaattcttcagtcgcgtcgtgacacacattgccaagcccgacctgcctttactgctagaaggcgcaactggccttggcaagacacttccctatatgctggccgcgttgagatcgggcaaaagagtggcattagtctatccaacccaccagttgatcaatcaggcacttgcgtcttgggatttaaagaccgcactggcggatacgcctagaacactggtcgcgtttagacctcgtgcatatttcaacgatgatcagaaggcttatcaggataacaaacaagacgctttggcggccgatattatgttgtgtacctctgtctctgtgatcatcgatcagcgaatgggtggcggatataacgggtcgactgagcgagaggtcatcatattcgatgaggccgatcagctaccggcgtttgcagctttgacatctgatgtaacgatcacgcgccaggagctgcgcgatcatggtgtgactggagtgacgcccaagcagactgtgagcgatctgctgaagaagaagtcggtgaagggcgagttgcaaggtcgagctaaactgatctgcgaagcaattgaacaggacgtttggtttgcgaaggcaggcatgactgacgatggcggcgtggcagtgtattcgcgtctgccgggtcggctgctgaagaaagtatccaaccggccttcgaccgtatttgtttcagccacattgtcagtaggtggctcgttcaacgacttcaaacgtgccatgggtattggcgatcaaagtaaactgtccacccccagcattgaacctgttcatcacggtacgctgactttcgatttccgaaccgaatacgcagttgatacagacgaatggctgaccggagtggttgaagagatcaatggcgcagacggaccggtgctggtcgcgaccccttcgcacgctttggctcagaagttgggagcacggatcactgacgccgtggttcgtcaggccgacgagacaaccagcgaagccgtaaagcggcttggtaacacaagcatattgatcgctgctggcgcttgggcaggcctagatacacccgtagagtgggcgactatcgttgtgccgcgcgttcccttcacagggccgaagatggtctacgacgtctggcacgaagacgccgaagaacaggctgtcacaatcggcgaggcaatgacgcactatattgatagtaagaactcagctgcacggagaatgaagcaagtctttggccgtgggttgcgtcatccaaaagcaatttgccgtgtcgtgatttgtgacccacgcatcgatcaacttggcgatattgcgcccaagcgcttcaaggcagggttctgggaaggccgtaagatcgagcaaacccgcactgtgtcagaacgaaaccccgcattgcgtaaagatgcgctacttcatcacggcacggactgccaagcgtgcgatttcaagccagtgtcactgcgccaggtggaagttcaccacctcaatccgctggccgaccgggtggggggctatacgaagatagaagacgttgccgtgctctgccgcaactgccatggactggtgcattcggaggatccaccaatcccgctggaccggctaagaaaaacgaagaaagagcgcaagcctaaattctcaatctcaatggggtagcgcaccaagtgtacgccagatgtgctgtgacagccgacagattgtgacacatgcgatttgggcactgtggatgcgctggggcacggtatggtcgtttgtgccccatgtcgctcgtcattcataacacatcaaattggcgacggattgtcgttcgaaatgtgcattagaaagatcagcgcgttcccgcttcttgatggcatggccttgaatgaaaaatgggcctgctgcgtgcaggccagcgttctcaatggtacaatggagtgccgaaagaaacggcgggtaattcctgagcaggtcttcgtgggacactttgtcccttgaggatttttcggcgaagcgtagccaagactttacgaccggcccggcggtgttcttcaggcgagaggcaattgtcgaaatagtaattcaacccctatcctccggcacatcatctgaaatttcgaggaatctcatggaaggacaaactccatcatcaatacgttggcacttcggcccggaatggccggggcgtcgttgtggagccaggacgcgacagggaacgccctgccagaagcctgtattgcgcggaaggaaccgttgtcagttgcatggcggtcgtgccggggcaccacgtggcaaaaggcatggcaactacaagcatgggcggtacacgatcacagccacggaaaggcaccaagaggccatggcgcgcatcaggtatttattgctgctggggcgggcctgcaggatttttaattgaagattgccgggcaagaaatagatgccacatcacgacccccacccaaaatatagaagatagtacccctatgacccccagcccaccggcacaaaagggaaccgatttaaggtattttcatagtcaaaagggcaccgttagcgggttattggggcactggggatgcgttttttgacactggaggtgaagggcgtggccgtttcgtgccagccttctggcgtccggctttgtaccgggatagcgccgcatcagccgtgacttgattaaccgaatgccattcatccgtaggcggcgtatttccgacgggcagatacgtgagtcggtatgcctgcgggttcctgatttgtccgccgaatttgttgttcggttggatgatccgcaagaggccgagggcgtctccaagcttaagggagcgcgtgatgtcctttcgggacaaaccggcttcagccaattgcccataggaaacaaggaggttcccgtttgcggttccagcatgttgcaagtgctctatttcgatacgctccaaaatgcgcatcagcggcacgcttcgcgagcgccatgcggggctttgcagcatcgggagtcgatgcgcaacccacgccacgcctgcgagataattgctgctatttttcttcgccatttgtcgctccgttccagccgtacagcgggccgcaatgacggcattcacgttgcgaaacccctctgcgcaaggtatccccgcatttcgggcacttcgagccagaacgctgaattgacgttgcgcggactcgtgagggatatcgtggatcgacgggctttcccccatcgacgacgacttcggcttcggtgctcgccttgtgggtcgggcgaatatcgatggtgggcaattggtcaatccgcgccggaaagctttcaaggatagttattgcggatggaagatcttcggccttgagggcacggatggcggccatgagagcatcgcgagtaccaaagtagccgatattgtcccaacgcgctctaccgtgcctttttccggctcgtttctgcagaatccattgatgaccgtccggcgcttcgacgacacgaagtctgtcgtttatcttgcaaatcaaattcatgtcgttctcccgtttggccgatagatatcaacggtcgagagagcgacaacggctccggaatagaaaacagtgatccgcgctatcagtgccggtgccttattgtgacgagttgggaggaaccgaagttcccccacgtctggcacatagcatttccggtgccgcaaataggtttcagcgagggttccagcgatggggcgcgcagagcgccatatgctgtctgcggtggatgaccacgccaagcatttttgcgctaccgcgttcatgaaacttgctccggggaaagccggcatcggtcgtcaagccatttccttgcctcggcaattgagtaatttttttctcgcattactaagtccacgaggtcgccttcttctccactcccaaaatctttgaaccgcccggctcggtctccagcgacatgaacgcacaggcttccattgggtctataacgccaatcatccgcgttgttaaaatccctgttgggtttgccaagcaaggagcgcgaaacgtctcgtgcatgtggtgcatatctttccgtcaggtcacccatggtcatgcctcctctctattggatttggcagtttcagcgcggtcgctgtcaccggcatcgatgctcaatacacagcgtgtttccagccacacagtgatttccgattcgcgccaaccgattttgcggagaccgatccggatacgcttcgggaattctcctgccttttcaagtcgccatatttggctgcgggagaggggaataatgtcacgtaggtctttctgcgtgaggattcggtctgtccatggcggatgcataggctgctccttggctcgtgttgcgacgaacgggagcatacgtcacggtgggggcgatgcggaaatgtaaacttgtgcatcgcgagtaaagaccagcacatatataattggtaaatatctatagatagtttatattgatataaaaggaaatatatattagtaataataagtgtaaattacgttttggggtctattcctttgaaaagtccgtgggcgctaattggtcaactctccgatcatatcggggccaagctgatctatgcagcggtaccaaatgccaaagtcctgatcggcgacaaaggctatgacagcgacgagttccgagaggtgctgaacgcccgaaagatcaaagcctgcatcccaccacgatcaaaccggacagcgccaaggagttactccaaaagtttgcacaagcaacgtcataaggtggaaaacctgttcgcaaagctcaaagactggcggcgcatcgaacctgatacgaccgctctgcacatacattcatgtcggcaatctgcatcgcagcaatcatcatcttcttgatcaatcaatgagtcctgaccctagctacaaatcttttgaaccagtccgcttttctccagcgaatgatcgtactctgattcacaccacatttttttgcgagatcacggctgctaattgacgggtctcttcgcgcttctttggcggcacgatatttcttctcgctcatattcggtcgcggattcggaacggccaatcccgagtcgatttgcagctggataagtgaataaagggcgggcggtatggggttgccgatacggttgactatttcgagaaatgccaatgcgatgtccgctatgaggcttggactaatcaaatggcccgctcttacgcctgcttcgcttacattcttcctcgtttgcacgtcatttcggatgcccaagagaaccaatccgcttagctcctcgatgttccgcaaataaacaatgtcatcggcgaaatcgggattggaaccaaaaagtgcctcttccaagtcctctggtttgataccccattcgcggagacgatgtcgttttcctttgtcttcgagtttcactataaggcggccgactgcgtcttccaaaatcgctcgattccattcaaccaaatcttcggatagtccgagctgtgtatattcttccagcgttagccttggcttctgaaataattcgtcgtcagacatttcaaattagatcccgtgttcgatattggctggcagcgatcacattaccaaattagcgacaaacgcgccccaccgttctaacgcgtctttgcgctgatcgagataggcgtggcgctggtagacggcggctatgccggtcacggcaccagaactgtgatttaggatcttatcgaccacgacgggctcaataccgaggtcgccggtcgctatcgtcgcaagcgtccgacgcaggtcatggatggtccagccgttcacgccggacaatttgtccaaccgttccttaacctttgagaaacccgagatcggagtggtgccggtagtcgtgaacacatagttggaaccatttaagtgattgatgccattcagtgctgagactaactgtcgatgaaagatgaacatgatgagccttgccgttcttggcgcgctcgccgggtatcatccattccctcttttcaagatcaaactcagaccaacgagcacctgccacttcgttgcggcgctgacccgtcagaatcagagtttggatatatgggccaaaaggctgaccaatctgttccgttgcttcccagatcgctcccaattcagttggcgtgagcgtacggtcccggctgttctcgttcgccggcttctttataccgttcgcaggagacacggcgatgatgtcttgctcgaccgcccaattgaacattcggcgcaaataggccagcaaacgattggcgtggataggcgttccacgatcgacaacgcccgctagaagccgctggatgtcttgcttggtgatcgtatcgatgggcttgttgcccagcacaggacggacgtcacggaccagcgcacgacgtttttcggcggtcgatttccgtttctttgcagcctgatcacgattcaaccaatcttcgagcaccgtagtaaatataggagccgcctttggctttattatcgctccgacggtggcgatctgctcgaagagatcgcccgccttctgacgggctacggcaagcttgacgtcgggatagcgcccaatggttatgcgtttcatgctcccgtctacgcgtcgcatggcgaaccacgtcttcgtgccggatggggcaagccgcaggccgaggccccgctggacggtatcatagatatccttccgggcgggaggagctttcaggctgcgtaggaaagtgtcggtgaaagccttttcggtaagtttcggcataacgtcctcgaatgttgtgtgtcgcgcgtttgtgggttacacagtgggttacaaaatcgatgacacagagcgagacaacatgcaacagattgaggcagaaatatatccaagacattgttttttctgactttgttccgaacaccctgcaacgcgaagaaactaagcgaaaccaagtagcaccagattcctaatctgggggtcgcgcgttcgaatcgcgccgggatcaccattttccgatccactttccagaacgcgtgccgacctgtcagagcgtttttgcctgctgcttcctggtgcactttgcacctgaccgtgtatacttgcccccaggaaaaccgggagcaatcaatgcgaatactttttaccggcgggtcgggcaaggccgggcgccatgcggtggcctatcttctggacaagggtcacagggtcttgaatgtcgatctgacgcccctcgtccatcccggcgtcgacaaccgcatagccgacatcaccaatgccggacagatgttcgatgtgatggcgagttatgccgggttcgacgagctggagccgggcaccggcgttccccgcttcgatgccgtcgtgcattttgcagccattccacggcttttgttgacagccgacaacgaatgctaccggatcaacacattgggcacctacaatgtcattgatgcggcggtgaagcttggcgtcaggaagatcatcttcgcctcctcggaaacaacctatggcgtgtgttttgccgacggggaacgcaaaccggactatctgccaatcgacgaggagcatccggttgtgcccgaagacagctatgccatgtcaaaggtcgtcaat

SEQ ID NO: 61 - DNA, 17725 bp, Artificial Sequence
  Synthetic Oligonucleotide
  misc_feature (1)..(9999): n is a, c, g, or t
nnnnnnnnnnnnnnnnnnnnnnnnnnnnnnnnnnnnnnnnnnnnnnnnnnnnnnnnnnnnnnnnnnnnnnnnnnnnnnnnnnnnnnnnnnnnnnnnnnnnnnnnnnnnnnnnnnnnnnnnnnnnnnnnnnnnnnnnnnnnnnnnnnnnnnnnnnnnnnnnnnnnnnnnnnnnnnnnnnnnnnnnnnnnnnnnnnnnnnnnnnnnnnnnnnnnnnnnnnnnnnnnnnnnnnnnnnnnnnnnnnnnnnnnnnnnnnnnnnnnnnnnnnnnnnnnnnnnnnnnnnnnnnnnnnnnnnnnnnnnnnnnnnnnnnnnnnnnnnnnnnnnnnnnnnnnnnnnnnnnnnnnnnnnnnnnnnnnnnnnnnnnnnnnnnnnnnnnnnnnnnnnnnnnnnnnnnnnnnnnnnnnnnnnnnnnnnnnnnnnnnnnnnnnnnnnnnnnnnnnnnnnnnnnnnnnnnnnnnnnnnnnnnnnnnnnnnnnnnnnnnnnnnnnnnnnnnnnnnnnnnnnnnnnnnnnnnnnnnnnnnnnnnnnnnnnnnnnnnnnnnnnnnnnnnnnnnnnnnnnnnnnnnnnnnnnnnnnnnnnnnnnnnnnnnnnnnnnnnnnnnnnnnnnnnnnnnnnnnnnnnnnnnnnnnnnnnnnnnnnnnnnnnnnnnnnnnnnnnnnnnnnnnnnnnnnnnnnnnnnnnnnnnnnnnnnnnnnnnnnnnnnnnnnnnnnnnnnnnnnnnnnnnnnnnnnnnnnnnnnnnnnnnnnnnnnnnnnnnnnnnnnnnnnnnnnnnnnnnnnnnnnnnnnnnnnnnnnnnnnnnnnnnnnnnnnnnnnnnnnnnnnnnnnnnnnnnnnnnnnnnnnnnnnnnnnnnnnnnnnnnnnnnnnnnnnnnnnnnnnnnnnnnnnnnnnnnnnnnnnnnnnnnnnnnnnnnnnnnnnnnnnnnnnnnnnnnnnnnnnnnnnnnnnnnnnnnnnnnnnnnnnnnnnnnnnnnnnnnnnnnnnnnnnnnnnnnnnnnnnnnnnnnnnnnnnnnnnnnnnnnnnnnnnnnnnnnnnnnnnnnnnnnnnnnnnnnnnnnnnnnnnnnnnnnnnnnnnnnnnnnnnnnnnnnnnnnnnnnnnnnnnnnnnnnnnnnnnnnnnnnnnnnnnnnnnnnnnnnnnnnnnnnnnnnnnnnnnnnnnnnnnnnnnnnnnnnnnnnnnnnnnnnnnnnnnnnnnnnnnnnnnnnnnnnnnnnnnnnnnnnnnnnnnnnnnnnnnnnnnnnnnnnnnnnnnnnnnnnnnnnnnnnnnnnnnnnnnnnnnnnnnnnnnnnnnnnnnnnnnnnnnnnnnnnnnnnnnnnnnnnnnnnnnnnnnnnnnnnnnnnnnnnnnnnnnnnnnnnnnnnnnnnnnnnnnnnnnnnnnnnnnnnnnnnnnnnnnnnnnnnnnnnnnnnnnnnnnnnnnnnnnnnnnnnnnnnnnnnnnnnnnnnnnnnnnnnnnnnnnnnnnnnnnnnnnnnnnnnnnnnnnnnnnnnnnnnnnnnnnnnnnnnnnnnnnnnnnnnnnnnnnnnnnnnnnnnnnnnnnnnnnnnnnnnnnnnnnnnnnnnnnnnnnnnnnnnnnnnnnnnnnnnnnnnnnnnnnnnnnnnnnnnnnnnnnnnnnnnnnnnnnnnnnnnnnnnnnnnnnnnnnnnnnnnnnnnnnnnnnnnnnnnnnnnnnnnnnnnnnnnnnnnnnnnnnnnnnnnnnnnnnnnnnnnnnnnnnnnnnnnnnnnnnnnnnnnnnnnnnnnnnnnnnnnnnnnnnnnnnnnnnnnnnnnnnnnnnnnnnnnnnnnnnnnnnnnnnnnnnnnnnnnnnnnnnnnnnnnnnnnnnnnnnnnnnnnnnnnnnnnnnnnnnnnnnnnnnnnnnnnnnnnnnnnnnnnnnnnnnnnnnnnnnnnnnnnnnnnnnnnnnnnnnnnnnnnnnnnnnnnnnnnnnnnnnnnnnnnnnnnnnnnnnnnnnnnnnnnnnnnnnnnnnnnnnnnnnnnnnnnnnnnnnnnnnnnnnnnnnnnnnnnnnnnnnnnnnnnnnnnnnnnnnnnnnnnnnnnnnnnnnnnnnnnnnnnnnnnnnnnnnnnnnnnnnnnnnnnnnnnnnnnnnnnnnnnnnnnnnnnnnnnnnnnnnnnnnnnnnnnnnnnnnnnnnnnnnnnnnnnnnnnnnnnnnnnnnnnnnnnnnnnnnnnnnnnnnnnnnnnnnnnnnnnnnnnnnnnnnnnnnnnnnnnnnnnnnnnnnnnnnnnnnnnnnnnnnnnnnnnnnnnnnnnnnnnnnnnnnnnnnnnnnnnnnnnnnnnnnnnnnnnnnnnnnnnnnnnnnnnnnnnnnnnnnnnnnnnnnnnnnnnnnnnnnnnnnnnnnnnnnnnnnnnnnnnnnnnnnnnnnnnnnnnnnnnnnnnnnnnnnnnnnnnnnnnnnnnnnnnnnnnnnnnnnnnnnnnnnnnnnnnnnnnnnnnnnnnnnnnnnnnnnnnnnnnnnnnnnnnnnnnnnnnnnnnnnnnnnnnnnnnnnnnnnnnnnnnnnnnnnnnnnnnnnnnnnnnnnnnnnnnnnnnnnnnnnnnnnnnnnnnnnnnnnnnnnnnnnnnnnnnnnnnnnnnnnnnnnnnnnnnnnnnnnnnnnnnnnnnnnnnnnnnnnnnnnnnnnnnnnnnnnnnnnnnnnnnnnnnnnnnnnnnnnnnnnnnnnnnnnnnnnnnnnnnnnnnnnnnnnnnnnnnnnnnnnnnnnnnnnnnnnnnnnnnnnnnnnnnnnnnnnnnnnnnnnnnnnnnnnnnnnnnnnnnnnnnnnnnnnnnnnnnnnnnnnnnnnnnnnnnnnnnnnnnnnnnnnnnnnnnnnnnnnnnnnnnnnnnnnnnnnnnnnnnnnnnnnnnnnnnnnnnnnnnnnnnnnnnnnnnnnnnnnnnnnnnnnnnnnnnnnnnnnnnnnnnnnnnnnnnnnnnnnnnnnnnnnnnnnnnnnnnnnnnnnnnnnnnnnnnnnnnnnnnnnnnnnnnnnnnnnnnnnnnnnnnnnnnnnnnnnnnnnnnnnnnnnnnnnnnnnnnnnnnnnnnnnnnnnnnnnnnnnnnnnnnnnnnnnnnnnnnnnnnnnnnnnnnnnnnnnnnnnnnnnnnnnnnnnnnnnnnnnnnnnnnnnnnnnnnnnnnnnnnnnnnnnnnnnnnnnnnnnnnnnnnnnnnnnnnnnnnnnnnnnnnnnnnnnnnnnnnnnnnnnnnnnnnnnnnnnnnnnnnnnnnnnnnnnnnnnnnnnnnnnnnnnnnnnnnnnnnnnnnnnnnnnnnnnnnnnnnnnnnnnnnnnnnnnnnnnnnnnnnnnnnnnnnnnnnnnnnnnnnnnnnnnnnnnnnnnnnnnnnnnnnnnnnnnnnnnnnnnnnnnnnnnnnnnnnnnnnnnnnnnnnnnnnnnnnnnnnnnnnnnnnnnnnnnnnnnnnnnnnnnnnnnnnnnnnnnnnnnnnnnnnnnnnnnnnnnnnnnnnnnnnnnnnnnnnnnnnnnnnnnnnnnnnnnnnnnnnnnnnnnnnnnnnnnnnnnnnnnnnnnnnnnnnnnnnnnnnnnnnnnnnnnnnnnnnnnnnnnnnnnnnnnnnnnnnnnnnnnnnnnnnnnnnnnnnnnnnnnnnnnnnnnnnnnnnnnnnnnnnnnnnnnnnnnnnnnnnnnnnnnnnnnnnnnnnnnnnnnnnnnnnnnnnnnnnnnnnnnnnnnnnnnnnnnnnnnnnnnnnnnnnnnnnnnnnnnnnnnnnnnnnnnnnnnnnnnnnnnnnnnnnnnnnnnnnnnnnnnnnnnnnnnnnnnnnnnnnnnnnnnnnnnnnnnnnnnnnnnnnnnnnnnnnnnnnnnnnnnnnnnnnnnnnnnnnnnnnnnnnnnnnnnnnnnnnnnnnnnnnnnnnnnnnnnnnnnnnnnnnnnnnnnnnnnnnnnnnnnnnnnnnnnnnnnnnnnnnnnnnnnnnnnnnnnnnnnnnnnnnnnnnnnnnnnnnnnnnnnnnnnnnnnnnnnnnnnnnnnnnnnnnnnnnnnnnnnnnnnnnnnnnnnnnnnnnnnnnnnnnnnnnnnnnnnnnnnnnnnnnnnnnnnnnnnnnnnnnnnnnnnnnnnnnnnnnnnnnnnnnnnnnnnnnnnnnnnnnnnnnnnnnnnnnnnnnnnnnnnnnnnnnnnnnnnnnnnnnnnnnnnnnnnnnnnnnnnnnnnnnnnnnnnnnnnnnnnnnnnnnnnnnnnnnnnnnnnnnnnnnnnnnnnnnnnnnnnnnnnnnnnnnnnnnnnnnnnnnnnnnnnnnnnnnnnnnnnnnnnnnnnnnnnnnnnnnnnnnnnnnnnnnnnnnnnnnnnnnnnnnnnnnnnnnnnnnnnnnnnnnnnnnnnnnnnnnnnnnnnnnnnnnnnnnnnnnnnnnnnnnnnnnnnnnnnnnnnnnnnnnnnnnnnnnnnnnnnnnnnnnnnnnnnnnnnnnnnnnnnnnnnnnnnnnnnnnnnnnnnnnnnnnnnnnnnnnnnnnnnnnnnnnnnnnnnnnnnnnnnnnnnnnnnnnnnnnnnnnnnnnnnnnnnnnnnnnnnnnnnnnnnnnnnnnnnnnnnnnnnnnnnnnnnnnnnnnnnnnnnnnnnnnnnnnnnnnnnnnnnnnnnnnnnnnnnnnnnnnnnnnnnnnnnnnnnnnnnnnnnnnnnnnnnnnnnnnnnnnnnnnnnnnnnnnnnnnnnnnnnnnnnnnnnnnnnnnnnnnnnnnnnnnnnnnnnnnnnnnnnnnnnnnnnnnnnnnnnnnnnnnnnnnnnnnnnnnnnnnnnnnnnnnnnnnnnnnnnnnnnnnnnnnnnnnnnnnnnnnnnnnnnnnnnnnnnnnnnnnnnnnnnnnnnnnnnnnnnnnnnnnnnnnnnnnnnnnnnnnnnnnnnnnnnnnnnnnnnnnnnnnnnnnnnnnnnnnnnnnnnnnnnnnnnnnnnnnnnnnnnnnnnnnnnnnnnnnnnnnnnnnnnnnnnnnnnnnnnnnnnnnnnnnnnnnnnnnnnnnnnnnnnnnnnnnnnnnnnnnnnnnnnnnnnnnnnnnnnnnnnnnnnnnnnnnnnnnnnnnnnnnnnnnnnnnnnnnnnnnnnnnnnnnnnnnnnnnnnnnnnnnnnnnnnnnnnnnnnnnnnnnnnnnnnnnnnnnnnnnnnnnnnnnnnnnnnnnnnnnnnnnnnnnnnnnnnnnnnnnnnnnnnnnnnnnnnnnnnnnnnnnnnnnnnnnnnnnnnnnnnnnnnnnnnnnnnnnnnnnnnnnnnnnnnnnnnnnnnnnnnnnnnnnnnnnnnnnnnnnnnnnnnnnnnnnnnnnnnnnnnnnnnnnnnnnnnnnnnnnnnnnnnnnnnnnnnnnnnnnnnnnnnnnnnnnnnnnnnnnnnnnnnnnnnnnnnnnnnnnnnnnnnnnnnnnnnnnnnnnnnnnnnnnnnnnnnnnnnnnnnnnnnnnnnnnnnnnnnnnnnnnnnnnnnnnnnnnnnnnnnnnnnnnnnnnnnnnnnnnnnnnnnnnnnnnnnnnnnnnnnnnnnnnnnnnnnnnnnnnnnnnnnnnnnnnnnnnnnnnnnnnnnnnnnnnnnnnnnnnnnnnnnnnnnnnnnnnnnnnnnnnnnnnnnnnnnnnnnnnnnnnnnnnnnnnnnnnnnnnnnnnnnnnnnnnnnnnnnnnnnnnnnnnnnnnnnnnnnnnnnnnnnnnnnnnnnnnnnnnnnnnnnnnnnnnnnnnnnnnnnnnnnnnnnnnnnnnnnnnnnnnnnnnnnnnnnnnnnnnnnnnnnnnnnnnnnnnnnnnnnnnnnnnnnnnnnnnnnnnnnnnnnnnnnnnnnnnnnnnnnnnnnnnnnnnnnnnnnnnnnnnnnnnnnnnnnnnnnnnnnnnnnnnnnnnnnnnnnnnnnnnnnnnnnnnnnnnnnnnnnnnnnnnnnnnnnnnnnnnnnnnnnnnnnnnnnnnnnnnnnnnnnnnnnnnnnnnnnnnnnnnnnnnnnnnnnnnnnnnnnnnnnnnnnnnnnnnnnnnnnnnnnnnnnnnnnnnnnnnnnnnnnnnnnnnnnnnnnnnnnnnnnnnnnnnnnnnnnnnnnnnnnnnnnnnnnnnnnnnnnnnnnnnnnnnnnnnnnnnnnnnnnnnnnnnnnnnnnnnnnnnnnnnnnnnnnnnnnnnnnnnnnnnnnnnnnnnnnnnnnnnnnnnnnnnnnnnnnnnnnnnnnnnnnnnnnnnnnnnnnnnnnnnnnnnnnnnnnnnnnnnnnnnnnnnnnnnnnnnnnnnnnnnnnnnnnnnnnnnnnnnnnnnnnnnnnnnnnnnnnnnnnnnnnnnnnnnnnnnnnnnnnnnnnnnnnnnnnnnnnnnnnnnnnnnnnnnnnnnnnnnnnnnnnnnnnnnnnnnnnnnnnnnnnnnnnnnnnnnnnnnnnnnnnnnnnnnnnnnnnnnnnnnnnnnnnnnnnnnnnnnnnnnnnnnnnnnnnnnnnnnnnnnnnnnnnnnnnnnnnnnnnnnnnnnnnnnnnnnnnnnnnnnnnnnnnnnnnnnnnnnnnnnnnnnnnnnnnnnnnnnnnnnnnnnnnnnnnnnnnnnnnnnnnnnnnnnnnnnnnnnnnnnnnnnnnnnnnnnnnnnnnnnnnnnnnnnnnnnnnnnnnnnnnnnnnnnnnnnnnnnnnnnnnnnnnnnnnnnnnnnnnnnnnnnnnnnnnnnnnnnnnnnnnnnnnnnnnnnnnnnnnnnnnnnnnnnnnnnnnnnnnnnnnnnnnnnnnnnnnnnnnnnnnnnnnnnnnnnnnnnnnnnnnnnnnnnnnnnnnnnnnnnnnnnnnnnnnnnnnnnnnnnnnnnnnnnnnnnnnnnnnnnnnnnnnnnnnnnnnnnnnnnnnnnnnnnnnnnnnnnnnnnnnnnnnnnnnnnnnnnnnnnnnnnnnnnnnnnnnnnnnnnnnnnnnnnnnnnnnnnnnnnnnnnnnnnnnnnnnnnnnnnnnnnnnnnnnnnnnnnnnnnnnnnnnnnnnnnnnnnnnnnnnnnnnnnnnnnnnnnnnnnnnnnnnnnnnnnnnnnnnnnnnnnnnnnnnnnnnnnnnnnnnnnnnnnnnnnnnnnnnnnnnnnnnnnnnnnnnnnnnnnnnnnnnnnnnnnnnnnnnnnnnnnnnnnnnnnnnnnnnnnnnnnnnnnnnnnnnnnnnnnnnnnnnnnnnnnnnnnnnnnnnnnnnnnnnnnnnnnnnnnnnnnnnnnnnnnnnnnnnnnnnnnnnnnnnnnnnnnnnnnnnnnnnnnnnnnnnnnnnnnnnnnnnnnnnnnnnnnnnnnnnnnnnnnnnnnnnnnnnnnnnnnnnnnnnnnnnnnnnnnnnnnnnnnnnnnnnnnnnnnnnnnnnnnnnnnnnnnnnnnnnnnnnnnnnnnnnnnnnnnnnnnnnnnnnnnnnnnnnnnnnnnnnnnnnnnnnnnnnnnnnnnnnnnnnnnnnnnnnnnnnnnnnnnnnnnnnnnnnnnnnnnnnnnnnnnnnnnnnnnnnnnnnnnnnnnnnnnnnnnnnnnnnnnnnnnnnnnnnnnnnnnnnnnnnnnnnnnnnnnnnnnnnnnnnnnnnnnnnnnnnnnnnnnnnnnnnnnnnnnnnnnnnnnnnnnnnnnnnnnnnnnnnnnnnnnnnnnnnnnnnnnnnnnnnnnnnnnnnnnnnnnnnnnnnnnnnnnnnnnnnnnnnnnnnnnnnnnnnnnnnnnnnnnnnnnnnnnnnnnnnnnnnnnnnnnnnnnnnnnnnnnnnnnnnnnnnnnnnnnnnnnnnnnnnnnnnnnnnnnnnnnnnnnnnnnnnnnnnnnnnnnnnnnnnnnnnnnnnnnnnnnnnnnnnnnnnnnnnnnnnnnnnnnnnnnnnnnnnnnnnnnnnnnnnnnnnnnnnnnnnnnnnnnnnnnnnnnnnnnnnnnnnnnnnnnnnnnnnnnnnnnnnnnnnnnnnnnnnnnnnnnnnnnnnnnnnnnnnnnnnnnnnnnnnnnnnnnnnnnnnnnnnnnnnnnnnnnnnnnnnnnnnnnnnnnnnnnnnnnnnnnnnnnnnnnnnnnnnnnnnnnnnnnnnnnnnnnnnnnnnnnnnnnnnnnnnnnnnnnnnnnnnnnnnnnnnnnnnnnnnnnnnnnnnnnnnnnnnnnnnnnnnnnnnnnnnnnnnnnnnnnnnnnnnnnnnnnnnnnnnnnnnnnnnnnnnnnnnnnnnnnnnnnnnnnnnnnnnnnnnnnnnnnnnnnnnnnnnnnnnnnnnnnnnnnnnnnnnnnnnnnnnnnnnnnnnnnnnnnnnnnnnnnnnnnnnnnnnnnnnnnnnnnnnnnnnnnnnnnnnnnnnnnnnnnnnnnnnnnnnnnnnnnnnnnnnnnnnnnnnnnnnnnnnnnnnnnnnnnnnnnnnnnnnnnnnnnnnnnnnnnnnnnnnnnnnnnnnnnnnnnnnnnnnnnnnnnnnnnnnnnnnnnnnnnnnnnnnnnnnnnnnnnnnnnnnnnnnnnnnnnnnnnnnnnnnnnnnnnnnnnnnnnnnnnnnnnnnnnnnnnnnnnnnnnnnnnnnnnnnnnnnnnnnnnnnnnnnnnnnnnnnnnnnnnnnnnnnnnnnnnnnnnnnnnnnnnnnnnnnnnnnnnnnnnnnnnnnnnnnnnnnnnnnnnnnnnnnnnnnnnnnnnnnnnnnnnnnnnnnnnnnnnnnnnnnnnnnnnnnnnnnnnnnnnnnnnnnnnnnnnnnnnnnnnnnnnnnnnnnnnnnnnnnnnnnnnnnnnnnnnnnnnnnnnnnnnnnnnnnnnnnnnnnnnnnnnnnnnnnnnnnnnnnnnnnnnnnnnnnnnnnnnnnnnnnnnnnnnnnnnnnnnnnnnnnnnnnnnnnnnnnnnnnnnnnnnnnnnnnnnnnnnnnnnnnnnnnnnnnnnnnnnnnnnnnnnnnnnnnnnnnnnnnnnnnnnnnnnnnnnnnnnnnnnnnnnnnnnnnnnnnnnnnnnnnnnnnnnnnnnnnnnnnnnnnnnnnnnnnnnnnnnnnnnnnnnnnnnnnnnnnnnnnnnnnnnnnnnnnnnnnnnnnnnnnnnnnnnnnnnnnnnnnnnnnnnnnnnnnnnnnnnnnnnnnnnnnnnnnnnnnnnnnnnnnnnnnnnnnnnnnnnnnnnnnnnnnnnnnnnnnnnnnnnnnnnnnnnnnnnnnnnnnnnnnnnnnnnnnnnnnnnnnnnnnnnnnnnnnnnnnnnnnnnnnnnnnnnnnnnnnnnnnnnnnnnnnnnnnnnnnnnnnnnnnnnnnnnnnnnnnnnnnnnnnnnnnnnnnnnnnnnnnnnnnnnnnnnnnnnnnnnnnnnnnnnnnnnnnnnnnnnnnnnnnnnnnnnnnnnnnnnnnnnnnnnnnnnnnnnnnnnnnnnnnnnnnnnnnnnnnnnnnnnnnnnnnnnnnnnnnnnnnnnnnnnnnnnnnnnnnnnnnnnnnnnnnnnnnnnnnnnnnnnnnnnnnnnnnnnnnnnnnnnnnnnnnnnnnnnnnnnnnnnnnnnnnnnnnnnnnnnnnnnnnnnnnnnnnnnnnnnnnnnnnnnnnnnnnnnnnnnnnnnnnnnnnnnnnnnnnnnnnnnnnnnnnnnnnnnnnnnnnnnnnnnnnnnnnnnnnnnnnnnnnnnnnnnnnnnnnnnnnnnnnnnnnnnnnnnnnnnnnnnnnnnnnnnnnnnnnnnnnnnnnnnnnnnnnnnnnnnnnnnnnnnnnnnnnnnnnnnnnnnnnnnnnnnnnnnnnnnnnnnnnnnnnnnnnnnnnnnnnnnnnnnnnnnnnnnnnnnnnnnnnnnnnnnnnnnnnnnnnnnnnnnnnnnnnnnnnnnnnnnnnnnnnnnnnnnnnnnnnnnnnnnnnnnnnnnnnnnnnnnnnnnnnnnnnnnnnnnnnnnnnnnnnnnnnnnnnnnnnnnnnnnnnnnnnnnnnnnnnnnnnnnnnnnnnnnnnnnnnnnnnnnnnnnnnnnnnnnnnnnnnnnnnnnnnnnnnnnnnnnnnnnnnnnnnnnnnnnnnnnnnnnnnnnnnnnnnnnnnnnnnnnnnnnnnnnnnnnnnnnnnnnnnnnnnnnnnnnnnnnnnnnnnnnnnnnnnnnnnnnnnnnnnnnnnnnnnnnnnnnnnnnnnnnnnnnnnnnnnnnnnnnnnnnnnnnnnnnnnnnnnnnnnnnnnnnnnnnnnnnnnnnnnnnnnnnnnnnnnnnnnnnnnnnngatgtggcccgctgcatcttcaccagtggcacgttgatggtcaatggccgttttgactactttgtgcgggccttgggtctgtcgggcatcgacccagcctcgcgccacattgatcccctgactcatggggacctgaacatcatctgtgccgagagcgagatgagcccggagcaaaaggcggcgcagatttcgcaggctgcgcgccccgcgcttgtgctcacttcaagccacgaggatacccaggcgctggggggtaacttgcccctggccacggtccgcatgccgggtgaggcactgctggacgctctggagcgatgccctgacgctggcatcctgattgcggcaggtgcatggtcgggccttgacagtccacgccttcgctggcggtccgtcatcatccccaaggcgccatacggccccccagtcgaagtggatggacagcaacttacccattacctagacagtcgcgtggtcgccgtgcggcgcatctgccaggggctgcatcgcggtttgcgcaccccggatgcccattgcacgctgatccttcaagatcctcgctgtcgtcggcccgagctgatggaagccatcccttcaaggttcaagggagcgctgatcagtgccatggaaggcgaagttgaggcggccctgcgcaatgagcgtgagcgacatagacccttcaggaccctggcgctcaagcactatggatgccagtgcatgtggcatgagggctgcgatatcaaagcgccttatttgctggatgtgcatcaccgcgatcccgtctcagaaggggtgcgccgcaccgctctgcaagacctgatggttctttgtaaaaaccaccatgctgaagcccatcagcagatgcggctactcattttcaatggaggagattcaacaaaaattgatgatggatcaatgatttagcgaacatcgatgcaagctgccctttgtcggggcagctactagaacgagcatcacctcacccgggctgtgcctgacatgcaagctgccctttgtcggggcagctactagaactcgtaggtgtagttcgtcttcgggtagtcgatgcaagctgccttttgtcggggcagctactagaacgagacagccactacatcgatgaagctgaacatgcaagctgccctttgtcggagcagctactagaatgaaaccgcagtgcaggagtaagcccccatgatgcaagctgccctttgtcggggcagctactagaaccgccgcaagttcgacgccaacaagctccaaatgcaagctgccctttgtcggggcagctactagaactagtcgcaggcgcgcagctcccggccctcgatgcaagcagccctttgtcggggcagctactagaacagcacgccctggcttgtgccgctcacgaacatgcaagctgccctttgtcggggcagctactagaaccagcggcgcagcttgcccgagtcgtccagcatgcaagctgccctttgtcggggcagctactagaactacaccttgctgactgctgctgtgggcacgatgcaagctgccctttgtcggagcagctactagaaccaaacaggtcttgcgcctggttcgtgatgaatgcaagctgccctttgtcggggcagctactagaactagtgcacgcgaaacgctgcgggtttgctcatgcaagctgccctttgtcggggcagctactagaacagcaccgatcaggctttcgctgatgccgagatgcaagctgcccattgtcggggcagctactagaacttgggcaagttggtccagcggcttggttttatgcaagctgccctttgtcggggcagctactagaacaccggacgcggccggtattcgacgccgtagatgcaagctgccctttgtcggggcagctactagaaccgggaaactctgcggttggtggctgaaagatgcaagctgccctttgacggggcagctactagaacctggccctgctgctggctgcgctgcctgacatgcaagctgccctttgtcggggcagctactagaacatggcggggtggcatgtgatcgtctgcccgatgcaagctgccctttgtcgaggcagctactagaactacggtgtgtcgatgtcgccgcgaacggccaatgcaagctgccctttgtcggggcagctactagaaccaggaatttctcgacacgatgcaaggtctgatgcaagcagccctttgtcggggcagctactagaacgacatcgagcgtgaggccgctcgcacggtaatgcaagctgccctttgtcggggcagctactagaacaggttgtagttgttgtcggcctgcgtgtagatgcaagctgccctttgtcggagcagctactagaagactatggaagtggtggcggaagattggggcatgcaagctgtcctttgtcggggcagctactagaacttcgtgtacgtcatggaagagttcgccaagatgtaagctgccccttgtcggtgcagctactagaacgtagctcaactggatagagcaccagcctcatgcaagctgccctttgtcggggcagctactagaacttcaaccccgcgcaaaacggtgcccgctcgatgcaagctgacctttgtcggggcagctactagaactccacggcctgggcctagtagttgacctgcacgcaagctgccttttatcggggcagctactagaactagcatgccggcaccgttggggtgatggggatgtaagctgccctttgtcggggcagctactagaactgggatgtgggcggcgagggcgacccgattatgcaagctgccctttgtggggcagttactagaacgggtggatgaggttatcggcctggtcggccatgcaagctgccctttgtcggggcagttactaaagcgtgcagttgtaatactggctgtggaggaagtgcaagcagcccctgtcggggtagatgcgacttttgaaaactggtcagaaactgcgcgcaactacgttgggcttgcaccccgtctggcgtacctgcgaaagaggggtatggggagggagtccgtccccctctgaattcagtttccgtttttggctttttctatgagccctgggctgcatgcgtcagcgtagctgacgctggcccatacggaaaccctgacctcaatagtgcccagctcgccctaggtagaaagtgttgatggtggctgtacggaattcacttgatttccgtatagtgaccgggcacgatcctgagccaccaactcagggagtccacatgactaagcgaagtcgccagctcagggtcgcgctgtatgcgcgggtgtccaccgacaagcaatccacggagaaccagctgcaagagctgcggcatgccgctgagcgtttgggttggcaggtggttgatgagttcgtggatcgaggcatcagcggggccaaagggcgcaaggatcgcccgcagctcgatgcgttgctgaagggcgtggcccgcaaggagtttgatgtggtcggtgcctggtcggtggatcgactgggtcgctcactgatcgatctggtcaacatgctgcaagagctgcacgcgacaggcgttgacttgtacctgcatcagcaaggtatcaacaccaccacaccggcggggcgagcgatcttcgggatgatgggcgtcttcgcagagtttgagcgagctttgattcaggagcggattaaggccggattgcagcgtgcccgaaaactgggtaccaaatccggcaatgccattggtcggccgcgtgcttcacccgacgtggaggctcgaattcacgaactgcgagcaaccggcctgggtatggtgaagatcgcagctcaggttggctgcggagtctcggtggtgcagcgcgtgttgcacgattcgtagctcgaccctagggcctttgtgtggctccctatatccgcaacacaagagcaagtgttggtgtttgctaacttaaatgcaagcggtttgactgcaaactttgggtgcatcaagtccgaaatgctgggctagaaaactggatgtgatgacgctgcctgaattttgctgctcgcggtggcttgctgggtgaaaccgaaacccgaaggcgcgaatgctggtgttctacacgcgtctgcagtgatttctgcggcttttaggcgcttcaattgggcagccatggatttgatcaaaggcttgcccgccggtatgaagagccgcgctgacaaggcctgcttcgaatcatgcaactttgaagcggccgcagcttcgccaatggcagttttaactgtgggtgctacataaactgaacttatgacgcgcacttggggaggagggggcaataacgctggttcgttgcgttatgttttgggatgctgcccttcaattggcaattctgggcgctccgagagtatcaagtctggagcgcacttggcttgcttacttcaccgaattaacacgacaagatagattgaacagtctttgtgctcgggcagcgaaccgaagaaaaggagaagccatcacgcctgtctgaccgaattgcatgaccttgaattcgtacatagccattgtttgggtaagtcacggctacaaggccactcatgcttcccgtgccaaatcgacagcccgtacctgagctcgtgccggataggttggcaatttgccccgtgtttgcgccatttgagaacttgactgcgcccgagaactggcagtttgcattgattgcgaccttgatcgattggctggagtcgatgctcaccgtcaaggtgctgttcatctcatcactggcgttccacgttcccttggcgtcagctgctcctgtcgcaagtgtcatgtattcgctgaacttcaattcaaagtttgatgggccactggcatagattgccgaaccggagaggcccactccagggcggtattgcccgctgatcgagcctgaggaaactcctgcttgcgagtagtcagaagtggtgccgttgaactgtccgccgtcgccagatacaagcccgtcgacaaagccacgagatgagccaaatgcatcttcatagtagatggcaaatcttccgtcctgagagacaactaggtcttggaagatgggtagacgtcccgtggttactttgcctttgtatcgaccgacggcttgaatgtccattcccttgggctgactgacagaaccggcattcgatgagttggtcgcccccccgtcgctgccgccgccaccgcatcccgcgattgacagcatcaaacccagcgaacaagctgcttttttgatcatcatttctccctcaatttaatgagttatttttgggagcgagatgttcgccatccttcccttgtcggtcaagtcctttcgtttgatgaggcttccttttttctcgggcacttagggaaataacggcgatgggctgcggggctggcttgagttggatgaccgcgatggcagagcgggggttgcgcttaacttattgatcaatgagctggcagggcgccgcgcttagggtggtagcgcaattcgagtaccggtcggccgctgaactttgccctcgggagatgttgtgccgttcgctgcttcggacggctgccatgttgatgctcggttttctaactggcgtcggtagctgcatgcgtagtcgctgaagtcgcgcttgatgttcgccagttcggggcgttggatggtgacttcctcgcagggcttgcggtcacttggggagtgcggtgcacatgcagaatgcctcacctatcttggcgcccatcacctggggtagcatccaactgaggcagcctgttgctgagattgctccgtgtttggaacgcggcaggaggctcagcaatctggttgcctctactcttttgggtcttcaaagtgtgggaatgcctgtgctcgacgtgacctgcttccggtggttgggtgtgcgtggagcagcgtggtcactgcgaatcctctgccgtacatcaatggctgcatgcggactacatgcttatggcaagggcgttttcgcagagtttgagcgggccttgattcaagagcgaatcagggcagggctggctcgggccaggaagtcgggcacaaagacaggcctcgccattggtcgccccaaggcctcagctgaaatcgagagcaggatccgcgaactgcgagcccaggggattggcataaagaagattgcttcccaggtgcctcgtggcgtgtctgtggtgcaaaggttactcgcaggccacgaattaaagacgtaaagcgggcacctgtagtgggtagctgcgccaccatcatgtcagggattgtcagtgataactaacctttatgcaacgcagatcggtgtgcttggcctgtcccggattctttgatattgcgcgaacttgtcgtacgcttgcagctcgttcgtcgcaaaatttgccttcacacggcaggggtcgcaggttcgaaccctgcaccgcccaccaagcctgaaagcccctcaagtcatgcgcttgcggggctttttctttgccccagcgttgcgatggcttgagctgctctcggccgctcggcttagagcggatagagtggaggctttcaacgcagcggccctggacgaggggagacgagtgaagcctcagaagaacatgatgatcaagcgcagagtttgtttgacggccggtgctcgagtggcggctttgctcttgggtggaggtgccctggctgaattggcctgcgcgcaagcgccaactcccggtgcaggtcgagccgcattcgatgccaagaccatgaacgaggccttgaaggccttgggctatgcggcgccagtcgaaagccgtgatgtgagcatccaggcccctgatattgccgaagatggcgcctccgtggccgtgtcagccgcttgcagccttgccggtgtcaagcaagtcatgttcttgcttgacggtgcaccgacggccttggccgccgtgttcaatttgggtgcggaacttgaggccgaggcgtccacgcgtttgcggctggcgcgcagttcggtggtgtttgccgtggccatcacacaggacaagaaggtcttgtttgcgcagaaggaagtcaaggtcgccatgggtgcttgcggtgccgatgcgaaaccggcccgaggcttgcgggcggacggtgtcagcggtgcgccggtccggtgctgagatcaggagagacattcccatggcaagtccgattcgaatccgcctgcgattgagtggcgacaggctcgctgtgcgagtggcgatcacgcatgaaatggaaagtggcctgcggcttgatgctgccggcaagaccatcgcggcccgctacatccagaccgtgaagaccgagctgaatggcaaagaagttctgagcgtggacttgggtccaaatgtggcgagaaaccccaatctggatttctccctgaaaggcgccaagcaaggcgacaccgtcaaagtgtcctggacggacaaccagggtggcacgcgcagcgacacggctgcagtggcgtaaccgccgccttgccttcgctgccctagccgtatggcggcagacgcatagctcgtccaggggggcaggtcttgctgccggcggattcgcggggacgcgatgttccccaagctgctccaggcctgcgctcgtcgcgtttgaaacgacatctctgtgttgtcggtctggacaggcgcaggcagccttggcatgctggctcggcccgtgattgagtggcccctgattgcgcggcaaccgatgcaattctgactctgaggaccttccatgcttcgtcgcagtgccgagtggtttgacgcgcagtacaacaa

SEQ ID NO: 62 - DNA, 17725 bp, Artificial Sequence; identical to SEQ ID NO: 61
  Synthetic Oligonucleotide
  misc_feature (1)..(9999): n is a, c, g, or t

SEQ ID NO: 63 - DNA, 17711 bp, Artificial Sequence
  Synthetic Oligonucleotide
  misc_feature (1)..(9976): n is a, c, g, or t
nnnnnnnnnnnnnnnnnnnnnnnnnnnnnnnnnnnnnnnnnnnnnnnnnnnnnnnnnnnnnnnnnnnnnnnnnnnnnnnnnnnnnnnnnnnnnnnnnnnnnnnnnnnnnnnnnnnnnnnnnnnnnnnnnnnnnnnnnnnnnnnnnnnnnnnnnnnnnnnnnnnnnnnnnnnnnnnnnnnnnnnnnnnnnnnnnnnnnnnnnnnnnnnnnnnnnnnnnnnnnnnnnnnnnnnnnnnnnnnnnnnnnnnnnnnnnnnnnnnnnnnnnnnnnnnnnnnnnnnnnnnnnnnnnnnnnnnnnnnnnnnnnnnnnnnnnnnnnnnnnnnnnnnnnnnnnnnnnnnnnnnnnnnnnnnnnnnnnnnnnnnnnnnnnnnnnnnnnnnnnnnnnnnnnnnnnnnnnnnnnnnnnnnnnnnnnnnnnnnnnnnnnnnnnnnnnnnnnnnnnnnnnnnnnnnnnnnnnnnnnnnnnnnnnnnnnnnnnnnnnnnnnnnnnnnnnnnnnnnnnnnnnnnnnnnnnnnnnnnnnnnnnnnnnnnnnnnnnnnnnnnnnnnnnnnnnnnnnnnnnnnnnnnnnnnnnnnnnnnnnnnnnnnnnnnnnnnnnnnnnnnnnnnnnnnnnnnnnnnnnnnnnnnnnnnnnnnnnnnnnnnnnnnnnnnnnnnnnnnnnnnnnnnnnnnnnnnnnnnnnnnnnnnnnnnnnnnnnnnnnnnnnnnnnnnnnnnnnnnnnnnnnnnnnnnnnnnnnnnnnnnnnnnnnnnnnnnnnnnnnnnnnnnnnnnnnnnnnnnnnnnnnnnnnnnnnnnnnnnnnnnnnnnnnnnnnnnnnnnnnnnnnnnnnnnnnnnnnnnnnnnnnnnnnnnnnnnnnnnnnnnnnnnnnnnnnnnnnnnnnnnnnnnnnnnnnnnnnnnnnnnnnnnnnnnnnnnnnnnnnnnnnnnnnnnnnnnnnnnnnnnnnnnnnnnnnnnnnnnnnnnnnnnnnnnnnnnnnnnnnnnnnnnnnnnnnnnnnnnnnnnnnnnnnnnnnnnnnnnnnnnnnnnnnnnnnnnnnnnnnnnnnnnnnnnnnnnnnnnnnnnnnnnnnnnnnnnnnnnnnnnnnnnnnnnnnnnnnnnnnnnnnnnnnnnnnnnnnnnnnnnnnnnnnnnnnnnnnnnnnnnnnnnnnnnnnnnnnnnnnnnnnnnnnnnnnnnnnnnnnnnnnnnnnnnnnnnnnnnnnnnnnnnnnnnnnnnnnnnnnnnnnnnnnnnnnnnnnnnnnnnnnnnnnnnnnnnnnnnnnnnnnnnnnnnnnnnnnnnnnnnnnnnnnnnnnnnnnnnnnnnnnnnnnnnnnnnnnnnnnnnnnnnnnnnnnnnnnnnnnnnnnnnnnnnnnnnnnnnnnnnnnnnnnnnnnnnnnnnnnnnnnnnnnnnnnnnnnnnnnnnnnnnnnnnnnnnnnnnnnnnnnnnnnnnnnnnnnnnnnnnnnnnnnnnnnnnnnnnnnnnnnnnnnnnnnnnnnnnnnnnnnnnnnnnnnnnnnnnnnnnnnnnnnnnnnnnnnnnnnnnnnnnnnnnnnnnnnnnnnnnnnnnnnnnnnnnnnnnnnnnnnnnnnnnnnnnnnnnnnnnnnnnnnnnnnnnnnnnnnnnnnnnnnnnnnnnnnnnnnnnnnnnnnnnnnnnnnnnnnnnnnnnnnnnnnnnnnnnnnnnnnnnnnnnnnnnnnnnnnnnnnnnnnnnnnnnnnnnnnnnnnnnnnnnnnnnnnnnnnnnnnnnnnnnnnnnnnnnnnnnnnnnnnnnnnnnnnnnnnnnnnnnnnnnnnnnnnnnnnnnnnnnnnnnnnnnnnnnnnnnnnnnnnnnnnnnnnnnnnnnnnnnnnnnnnnnnnnnnnnnnnnnnnnnnnnnnnnnnnnnnnnnnnnnnnnnnnnnnnnnnnnnnnnnnnnnnnnnnnnnnnnnnnnnnnnnnnnnnnnnnnnnnnnnnnnnnnnnnnnnnnnnnnnnnnnnnnnnnnnnnnnnnnnnnnnnnnnnnnnnnnnnnnnnnnnnnnnnnnnnnnnnnnnnnnnnnnnnnnnnnnnnnnnnnnnnnnnnnnnnnnnnnnnnnnnnnnnnnnnnnnnnnnnnnnnnnnnnnnnnnnnnnnnnnnnnnnnnnnnnnnnnnnnnnnnnnnnnnnnnnnnnnnnnnnnnnnnnnnnnnnnnnnnnnnnnnnnnnnnnnnnnnnnnnnnnnnnnnnnnnnnnnnnnnnnnnnnnnnnnnnnnnnnnnnnnnnnnnnnnnnnnnnnnnnnnnnnnnnnnnnnnnnnnnnnnnnnnnnnnnnnnnnnnnnnnnnnnnnnnnnnnnnnnnnnnnnnnnnnnnnnnnnnnnnnnnnnnnnnnnnnnnnnnnnnnnnnnnnnnnnnnnnnnnnnnnnnnnnnnnnnnnnnnnnnnnnnnnnnnnnnnnnnnnnnnnnnnnnnnnnnnnnnnnnnnnnnnnnnnnnnnnnnnnnnnnnnnnnnnnnnnnnnnnnnnnnnnnnnnnnnnnnnnnnnnnnnnnnnnnnnnnnnnnnnnnnnnnnnnnnnnnnnnnnnnnnnnnnnnnnnnnnnnnnnnnnnnnnnnnnnnnnnnnnnnnnnnnnnnnnnnnnnnnnnnnnnnnnnnnnnnnnnnnnnnnnnnnnnnnnnnnnnnnnnnnnnnnnnnnnnnnnnnnnnnnnnnnnnnnnnnnnnnnnnnnnnnnnnnnnnnnnnnnnnnnnnnnnnnnnnnnnnnnnnnnnnnnnnnnnnnnnnnnnnnnnnnnnnnnnnnnnnnnnnnnnnnnnnnnnnnnnnnnnnnnnnnnnnnnnnnnnnnnnnnnnnnnnnnnnnnnnnnnnnnnnnnnnnnnnnnnnnnnnnnnnnnnnnnnnnnnnnnnnnnnnnnnnnnnnnnnnnnnnnnnnnnnnnnnnnnnnnnnnnnnnnnnnnnnnnnnnnnnnnnnnnnnnnnnnnnnnnnnnnnnnnnnnnnnnnnnnnnnnnnnnnnnnnnnnnnnnnnnnnnnnnnnnnnnnnnnnnnnnnnnnnnnnnnnnnnnnnnnnnnnnnnnnnnnnnnnnnnnnnnnnnnnnnnnnnnnnnnnnnnnnnnnnnnnnnnnnnnnnnnnnnnnnnnnnnnnnnnnnnnnnnnnnnnnnnnnnnnnnnnnnnnnnnnnnnnnnnnnnnnnnnnnnnnnnnnnnnnnnnnnnnnnnnnnnnnnnnnnnnnnnnnnnnnnnnnnnnnnnnnnnnnnnnnnnnnnnnnnnnnnnnnnnnnnnnnnnnnnnnnnnnnnnnnnnnnnnnnnnnnnnnnnnnnnnnnnnnnnnnnnnnnnnnnnnnnnnnnnnnnnnnnnnnnnnnnnnnnnnnnnnnnnnnnnnnnnnnnnnnnnnnnnnnnnnnnnnnnnnnnnnnnnnnnnnnnnnnnnnnnnnnnnnnnnnnnnnnnnnnnnnnnnnnnnnnnnnnnnnnnnnnnnnnnnnnnnnnnnnnnnnnnnnnnnnnnnnnnnnnnnnnnnnnnnnnnnnnnnnnnnnnnnnnnnnnnnnnnnnnnnnnnnnnnnnnnnnnnnnnnnnnnnnnnnnnnnnnnnnnnnnnnnnnnnnnnnnnnnnnnnnnnnnnnnnnnnnnnnnnnnnnnnnnnnnnnnnnnnnnnnnnnnnnnnnnnnnnnnnnnnnnnnnnnnnnnnnnnnnnnnnnnnnnnnnnnnnnnnnnnnnnnnnnnnnnnnnnnnnnnnnnnnnnnnnnnnnnnnnnnnnnnnnnnnnnnnnnnnnnnnnnnnnnnnnnnnnnnnnnnnnnnnnnnnnnnnnnnnnnnnnnnnnnnnnnnnnnnnnnnnnnnnnnnnnnnnnnnnnnnnnnnnnnnnnnnnnnnnnnnnnnnnnnnnnnnnnnnnnnnnnnnnnnnnnnnnnnnnnnnnnnnnnnnnnnnnnnnnnnnnnnnnnnnnnnnnnnnnnnnnnnnnnnnnnnnnnnnnnnnnnnnnnnnnnnnnnnnnnnnnnnnnnnnnnnnnnnnnnnnnnnnnnnnnnnnnnnnnnnnnnnnnnnnnnnnnnnnnnnnnnnnnnnnnnnnnnnnnnnnnnnnnnnnnnnnnnnnnnnnnnnnnnnnnnnnnnnnnnnnnnnnnnnnnnnnnnnnnnnnnnnnnnnnnnnnnnnnnnnnnnnnnnnnnnnnnnnnnnnnnnnnnnnnnnnnnnnnnnnnnnnnnnnnnnnnnnnnnnnnnnnnnnnnnnnnnnnnnnnnnnnnnnnnnnnnnnnnnnnnnnnnnnnnnnnnnnnnnnnnnnnnnnnnnnnnnnnnnnnnnnnnnnnnnnnnnnnnnnnnnnnnnnnnnnnnnnnnnnnnnnnnnnnnnnnnnnnnnnnnnnnnnnnnnnnnnnnnnnnnnnnnnnnnnnnnnnnnnnnnnnnnnnnnnnnnnnnnnnnnnnnnnnnnnnnnnnnnnnnnnnnnnnnnnnnnnnnnnnnnnnnnnnnnnnnnnnnnnnnnnnnnnnnnnnnnnnnnnnnnnnnnnnnnnnnnnnnnnnnnnnnnnnnnnnnnnnnnnnnnnnnnnnnnnnnnnnnnnnnnnnnnnnnnnnnnnnnnnnnnnnnnnnnnnnnnnnnnnnnnnnnnnnnnnnnnnnnnnnnnnnnnnnnnnnnnnnnnnnnnnnnnnnnnnnnnnnnnnnnnnnnnnnnnnnnnnnnnnnnnnnnnnnnnnnnnnnnnnnnnnnnnnnnnnnnnnnnnnnnnnnnnnnnnnnnnnnnnnnnnnnnnnnnnnnnnnnnnnnnnnnnnnnnnnnnnnnnnnnnnnnnnnnnnnnnnnnnnnnnnnnnnnnnnnnnnnnnnnnnnnnnnnnnnnnnnnnnnnnnnnnnnnnnnnnnnnnnnnnnnnnnnnnnnnnnnnnnnnnnnnnnnnnnnnnnnnnnnnnnnnnnnnnnnnnnnnnnnnnnnnnnnnnnnnnnnnnnnnnnnnnnnnnnnnnnnnnnnnnnnnnnnnnnnnnnnnnnnnnnnnnnnnnnnnnnnnnnnnnnnnnnnnnnnnnnnnnnnnnnnnnnnnnnnnnnnnnnnnnnnnnnnnnnnnnnnnnnnnnnnnnnnnnnnnnnnnnnnnnnnnnnnnnnnnnnnnnnnnnnnnnnnnnnnnnnnnnnnnnnnnnnnnnnnnnnnnnnnnnnnnnnnnnnnnnnnnnnnnnnnnnnnnnnnnnnnnnnnnnnnnnnnnnnnnnnnnnnnnnnnnnnnnnnnnnnnnnnnnnnnnnnnnnnnnnnnnnnnnnnnnnnnnnnnnnnnnnnnnnnnnnnnnnnnnnnnnnnnnnnnnnnnnnnnnnnnnnnnnnnnnnnnnnnnnnnnnnnnnnnnnnnnnnnnnnnnnnnnnnnnnnnnnnnnnnnnnnnnnnnnnnnnnnnnnnnnnnnnnnnnnnnnnnnnnnnnnnnnnnnnnnnnnnnnnnnnnnnnnnnnnnnnnnnnnnnnnnnnnnnnnnnnnnnnnnnnnnnnnnnnnnnnnnnnnnnnnnnnnnnnnnnnnnnnnnnnnnnnnnnnnnnnnnnnnnnnnnnnnnnnnnnnnnnnnnnnnnnnnnnnnnnnnnnnnnnnnnnnnnnnnnnnnnnnnnnnnnnnnnnnnnnnnnnnnnnnnnnnnnnnnnnnnnnnnnnnnnnnnnnnnnnnnnnnnnnnnnnnnnnnnnnnnnnnnnnnnnnnnnnnnnnnnnnnnnnnnnnnnnnnnnnnnnnnnnnnnnnnnnnnnnnnnnnnnnnnnnnnnnnnnnnnnnnnnnnnnnnnnnnnnnnnnnnnnnnnnnnnnnnnnnnnnnnnnnnnnnnnnnnnnnnnnnnnnnnnnnnnnnnnnnnnnnnnnnnnnnnnnnnnnnnnnnnnnnnnnnnnnnnnnnnnnnnnnnnnnnnnnnnnnnnnnnnnnnnnnnnnnnnnnnnnnnnnnnnnnnnnnnnnnnnnnnnnnnnnnnnnnnnnnnnnnnnnnnnnnnnnnnnnnnnnnnnnnnnnnnnnnnnnnnnnnnnnnnnnnnnnnnnnnnnnnnnnnnnnnnnnnnnnnnnnnnnnnnnnnnnnnnnnnnnnnnnnnnnnnnnnnnnnnnnnnnnnnnnnnnnnnnnnnnnnnnnnnnnnnnnnnnnnnnnnnnnnnnnnnnnnnnnnnnnnnnnnnnnnnnnnnnnnnnnnnnnnnnnnnnnnnnnnnnnnnnnnnnnnnnnnnnnnnnnnnnnnnnnnnnnnnnnnnnnnnnnnnnnnnnnnnnnnnnnnnnnnnnnnnnnnnnnnnnnnnnnnnnnnnnnnnnnnnnnnnnnnnnnnnnnnnnnnnnnnnnnnnnnnnnnnnnnnnnnnnnnnnnnnnnnnnnnnnnnnnnnnnnnnnnnnnnnnnnnnnnnnnnnnnnnnnnnnnnnnnnnnnnnnnnnnnnnnnnnnnnnnnnnnnnnnnnnnnnnnnnnnnnnnnnnnnnnnnnnnnnnnnnnnnnnnnnnnnnnnnnnnnnnnnnnnnnnnnnnnnnnnnnnnnnnnnnnnnnnnnnnnnnnnnnnnnnnnnnnnnnnnnnnnnnnnnnnnnnnnnnnnnnnnnnnnnnnnnnnnnnnnnnnnnnnnnnnnnnnnnnnnnnnnnnnnnnnnnnnnnnnnnnnnnnnnnnnnnnnnnnnnnnnnnnnnnnnnnnnnnnnnnnnnnnnnnnnnnnnnnnnnnnnnnnnnnnnnnnnnnnnnnnnnnnnnnnnnnnnnnnnnnnnnnnnnnnnnnnnnnnnnnnnnnnnnnnnnnnnnnnnnnnnnnnnnnnnnnnnnnnnnnnnnnnnnnnnnnnnnnnnnnnnnnnnnnnnnnnnnnnnnnnnnnnnnnnnnnnnnnnnnnnnnnnnnnnnnnnnnnnnnnnnnnnnnnnnnnnnnnnnnnnnnnnnnnnnnnnnnnnnnnnnnnnnnnnnnnnnnnnnnnnnnnnnnnnnnnnnnnnnnnnnnnnnnnnnnnnnnnnnnnnnnnnnnnnnnnnnnnnnnnnnnnnnnnnnnnnnnnnnnnnnnnnnnnnnnnnnnnnnnnnnnnnnnnnnnnnnnnnnnnnnnnnnnnnnnnnnnnnnnnnnnnnnnnnnnnnnnnnnnnnnnnnnnnnnnnnnnnnnnnnnnnnnnnnnnnnnnnnnnnnnnnnnnnnnnnnnnnnnnnnnnnnnnnnnnnnnnnnnnnnnnnnnnnnnnnnnnnnnnnnnnnnnnnnnnnnnnnnnnnnnnnnnnnnnnnnnnnnnnnnnnnnnnnnnnnnnnnnnnnnnnnnnnnnnnnnnnnnnnnnnnnnnnnnnnnnnnnnnnnnnnnnnnnnnnnnnnnnnnnnnnnnnnnnnnnnnnnnnnnnnnnnnnnnnnnnnnnnnnnnnnnnnnnnnnnnnnnnnnnnnnnnnnnnnnnnnnnnnnnnnnnnnnnnnnnnnnnnnnnnnnnnnnnnnnnnnnnnnnnnnnnnnnnnnnnnnnnnnnnnnnnnnnnnnnnnnnnnnnnnnnnnnnnnnnnnnnnnnnnnnnnnnnnnnnnnnnnnnnnnnnnnnnnnnnnnnnnnnnnnnnnnnnnnnnnnnnnnnnnnnnnnnnnnnnnnnnnnnnnnnnnnnnnnnnnnnnnnnnnnnnnnnnnnnnnnnnnnnnnnnnnnnnnnnnnnnnnnnnnnnnnnnnnnnnnnnnnnnnnnnnnnnnnnnnnnnnnnnnnnnnnnnnnnnnnnnnnnnnnnnnnnnnnnnnnnnnnnnnnnnnnnnnnnnnnnnnnnnnnnnnnnnnnnnnnnnnnnnnnnnnnnnnnnnnnnnnnnnnnnnnnnnnnnnnnnnnnnnnnnnnnnnnnnnnnnnnnnnnnnnnnnnnnnnnnnnnnnnnnnnnnnnnnnnnnnnnnnnnnnnnnnnnnnnnnnnnnnnnnnnnnnnnnnnnnnnnnnnnnnnnnnnnnnnnnnnnnnnnnnnnnnnnnnnnnnnnnnnnnnnnnnnnnnnnnnnnnnnnnnnnnnnnnnnnnnnnnnnnnnnnnnnnnnnnnnnnnnnnnnnnnnnnnnnnnnnnnnnnnnnnnnnnnnnnnnnnnnnnnnnnnnnnnnnnnnnnnnnnnnnnnnnnnnnnnnnnnnnnnnnnnnnnnnnnnnnnnnnnnnnnnnnnnnnnnnnnnnnnnnnnnnnnnnnnnnnnnnnnnnnnnnnnnnnnnnnnnnnnnnnnnnnnnnnnnnnnnnnnnnnnnnnnnnnnnnnnnnnnnnnnnnnnnnnnnnnnnnnnnnnnnnnnnnnnnnnnnnnnnnnnnnnnnnnnnnnnnnnnnnnnnnnnnnnnnnnnnnnnnnnnnnnnnnnnnnnnnnnnnnnnnnnnnnnnnnnnnnnnnnnnnnnnnnnnnnnnnnnnnnnnnnnnnnnnnnnnnnnnnnnnnnnnnnnnnnnnnnnnnnnnnnnnnnnnnnnnnnnnnnnnnnnnnnnnnnnnnnnnnnnnnnnnnnnnnnnnnnnnnnnnnnnnnnnnnnnnnnnnnnnnnnnnnnnnnnnnnnnnnnnnnnnnnnnnnnnnnnnnnnnnnnnnnnnnnnnnnnnnnnnnnnnnnnnnnnnnnnnnnnnnnnnnnnnnnnnnnnnnnnnnnnnnnnnnnnnnnnnnnnnnnnnnnnnnnnnnnnnnnnnnnnnnnnnnnnnnnnnnnnnnnnnnnnnnnnnnnnnnnnnnnnnnnnnnnnnnnnnnnnnnnnnnnnnnnnnnnnnnnnnnnnnnnnnnnnnnnnnnnnnnnnnnnnnnnnnnnnnnnnnnnnnnnnnnnnnnnnnnnnnnnnnnnnnnnnnnnnnnnnnnnnnnnnnnnnnnnnnnnnnnnnnnnnnnnnnnnnnnnnnnnnnnnnnnnnnnnnnnnnnnnnnnnnnnnnnnnnnnnnnnnnnnnnnnnnnnnnnnnnnnnnnnnnnnnnnnnnnnnnnnnnnnnnnnnnnnnnnnnnnnnnnnnnnnnnnnnnnnnnnnnnnnnnnnnnnnnnnnnnnnnnnnnnnnnnnnnnnnnnnnnnnnnnnnnnnnnnnnnnnnnnnnnnnnnnnnnnnnnnnnnnnnnnnnnnnnnnnnnnnnnnnnnnnnnnnnnnnnnnnnnnnnnnnnnnnnnnnnnnnnnnnnnnnnnnnnnnnnnnnnnnnnnnnnnnnnnnnnnnnnnnnnnnnnnnnnnnnnnnnnnnnnnnnnnnnnnnnnnnnnnnnnnnnnnnnnnnnnnnnnnnnnnnnnnnnnnnnnnnnnnnnnnnnnnnnnnnnnnnnnnnnnnnnnnnnnnnnnnnnnnnnnnnnnnnnnnnnnnnnnnnnnnnnnnnnnnnnnnnnnnnnnnnnnnnnnnnnnnnnnnnnnnnnnnnnnnnnnnnnnnnnnnnnnnnnnnnnnnnnnnnnnnnnnnnnnnnnnnnnnnnnnnnnnnnnnnnnnnnnnnnnnnnnnnnnnnnnnnnnnnnnnnnnnnnnnnnnnnnnnnnnnnnnnnnnnnnnnnnnnnnnnnnnnnnnnnnnnnnnnnnnnnnnnnnnnnnnnnnnnnnnnnnnnnnnnnnnnnnnnnnnnnnnnnnnnnnnnnnnnnnnnnnnnnnnnnnnnnnnnnnnnnnnnnnnnnnnnnnnnnnnnnnnnnnnnnnnnnnnnnnnnnnnnnnnnnnnnnnnnnnnnnnnnnnnnnnnnnnnnnnnnnnnnnnnnnnnnnnnnnnnnnnnnnnnnnnnnnnnnnnnnnnnnnnnnnnnnnnnnnnnnnnnnnnnnnnnnnnnnnnnnnnnnnnnnnnnnnnnnnnnnnnnnnnnnnnnnnnnnnnnnnnnnnnnnnnnnnnnnnnnnnnnnnnnnnnnnnnnnnnnnnnnnnnnnnnnnnnnnnnnnnnnnnnnnnnnnnnnnnnnnnnnnnnnnnnnnnnnnnnnnnnnnnnnnnnnnnnnnnnnnnnnnnnnnnnnnnnnnnnnnnnnnnnnnnnnnnnnnnnnnnnnnnnnnnnnnnnnnnnnnnnnnnnnnnnnnnnnnnnnnnnnnnnnnnnnnnnnnnnnnnnnnnnnnnnnnnnnnnnnnnnnnnnnnnnnnnnnnnnnnnnnnnnnnnnnnnnnnnnnnnnnnnnnnnnnnnnnnnnnnnnnnnnnnnnnnnnnnnnnnnnnnnnnnnnnnnnnnnnnnnnnnnnnnnnnnnnnnnnnnnnnnnnnnnnnnnnnnnnnnnnnnnnnnnnnnnnnnnnnnnnnnnacccatcggaaacattccgccagttgaagccgaacaacgctactacgccatgctggacgaaccagccatggcagcataacttaaaccaaatagcctccgacaattccggggcggttcagatcgccaagttcacacctcaagagaacaaggtaatggcccccttaatttgtggggcaaactcgatgaagggaagtggcgtggaatttagatcagaaaaacaaaaggaattcttcagtcgcgtcgtgacacacattgccaagcccgacctgcctttactgctagaaggcgcaactggccttggcaagacacttccctatatgctggccgcgttgagatcgggcaaaagagtggcattagtctatccaacccaccagttgatcaatcaggcacttgcgtcttgggatttaaagaccgcactggcggatacgcctagaacactggtcgcgtttagacctcgtgcatatttcaacgatgatcagaaggcttatcaggataacaaacaagacgctttggcggccgatattatgttgtgtacctctgtctctgtgatcatcgatcagcgaatgggtggcggatataacgggtcgactgagcgagaggtcatcatattcgatgaggccgatcagctaccggcgtttgcagctttgacatctgatgtaacgatcacgcgccaggagctgcgcgatcatggtgtgactggagtgacgcccaagcagactgtgagcgatctgctgaagaagaagtcggtgaagggcgagttgcaaggtcgagctaaactgatctgcgaagcaattgaacaggacgtttggtttgcgaaggcaggcatgactgacgatggcggcgtggcagtgtattcgcgtctgccgggtcggctgctgaagaaagtatccaaccggccttcgaccgtatttgtttcagccacattgtcagtaggtggctcgttcaacgacttcaaacgtgccatgggtattggcgatcaaagtaaactgtccacccccagcattgaacctgttcatcacggtacgctgactttcgatttccgaaccgaatacgcagttgatacagacgaatggctgaccggagtggttgaagagatcaatggcgcagacggaccggtgctggtcgcgaccccttcgcacgctttggctcagaagttgggagcacggatcactgacgccgtggttcgtcaggccgacgagacaaccagcgaagccgtaaagcggcttggtaacacaagcatattgatcgctgctggcgcttgggcaggcctagatacacccgtagagtgggcgactatcgttgtgccgcgcgttcccttcacagggccgaagatggtctacgacgtctggcacgaagacgccgaagaacaggctgtcacaatcggcgaggcaatgacgcactatattgatagtaagaactcagctgcacggagaatgaagcaagtctttggccgtgggttgcgtcatccaaaagcaatttgccgtgtcgtgatttgtgacccacgcatcgatcaacttggcgatattgcgcccaagcgcttcaaggcagggttctgggaaggccgtaagatcgagcaaacccgcactgtgtcagaacgaaaccccgcattgcgtaaagatgcgctacttcatcacggcacggactgccaagcgtgcgatttcaagccagtgtcactgcgccaggtggaagttcaccacctcaatccgctggccgaccgggtggggggctatacgaagatagaagacgttgccgtgctctgccgcaactgccatggactggtgcattcggaggatccaccaatcccgctggaccggctaagaaaaacgaagaaagagcgcaagcctaaattctcaatctcaatggggtagcgcaccaagtgtacgccagatgtgctgtgacagccgacagattgtgacacatgcgatttgggcactgtggatgcgctggggcacggtatggtcgtttgtgccccatgtcgctcgtcattcataacacatcaaattggcgacggattgtcgttcgaaatgtgcattagaaagatcagcgcgttcccgcttcttgatggcatggccttgaatgaaaaatgggcctgctgcgtgcaggccagcgttctcaatggtacaatggagtgccgaaagaaacggcgggtaattcctgagcaggtcttcgtgggacactttgtcccttgaggatttttcggcgaagcgtagccaagactttacgaccggcccggcggtgttcttcaggcgagaggcaattgtcgaaatagtaattcaacccctatcctccggcacatcatctgaaatttcgaggaatctcatggaaggacaaactccatcatcaatacgttggcacttcggcccggaatggccggggcgtcgttgtggagccaggacgcgacagggaacgccctgccagaagcctgtattgcgcggaaggaaccgttgtcagttgcatggcggtcgtgccggggcaccacgtggcaaaaggcatggcaactacaagcatgggcggtacacgatcacagccacggaaaggcaccaagaggccatggcgcgcatcaggtatttattgctgctggggcgggcctgcaggatttttaattgaagattgccgggcaagaaatagatgccacatcacgacccccacccaaaatatagaagatagtacccctatgacccccagcccaccggcacaaaagggaaccgatttaaggtattttcatagtcaaaagggcaccgttagcgggttattggggcactggggatgcgttttttgacactggaggtgaagggcgtggccgtttcgtgccagccttctggcgtccggctttgtaccgggatagcgccgcatcagccgtgacttgattaaccgaatgccattcatccgtaggcggcgtatttccgacgggcagatacgtgagtcggtatgcctgcgggttcctgatttgtccgccgaatttgttgttcggttggatgatccgcaagaggccgagggcgtctccaagcttaagggagcgcgtgatgtcctttcgggacaaaccggcttcagccaattgcccataggaaacaaggaggttcccgtttgcggttccagcatgttgcaagtgctctatttcgatacgctccaaaatgcgcatcagcggcacgcttcgcgagcgccatgcggggctttgcagcatcgggagtcgatgcgcaacccacgccacgcctgcgagataattgctgctatttttcttcgccatttgtcgctccgttccagccgtacagcgggccgcaatgacggcattcacgttgcgaaacccctctgcgcaaggtatccccgcatttcgggcacttcgagccagaacgctgaattgacgttgcgcggactcgtgagggatatcgtggatcgacgggctttcccccatcgacgacgacttcggcttcggtgctcgccttgtgggtcgggcgaatatcgatggtgggcaattggtcaatccgcgccggaaagctttcaaggatagttattgcggatggaagatcttcggccttgagggcacggatggcggccatgagagcatcgcgagtaccaaagtagccgatattgtcccaacgcgctctaccgtgcctttttccggctcgtttctgcagaatccattgatgaccgtccggcgcttcgacgacacgaagtctgtcgtttatcttgcaaatcaaattcatgtcgttctcccgtttggccgatagatatcaacggtcgagagagcgacaacggctccggaatagaaaacagtgatccgcgctatcagtgccggtgccttattgtgacgagttgggaggaaccgaagttcccccacgtctggcacatagcatttccggtgccgcaaataggtttcagcgagggttccagcgatggggcgcgcagagcgccatatgctgtctgcggtggatgaccacgccaagcatttttgcgctaccgcgttcatgaaacttgctccggggaaagccggcatcggtcgtcaagccatttccttgcctcggcaattgagtaatttttttctcgcattactaagtccacgaggtcgccttcttctccactcccaaaatctttgaaccgcccggctcggtctccagcgacatgaacgcacaggcttccattgggtctataacgccaatcatccgcgttgttaaaatccctgttgggtttgccaagcaaggagcgcgaaacgtctcgtgcatgtggtgcatatctttccgtcaggtcacccatggtcatgcctcctctctattggatttggcagtttcagcgcggtcgctgtcaccggcatcgatgctcaatacacagcgtgtttccagccacacagtgatttccgattcgcgccaaccgattttgcggagaccgatccggatacgcttcgggaattctcctgccttttcaagtcgccatatttggctgcgggagaggggaataatgtcacgtaggtctttctgcgtgaggattcggtctgtccatggcggatgcataggctgctccttggctcgtgttgcgacgaacgggagcatacgtcacggtgggggcgatgcggaaatgtaaacttgtgcatcgcgagtaaagaccagcacatatataattggtaaatatctatagatagtttatattgatataaaaggaaatatatattagtaataataagtgtaaattacgttttggggtctattcctttgaaaagtccgtgggcgctaattggtcaactctccgatcatatcggggccaagctgatctatgcagcggtaccaaatgccaaagtcctgatcggcgacaaaggctatgacagcgacgagttccgagaggtgctgaacgcccgaaagatcaaagcctgcatcccaccacgatcaaaccggacagcgccaaggagttactccaaaagtttgcacaagcaacgtcataaggtggaaaacctgttcgcaaagctcaaagactggcggcgcatcgaacctgatacgaccgctctgcacatacattcatgtcggcaatctgcatcgcagcaatcatcatcttcttgatcaatcaatgagtcctgaccctagctacaaatcttttgaaccagtccgcttttctccagcgaatgatcgtactctgattcacaccacatttttttgcgagatcacggctgctaattgacgggtctcttcgcgcttctttggcggcacgatatttcttctcgctcatattcggtcgcggattcggaacggccaatcccgagtcgatttgcagctggataagtgaataaagggcgggcggtatggggttgccgatacggttgactatttcgagaaatgccaatgcgatgtccgctatgaggcttggactaatcaaatggcccgctcttacgcctgcttcgcttacattcttcctcgtttgcacgtcatttcggatgcccaagagaaccaatccgcttagctcctcgatgttccgcaaataaacaatgtcatcggcgaaatcgggattggaaccaaaaagtgcctcttccaagtcctctggtttgataccccattcgcggagacgatgtcgttttcctttgtcttcgagtttcactataaggcggccgactgcgtcttccaaaatcgctcgattccattcaaccaaatcttcggatagtccgagctgtgtatattcttccagcgttagccttggcttctgaaataattcgtcgtcagacatttcaaattagatcccgtgttcgatattggctggcagcgatcacattaccaaattagcgacaaacgcgccccaccgttctaacgcgtctttgcgctgatcgagataggcgtggcgctggtagacggcggctatgccggtcacggcaccagaactgtgatttaggatcttatcgaccacgacgggctcaataccgaggtcgccggtcgctatcgtcgcaagcgtccgacgcaggtcatggatggtccagccgttcacgccggacaatttgtccaaccgttccttaacctttgagaaacccgagatcggagtggtgccggtagtcgtgaacacatagttggaaccatttaagtgattgatgccattcagtgctgagactaactgtcgatgaaagatgaacatgatgagccttgccgttcttggcgcgctcgccgggtatcatccattccctcttttcaagatcaaactcagaccaacgagcacctgccacttcgttgcggcgctgacccgtcagaatcagagtttggatatatgggccaaaaggctgaccaatctgttccgttgcttcccagatcgctcccaattcagttggcgtgagcgtacggtcccggctgttctcgttcgccggcttctttataccgttcgcaggagacacggcgatgatgtcttgctcgaccgcccaattgaacattcggcgcaaataggccagcaaacgattggcgtggataggcgttccacgatcgacaacgcccgctagaagccgctggatgtcttgcttggtgatcgtatcgatgggcttgttgcccagcacaggacggacgtcacggaccagcgcacgacgtttttcggcggtcgatttccgtttctttgcagcctgatcacgattcaaccaatcttcgagcaccgtagtaaatataggagccgcctttggctttattatcgctccgacggtggcgatctgctcgaagagatcgcccgccttctgacgggctacggcaagcttgacgtcgggatagcgcccaatggttatgcgtttcatgctcccgtctacgcgtcgcatggcgaaccacgtcttcgtgccggatggggcaagccgcaggccgaggccccgctggacggtatcatagatatccttccgggcgggaggagctttcaggctgcgtaggaaagtgtcggtgaaagccttttcggtaagtttcggcataacgtcctcgaatgttgtgtgtcgcgcgtttgtgggttacacagtgggttacaaaatcgatgacacagagcgagacaacatgcaacagattgaggcagaaatatatccaagacattgttttttctgactttgttccgaacaccctgcaacgcgaagaaactaagcgaaaccaagtagcaccagattcctaatctgggggtcgcgcgttcgaatcgcgccgggatcaccattttccgatccactttccagaacgcgtgccgacctgtcagagcgtttttgcctgctgcttcctggtgcactttgcacctgaccgtgtatacttgcccccaggaaaaccgggagcaatcaatgcgaatactttttaccggcgggtcgggcaaggccgggcgccatgcggtggcctatcttctggacaagggtcacagggtcttgaatgtcgatctgacgcccctcgtccatcccggcgtcgacaaccgcatagccgacatcaccaatgccggacagatgttcgatgtgatggcgagttatgccgggttcgacgagctggagccgggcaccggcgttccccgcttcgatgccgtcgtgcattttgcagccattccacggcttttgttgacagccgacaacgaatgctaccggatcaacacattgggcacctacaatgtcattgatgcggcggtgaagcttggcgtcaggaagatcatcttcgcctcctcggaaacaacctatggcgtgtgttttgccgacggggaacgcaaaccggactatctgccaatcgacgaggagcatccggttgtgcccgaagacagctatgccatgtcaaaggtcgtcaat

SEQ ID NO: 64 - DNA, 17423 bp, Artificial Sequence
  Synthetic Oligonucleotide
  misc_feature (1)..(5971): n is a, c, g, or t
nnnnnnnnnnnnnnnnnnnnnnnnnnnnnnnnnnnnnnnnnnnnnnnnnnnnnnnnnnnnnnnnnnnnnnnnnnnnnnnnnnnnnnnnnnnnnnnnnnnnnnnnnnnnnnnnnnnnnnnnnnnnnnnnnnnnnnnnnnnnnnnnnnnnnnnnnnnnnnnnnnnnnnnnnnnnnnnnnnnnnnnnnnnnnnnnnnnnnnnnnnnnnnnnnnnnnnnnnnnnnnnnnnnnnnnnnnnnnnnnnnnnnnnnnnnnnnnnnnnnnnnnnnnnnnnnnnnnnnnnnnnnnnnnnnnnnnnnnnnnnnnnnnnnnnnnnnnnnnnnnnnnnnnnnnnnnnnnnnnnnnnnnnnnnnnnnnnnnnnnnnnnnnnnnnnnnnnnnnnnnnnnnnnnnnnnnnnnnnnnnnnnnnnnnnnnnnnnnnnnnnnnnnnnnnnnnnnnnnnnnnnnnnnnnnnnnnnnnnnnnnnnnnnnnnnnnnnnnnnnnnnnnnnnnnnnnnnnnnnnnnnnnnnnnnnnnnnnnnnnnnnnnnnnnnnnnnnnnnnnnnnnnnnnnnnnnnnnnnnnnnnnnnnnnnnnnnnnnnnnnnnnnnnnnnnnnnnnnnnnnnnnnnnnnnnnnnnnnnnnnnnnnnnnnnnnnnnnnnnnnnnnnnnnnnnnnnnnnnnnnnnnnnnnnnnnnnnnnnnnnnnnnnnnnnnnnnnnnnnnnnnnnnnnnnnnnnnnnnnnnnnnnnnnnnnnnnnnnnnnnnnnnnnnnnnnnnnnnnnnnnnnnnnnnnnnnnnnnnnnnnnnnnnnnnnnnnnnnnnnnnnnnnnnnnnnnnnnnnnnnnnnnnnnnnnnnnnnnnnnnnnnnnnnnnnnnnnnnnnnnnnnnnnnnnnnnnnnnnnnnnnnnnnnnnnnnnnnnnnnnnnnnnnnnnnnnnnnnnnnnnnnnnnnnnnnnnnnnnnnnnnnnnnnnnnnnnnnnnnnnnnnnnnnnnnnnnnnnnnnnnnnnnnnnnnnnnnnnnnnnnnnnnnnnnnnnnnnnnnnnnnnnnnnnnnnnnnnnnnnnnnnnnnnnnnnnnnnnnnnnnnnnnnnnnnnnnnnnnnnnnnnnnnnnnnnnnnnnnnnnnnnnnnnnnnnnnnnnnnnnnnnnnnnnnnnnnnnnnnnnnnnnnnnnnnnnnnnnnnnnnnnnnnnnnnnnnnnnnnnnnnnnnnnnnnnnnnnnnnnnnnnnnnnnnnnnnnnnnnnnnnnnnnnnnnnnnnnnnnnnnnnnnnnnnnnnnnnnnnnnnnnnnnnnnnnnnnnnnnnnnnnnnnnnnnnnnnnnnnnnnnnnnnnnnnnnnnnnnnnnnnnnnnnnnnnnnnnnnnnnnnnnnnnnnnnnnnnnnnnnnnnnnnnnnnnnnnnnnnnnnnnnnnnnnnnnnnnnnnnnnnnnnnnnnnnnnnnnnnnnnnnnnnnnnnnnnnnnnnnnnnnnnnnnnnnnnnnnnnnnnnnnnnnnnnnnnnnnnnnnnnnnnnnnnnnnnnnnnnnnnnnnnnnnnnnnnnnnnnnnnnnnnnnnnnnnnnnnnnnnnnnnnnnnnnnnnnnnnnnnnnnnnnnnnnnnnnnnnnnnnnnnnnnnnnnnnnnnnnnnnnnnnnnnnnnnnnnnnnnnnnnnnnnnnnnnnnnnnnnnnnnnnnnnnnnnnnnnnnnnnnnnnnnnnnnnnnnnnnnnnnnnnnnnnnnnnnnnnnnnnnnnnnnnnnnnnnnnnnnnnnnnnnnnnnnnnnnnnnnnnnnnnnnnnnnnnnnnnnnnnnnnnnnnnnnnnnnnnnnnnnnnnnnnnnnnnnnnnnnnnnnnnnnnnnnnnnnnnnnnnnnnnnnnnnnnnnnnnnnnnnnnnnnnnnnnnnnnnnnnnnnnnnnnnnnnnnnnnnnnnnnnnnnnnnnnnnnnnnnnnnnnnnnnnnnnnnnnnnnnnnnnnnnnnnnnnnnnnnnnnnnnnnnnnnnnnnnnnnnnnnnnnnnnnnnnnnnnnnnnnnnnnnnnnnnnnnnnnnnnnnnnnnnnnnnnnnnnnnnnnnnnnnnnnnnnnnnnnnnnnnnnnnnnnnnnnnnnnnnnnnnnnnnnnnnnnnnnnnnnnnnnnnnnnnnnnnnnnnnnnnnnnnnnnnnnnnnnnnnnnnnnnnnnnnnnnnnnnnnnnnnnnnnnnnnnnnnnnnnnnnnnnnnnnnnnnnnnnnnnnnnnnnnnnnnnnnnnnnnnnnnnnnnnnnnnnnnnnnnnnnnnnnnnnnnnnnnnnnnnnnnnnnnnnnnnnnnnnnnnnnnnnnnnnnnnnnnnnnnnnnnnnnnnnnnnnnnnnnnnnnnnnnnnnnnnnnnnnnnnnnnnnnnnnnnnnnnnnnnnnnnnnnnnnnnnnnnnnnnnnnnnnnnnnnnnnnnnnnnnnnnnnnnnnnnnnnnnnnnnnnnnnnnnnnnnnnnnnnnnnnnnnnnnnnnnnnnnnnnnnnnnnnnnnnnnnnnnnnnnnnnnnnnnnnnnnnnnnnnnnnnnnnnnnnnnnnnnnnnnnnnnnnnnnnnnnnnnnnnnnnnnnnnnnnnnnnnnnnnnnnnnnnnnnnnnnnnnnnnnnnnnnnnnnnnnnnnnnnnnnnnnnnnnnnnnnnnnnnnnnnnnnnnnnnnnnnnnnnnnnnnnnnnnnnnnnnnnnnnnnnnnnnnnnnnnnnnnnnnnnnnnnnnnnnnnnnnnnnnnnnnnnnnnnnnnnnnnnnnnnnnnnnnnnnnnnnnnnnnnnnnnnnnnnnnnnnnnnnnnnnnnnnnnnnnnnnnnnnnnnnnnnnnnnnnnnnnnnnnnnnnnnnnnnnnnnnnnnnnnnnnnnnnnnnnnnnnnnnnnnnnnnnnnnnnnnnnnnnnnnnnnnnnnnnnnnnnnnnnnnnnnnnnnnnnnnnnnnnnnnnnnnnnnnnnnnnnnnnnnnnnnnnnnnnnnnnnnnnnnnnnnnnnnnnnnnnnnnnnnnnnnnnnnnnnnnnnnnnnnnnnnnnnnnnnnnnnnnnnnnnnnnnnnnnnnnnnnnnnnnnnnnnnnnnnnnnnnnnnnnnnnnnnnnnnnnnnnnnnnnnnnnnnnnnnnnnnnnnnnnnnnnnnnnnnnnnnnnnnnnnnnnnnnnnnnnnnnnnnnnnnnnnnnnnnnnnnnnnnnnnnnnnnnnnnnnnnnnnnnnnnnnnnnnnnnnnnnnnnnnnnnnnnnnnnnnnnnnnnnnnnnnnnnnnnnnnnnnnnnnnnnnnnnnnnnnnnnnnnnnnnnnnnnnnnnnnnnnnnnnnnnnnnnnnnnnnnnnnnnnnnnnnnnnnnnnnnnnnnnnnnnnnnnnnnnnnnnnnnnnnnnnnnnnnnnnnnnnnnnnnnnnnnnnnnnnnnnnnnnnnnnnnnnnnnnnnnnnnnnnnnnnnnnnnnnnnnnnnnnnnnnnnnnnnnnnnnnnnnnnnnnnnnnnnnnnnnnnnnnnnnnnnnnnnnnnnnnnnnnnnnnnnnnnnnnnnnnnnnnnnnnnnnnnnnnnnnnnnnnnnnnnnnnnnnnnnnnnnnnnnnnnnnnnnnnnnnnnnnnnnnnnnnnnnnnnnnnnnnnnnnnnnnnnnnnnnnnnnnnnnnnnnnnnnnnnnnnnnnnnnnnnnnnnnnnnnnnnnnnnnnnnnnnnnnnnnnnnnnnnnnnnnnnnnnnnnnnnnnnnnnnnnnnnnnnnnnnnnnnnnnnnnnnnnnnnnnnnnnnnnnnnnnnnnnnnnnnnnnnnnnnnnnnnnnnnnnnnnnnnnnnnnnnnnnnnnnnnnnnnnnnnnnnnnnnnnnnnnnnnnnnnnnnnnnnnnnnnnnnnnnnnnnnnnnnnnnnnnnnnnnnnnnnnnnnnnnnnnnnnnnnnnnnnnnnnnnnnnnnnnnnnnnnnnnnnnnnnnnnnnnnnnnnnnnnnnnnnnnnnnnnnnnnnnnnnnnnnnnnnnnnnnnnnnnnnnnnnnnnnnnnnnnnnnnnnnnnnnnnnnnnnnnnnnnnnnnnnnnnnnnnnnnnnnnnnnnnnnnnnnnnnnnnnnnnnnnnnnnnnnnnnnnnnnnnnnnnnnnnnnnnnnnnnnnnnnnnnnnnnnnnnnnnnnnnnnnnnnnnnnnnnnnnnnnnnnnnnnnnnnnnnnnnnnnnnnnnnnnnnnnnnnnnnnnnnnnnnnnnnnnnnnnnnnnnnnnnnnnnnnnnnnnnnnnnnnnnnnnnnnnnnnnnnnnnnnnnnnnnnnnnnnnnnnnnnnnnnnnnnnnnnnnnnnnnnnnnnnnnnnnnnnnnnnnnnnnnnnnnnnnnnnnnnnnnnnnnnnnnnnnnnnnnnnnnnnnnnnnnnnnnnnnnnnnnnnnnnnnnnnnnnnnnnnnnnnnnnnnnnnnnnnnnnnnnnnnnnnnnnnnnnnnnnnnnnnnnnnnnnnnnnnnnnnnnnnnnnnnnnnnnnnnnnnnnnnnnnnnnnnnnnnnnnnnnnnnnnnnnnnnnnnnnnnnnnnnnnnnnnnnnnnnnnnnnnnnnnnnnnnnnnnnnnnnnnnnnnnnnnnnnnnnnnnnnnnnnnnnnnnnnnnnnnnnnnnnnnnnnnnnnnnnnnnnnnnnnnnnnnnnnnnnnnnnnnnnnnnnnnnnnnnnnnnnnnnnnnnnnnnnnnnnnnnnnnnnnnnnnnnnnnnnnnnnnnnnnnnnnnnnnnnnnnnnnnnnnnnnnnnnnnnnnnnnnnnnnnnnnnnnnnnnnnnnnnnnnnnnnnnnnnnnnnnnnnnnnnnnnnnnnnnnnnnnnnnnnnnnnnnnnnnnnnnnnnnnnnnnnnnnnnnnnnnnnnnnnnnnnnnnnnnnnnnnnnnnnnnnnnnnnnnnnnnnnnnnnnnnnnnnnnnnnnnnnnnnnnnnnnnnnnnnnnnnnnnnnnnnnnnnnnnnnnnnnnnnnnnnnnnnnnnnnnnnnnnnnnnnnnnnnnnnnnnnnnnnnnnnnnnnnnnnnnnnnnnnnnnnnnnnnnnnnnnnnnnnnnnnnnnnnnnnnnnnnnnnnnnnnnnnnnnnnnnnnnnnnnnnnnnnnnnnnnnnnnnnnnnnnnnnnnnnnnnnnnnnnnnnnnnnnnnnnnnnnnnnnnnnnnnnnnnnnnnnnnnnnnnnnnnnnnnnnnnnnnnnnnnnnnnnnnnnnnnnnnnnnnnnnnnnnnnnnnnnnnnnnnnnnnnnnnnnnnnnnnnnnnnnnnnnnnnnnnnnnnnnnnnnnnnnnnnnnnnnnnnnnnnnnnnnnnnnnnnnnnnnnnnnnnnnnnnnnnnnnnnnnnnnnnnnnnnnnnnnnnnnnnnnnnnnnnnnnnnnnnnnnnnnnnnnnnnnnnnnnnnnnnnnnnnnnnnnnnnnnnnnnnnnnnnnnnnnnnnnnnnnnnnnnnnnnnnnnnnnnnnnnnnnnnnnnnnnnnnnnnnnnnnnnnnnnnnnnnnnnnnnnnnnnnnnnnnnnnnnnnnnnnnnnnnnnnnnnnnnnnnnnnnnnnnnnnnnnnnnnnnnnnnnnnnnnnnnnnnnnnnnnnnnnnnnnnnnnnnnnnnnnnnnnnnnnnnnnnnnnnnnnnnnnnnnnnnnnnnnnnnnnnnnnnnnnnnnnnnnnnnnnnnnnnnnnnnnnnnnnnnnnnnnnnnnnnnnnnnnnnnnnnnnnnnnnnnnnnnnnnnnnnnnnnnnnnnnnnnnnnnnnnnnnnnnnnnnnnnnnnnnnnnnnnnnnnnnnnnnnnnnnnnnnnnnnnnnnnnnnnnnnnnnnnnnnnnnnnnnnnnnnnnnnnnnnnnnnnnnnnnnnnnnnnnnnnnnnnnnnnnnnnnnnnnnnnnnnnnnnnnnnnnnnnnnnnnnnnnnnnnnnnnnnnnnnnnnnnnnnnnnnnnnnnnnnnnnnnnnnnnnnnnnnnnnnnnnnnnnnnnnnnnnnnnnnnnnnnnnnnnnnnnnnnnnnnnnnnnnnnnnnnnnnnnnnnnnnnnnnnnnnnnnnnnnnnnnnnnnnnnnnnnnnnnnnnnnnnnnnnnnnnnnnnnnnnnnnnnnnnnnnnnnnnnnnnnnnnncatattaagggggcccatagttccacaatattcacgccaaaacttatcaagttagcttgaatgctttcttcattgccttgcccttaagttcgtaatagcttttgctttttttggttagatgaatatattttgttcttctattatcgttttgaaatctagtttcaacccactcattttctaacatttgactaaattttcgatgcagtgttgctggcgatgcaagatttattaactccattacatcactaactgtcattggttcatcgtgcagttcacgaactgcaatatcatccaatatcaatgcacagactggctctaagtctgcagttacatcttctttttgcatgctttttaaaatattaacaaatcgcaagtagtaaatcattcaagtacattttcaaaaagttgtaatttgtttatcttaatctattttttcatttttttaaataattttgacacagacagcaaaattagtgcaactaaagtaattccagtcatatcgcctataaacattacataattatttgcaagaaatgcaaatgagtaaattaacgcaagtattggtatcagcactattttcataactattttttggcaagttaatttttattatattaataagtgtagcaatatgcttgtagtttttgtaattaaggtagatgatgagctaatgcaaacgtaagcagttactccctgcccctaaatttcagattctgagacccccaccgtacccccaccccctaaattaggtttgggactcctactagggctatacactctattttgctcaacagtacccgtactttttttagttcgggtatttgccatccaagttattgaatccatccaccataattcatagcaatggaaaaattaaaaatttcaatgactttattaagccctctgattacaaacggggggtatatgaccttggacgcattgcttgcggctttgatatttgaacaaacgggtgaccttgcgaaagcccactcagaaatccctttaatgaatacccaaggcttatggaatgggagtgctgccatctttgaaaaaatagactttgctaagaaagtgttcgttgcaaatttacgtgcttcacatgatttggatttggatttggttgcaaaaaaggctgctggaaatccgcatacaaaaattggattaacgaggagaagagaatttggtgctgtgttaaacagttatccaatggttactgcaccatcaatcacttggtatgcgatgggggatagagaaaaaatacacaaacttttatctgatgttgagtttattggcaagcgcagagccagcgggtatggtcaggtatctaatcttcaaattgaagatgctgaccttgatggagtagtcggacattttggtgagcctttgcgtcctgtgccggtggagttatttactggagacaaggcatcactcaaggttgatgcatcgtggaagcctgcgtactggcatccagccaatcgtgcagtgtgttttgtgcctgaggttgtttaatgaacacctttgaatttttcaatgaatattttggtaagcatcttgttaaacaagatggtgaggctcacgttgcggcttatagagcattgtcaagcaatcataaattagccaaaggaactgacgggcgtctccagtctggctgggcgattattagaccaagcgtttcaagtgttcaattgaagttatctgcctcagggcttaattttgatgaaagaacaagaattgaagccttcatggatgaacttgaaaactgggatgggattgagcctcgtatctttctgatgtttgacaaagcgccagtacctattgaaaatttatttatgacggtggataaacgtgcaattcgtatttgttcccccgctggtgttgagacctttgatatgaattctgaacccaatgaggaatcaggcggtattcaaaaggcaatatggaagcgcaaggtggttaaatgattaaccataccattccaaagccggagaagattgcaggctatcaacttcataggatggttgcagaattggttgacggctttcctgcccagtttgttgacaacggtgaccatttattaataagaacaaataagccaattaccaacagtggaaaagaattaacaataccagaacaaggcgcagtgattgtctttgaacttaaagcatcggttgcaacacgtatgggcggaaagaatatataccctgaaatccatgattggcgaagtagacgtgagtggcttgaagcagagggattaaaaggtgggtttgaggtgttggcagttcatgtcactggggacagacaaaacgtagttgcaagtggtggcaggaaattttggattgacgcaacacaatttactggagttttgaaggttcaagacaaagacaaattttcaaatgttttagcaaatggcatcggtcgagttggtaaagcatttggtatgggtatgttggttatttaattgggagattcaaaatgaaaattatcattaacgccaaaatcaaaaccttggcgcctttatctatcaagatgcctaagcctgaggggggaagggaaaatgattttgaaaattttcccgtcatgactcgaggtattgacgaggctggaaataaattacaaacaggttatctgccagcaactacccttagagggtttctgcgtcgtgctgtgacgctacgcagtatgaagattgcggcagatagcggcaagccatataagttgccacaggtctattcagagatgattggacaagatgcggaaagtgaaaagcaagcaggcgatattgatttgctggcaatccgaaaagccagacaagatagcccaattcttgatttgtttggtagtggtcttggaattaaatcaagaattaaggtgagccattttgttccatcagttaatgttttgcctgaagtgttcaccggtgtcagaaaagaccttgacgacacggaggatgcacttgagttaatggataagactgagatgagttcctttttaggtaggagtgagagtaataacaagagagcggcagcctctgcgttggttaagcaactcgagacttcggtgagaaggatggaaagaaagggggatgctgtccctcctgatattgccaaagcgcttgaagcagcaaaagccaaagaggataaatttaaatctgagatgggtgatatggcaaacagttcccgaacaattgttcagcactatgcattaccttcaggtattgagttgagtggtcgcattgttatagagaatgcggttgagcgtgacatggacttaattcaacacggtcttgatgagttaagtaagaagcctgttcttggcgcacatagtgctagaggctgcggtgaagttgaaggtacgtttcaaatatttaatgatgacggtaaattattaaaaactatctttgtgggtgactacaaggcatcaaaagtgacggaattttcttgagcaaaaagggggaaaccataaataaatcaatgctgtatcagttgtcaggtcaagccaccatgcaaatgtgtggctactagaagaaggcgcaattatttgtcaaacgtgttaatggtcaagccaccatgcaaatgtgtggctactagaagcggaactggtcattacctctgcgtgaggtgggtcaagccaccatgcaaatgtgtggctactagaaggtgaacagttgagttttgtcgagttccttgggtcaagccaccatgcaaatgtgtggctactagaagcagaaagcggttcaaaagacgattgataacggtcaagccaccatgcaaatgtgtggctactagaagtagtaagcccccatgatggcggcatcgaatgggtcaagccaccatgcaaatgtgtggctactagaagcattgcctgacgaataaccaaagagtaggtggtcaagccaccatgcaaatgtgtggctactaaagatggaattgcagccccgatgctgtaatgtttaattaagccgccccttcgggggtggctattttttattcctgactatgagtgaaaatgggatatcaagaaggtaacaaatgtttcgttctcaagagcaatccaacttcaacgccatagtcactaagcatatggctcaaagcgatgcgcctttactcttggagggggcgacaggcttaggaaagactcgagcctatttgtctgcggttatggatgcagttaaaacgggtcgcaagatagcaattgcactgcccagccatcaactgattgaccagttgctggtttccagcgatttattagaaacacaaagttctggcgttcgggttgtagcgtttaaacctgcccgtatgtttgaaaatagaaatcaatacaaagaatataaagacttggcgatggattcggatgtgatgttatgtacgagtgcatctatcatcattgaccagcgccttggtggagattacaacggtgcaacaaagcgtgattacattatttttgatgaggctgaccaactgcccgatgcggctgctttgcaaagcgattgtgaaattacaaaagaacaactcaaagagttaaacatcactgccgaaacggctggacaggtagtgacagaagttttaaagaagaagaatcttgagcctgaggtcaaggcttctgccctgatgatattagaggctattgaagagcctgcgtggttttacaaagcggggctaaccgataacggtggcgtgaggttatttcacaaaatgccgggtcgactacttaaaaaaatagccaatagaagtgaggttgcttttatcagcgcaacgttatctgtacatggaaagtttgatgattttaaaagggctatgggtatccaaaaggagagcaacctatcttgcatcattgaaccagccaaacatggacagttaacttttgaagtctcagaggttgaggtaaatactcctgaatggttagatgctattaaatcaaccatcaattccgcccccaaaccaattttgattgttaccccaagtcatgacctatccaatacactgggcgcaatcattcctaactcaaccataagaagtagggacgaaacttccactgaagcctccaagcgaatgggtaactcagagattttgattgcctcaggtgcatgggctggaatggatacacccattaagtgggggtcgattgttgtgccaagaatcccctatgagcctccaacagttttagatggtgaggttgagagcagtttctttgattcacgtaacactgctttacgaaggatgcgtcaggtcattggacgaggcttacgttctccagatgcggtatgcaagatttttgtgcttgatggtcgatataagagtattggggcgtttattccagatagatttaaaaatgcttgggctgaaaaatcctccaaggaaggtaagcggtatgaagtcacgctgtccaagattgaaagagaccccgctgtccgaaagcgagccttaaaacactacggtcactcatgtatgagttgccagttttcaccaaaagttattagccaacttgatgttcatcatttgaatccattatctgacggtggagagcgtataacaactattgatgatgtagcggttttgtgtgctaactgtcacaggctggcacattcaactagtcctccgctaacagtcgaagacatgaaggcattgcaggcctaataaacgtaattaggtaattaaacaaggatgaaaatctagttctcaaactgcgggtgttttaactaacttgtcactcaattaggatattcgccactgcgtttggctgactgtggagttggagcaacacacaaatcaattcgttcaatgaaatcgcccttaacttctgcaaagacgacagcaaccaagttttctttatcaccttgtgcgagtacaacacatgggccgggaaaactatgcgtcaatgttgccatttcagcccaaacggtttctcctgacgatttaactactttgagtttcgagttgatgtaatctaaatattctttttttgattcgatttcagagaacaccatttgcgaagaataacaaaagtggtttgctagcagtggttccaattttgaggaatccaaggtattcatcatcgatgcgaatgctcttagtgcagtttcaatagttaacattttggactctctcgaacgtatgtgattttactttattctgcgtgggttggactttagatttcgtaaataaaattactttcagtacgaacgttcgcattggcaacatgcgaacaaatgggtaatatttgccaattaactagcgtcttatcttgggtggatatgagtatttcaagtgacaaaattgatgattcaacttatataacacttgcaggcggtgcgatacgctgccgccgctgtttggcaaggtcaagcaggacgggcgagcaatgtcgcaaacctgcgatgaaatcaagcaggacgcagaaatgtacgcatcacggcggtcgctccaaaggggcgaccactgccaaaggcaaacaacgaattattgatgccaacctgaagcacggggaatgcaccttggctgaaaggaagcgtcattcccaaatttctgcgagattatcaatgcttgaagattgcatgattgttcttggcatgggggatggactgcgtattcgaggcagaaagcccgcaggctattgcccaatacgaacgatggacgaggttaaacaattcctcgtgggaattcagtaacaccatgtgtagggggtcaaacggtctcgttaattttttttaatcgtctaacccatcgaccgcattttcagcaccttctgaaaaataaattaataacttcacttacaagccgagttctaaaatgctggctaaagaagttggacaggttggacagcattttcatcatttccgtgttttctcctcgtgagattcaatattttaagaaaagggtaaattgaccaacatcctgtccatcctgtccaaatctaagcgacaagttaactgtatgtgttatctacttgaagtttcaatccaacataaaaccgattactgccacttttaccatcaggaaacccacgctctgccaatcgctgggtaaaggactttttagttgaaagcctgaacccgtttaacttacaccagttcgtccatgcctcataggcagtattttgattaatctttgcatttgcatccgcctgcattacgtctgcaagaaactctccaaggaggtcgctttctgttctgtatttggcatgttcatgcaaaattcttgggctaagcctaagaccatccgcaaagtatttgcgtgcgccctcaagcatccactgcaatattccttggctctcagcaagaagtttctcttcaagattggggtctttttcaccatcagaaaactttctgttaaagcgcagcaatactagtctgcgccaaataccgtcgtcttcgccggtaacaattggcttatgattcgtccgaagccatgcagtaaaggttggcatgtattcaaaaaattctttgtgaagaaaacgtgctgaaatcggttcacgccctgcaatcattttgacgacctgctcatctaatcggtcaccggcttgaagttcgttgatagaaacataccgtgcgcctgccagcgcagccaagtcattccttggggatgcgtcatccgaccggcgagtggttaatactgttgaagcagcagtcgttgagtatccgccaagtatctgattaatcacattgccaaaaacactcttaccattgctgccaacaccatagcaaataacagcaatttcttcagtaaccagaccggttaaagtgtatccaagcaggagttgaacactttcaatggtcgcttcatcttcctcaaaaatttgatataaaaatctaatccaattggggcatacggcatcatcctcaaaatttgcattgcagtaccttgtaatgtaatagtgtggctggttatctatgtgttcaccagttttaagattaaccacaccatttaaaacacccagttggtatggattcgtgtccagttctcggtcagttactgccatgtccggctctgagattgcaagtctgagcatcgcttgaattcgtggaaggttgtgggcggttattgcttgcgaaatcatctttttgccacgctcatggtcttgaccgaaaattgaactagcagcacctaagatacgagcgcagcacatcttggcaaatgcaacctcctcttccttttcacataatatccatctccgtgttttatcccatttaagccaacgaccacgtgttgttacataaattagttcgcctgatgcaaggctggcaaatgccttagcgttacgaatgtcaccatgtgactcgatttgaagtaggtcatagtctaatgcctgtacatgagttatcttaggtaatgctaacggtttaggaggtgacagagcattttcaagtaatgcacccagtgcagcctttccatcacgcttcagacagtcattaacgtcatcatttttttcccaatcgtcaggcatggttgcaaccaagccttcaacactggtggcaatttgaatagcttgagattctttaccaacgtctgaaacaattacaagttggcaggcggggtaacgttcatgcaaagtgttggcaactcttgccatattcccagcgccaaaacaaacggctgctgggctgccagtagccagccagcatgcccaagcctgacctatgccttcaacgacatacacagtgcaaccgtcttgcaattggccaacattaaaaaacccagtcattgaatggtcaggtaaattcaatttagaaggtttgcctacgactttagccacaggcggaagtatgaactggagcgacacaatttctccatcaatgctcatgcatggaaccactaaggagcccaccatgcttctaccggcaatgaataaggtgtcgttttcaggaaccactcgcaaagagtccaaaggagcgccttgaccttctttctcaataacatagggatgctcgtcactagcaggctcacaacggctccaaatttgatttgggtcatacacgctagtcttggatgaatgaggctctggagccgttttagggcttaagatttgacttgaattagattgtttatattgccagccgtattttttagccaaatggaaaagtgttcctattgttattgaatttccagcgccgttagttttgcaactcctccaaactgaagcgcagtgctgctcgttaaaattactgctagtggaactccaatccctaaacaggtcatattcacagccctcagatttgagagccattgcgacatgaacccattcatctctaaataaatcagaaggaagatgagatagcgcacttttaactttttcaattggggtgggcgtttttttcatttcgcatccccatcaattcgagattgaacccaatcctcaaccaaattactcggccaaccagtgcttctgtttgttaatttaacccccttaggaaataaacctaatctgatttgtttataaattgatgaaggacgcaggcctgttattgcgcagacctcatttattcgatatatctttattgccatattcaacactcctaaaacgttgtatgcagttatgtaactgcaaggagcgaagcatatttttttgctataaataaactaggatatgaaaggtgggggtttcaggtagattgttgatttttaaggatattttagtctttgatgggataaggtgaacctaaatcgtattgtgatacctcggttgttttgtatggcttatttgcccttgagtaccacattttttcaatgtattcatatgtatgcttcttaaagcgcccctgatttttgccatcacggtctttgtaaatgtggtgttccttagtatttggatttatccactctccctctgaaagagccacaacggcttcaattgcttgctcaagagataagccaagtccgccatcgttctctaacgtcatggcacatgtcatccaatgtaggattaacctgttatcttcaagtgctatgtcatccgcctctttatggccagccatataggcaagtccaagtgcaaaattagcatcacaccccatttctattttttcaaatgcatttgctaaataatttaattgctcttcagttaatggcgtgtttttatttctaatttgtctggccaacgctccgtatcgttttctttgtgttcttacactcatattaagccctttttaaaactattaccttttcatctttattcatttttccatcgcaccaatctgaaaaccattgcatcatgcgaattcgctcatccatgaagtccgttcttaggtaggctcttcgggattgatttggttcttggtggtcaagttgccgctcaacggcatcaagattgaaagtcttctcatttaataagattataaaaagactatgggttaccacttaaataatatcaattatttatttaattaattgatgcaactttgcaaccatgtttaaacacgcatagtcaagttaagtaacccattactattgattgaacgtttaaacaaacacgggatgaaactataaaaaaatatttttagcctagttcctaaagagcattatcagaactaatctgcgtactcctgtcgatatagccataatccaaatctttaataaagtttttaaggtcaatacctcatgctctttaaagaaatatcactttattttgtctgtttaaacacgcattcgaagtcaagttttttaatcgcctcataaagaggcttaagtggaaatcgtccatcaccataagcatcgcccacatcagaactgcgatgacctgttaatcggtcatggtgctcttttctaacgccgccttgcctacatatatctttaaagcaatgtctaaaactatggaaacatttacgtttatcttgaatgccaacgacttgccttaagtaacgcccgaaccattgcgaccaactcgctgtaagttgacgtgagccggccgaggtcaacaaaggaaaaagtcttttgcagttgctattctttgcctgactgattaaatctagcaaacccaactcaattaacttggggtgaacagggacttgacgacatgaagagtcgttttttaggtgtttgccctgctcaggctcatgtactaaatcaaagcaccagatatcgtcgataagttttatatcctccgcagtcaattgaccgatttcttcaagacgcattccagacattaaagcgattaatggcagccaataagcagcatcacccgccccgccctttgggcggtatccatcggcataaacaggtgaagcaaacatgcgctgaagttcctcagttgtaaatggcatacgtgatttttcttgccgggccggtcgtaatatcttcaccccgctaaatacattcacgctaacaagcgcattgtctagtgccacttgaaaaatagacttcacaagcccaaggttcttaatggctgtggcatatgccaagccctctttgaccaaggagtccttaaaagcaattgcagcccttttatttagcaaactagcggg

SEQ ID NO: 65 - DNA, 17331 bp, Artificial Sequence
  Synthetic Oligonucleotide
  misc_feature (1)..(9735): n is a, c, g, or t
nnnnnnnnnnnnnnnnnnnnnnnnnnnnnnnnnnnnnnnnnnnnnnnnnnnnnnnnnnnnnnnnnnnnnnnnnnnnnnnnnnnnnnnnnnnnnnnnnnnnnnnnnnnnnnnnnnnnnnnnnnnnnnnnnnnnnnnnnnnnnnnnnnnnnnnnnnnnnnnnnnnnnnnnnnnnnnnnnnnnnnnnnnnnnnnnnnnnnnnnnnnnnnnnnnnnnnnnnnnnnnnnnnnnnnnnnnnnnnnnnnnnnnnnnnnnnnnnnnnnnnnnnnnnnnnnnnnnnnnnnnnnnnnnnnnnnnnnnnnnnnnnnnnnnnnnnnnnnnnnnnnnnnnnnnnnnnnnnnnnnnnnnnnnnnnnnnnnnnnnnnnnnnnnnnnnnnnnnnnnnnnnnnnnnnnnnnnnnnnnnnnnnnnnnnnnnnnnnnnnnnnnnnnnnnnnnnnnnnnnnnnnnnnnnnnnnnnnnnnnnnnnnnnnnnnnnnnnnnnnnnnnnnnnnnnnnnnnnnnnnnnnnnnnnnnnnnnnnnnnnnnnnnnnnnnnnnnnnnnnnnnnnnnnnnnnnnnnnnnnnnnnnnnnnnnnnnnnnnnnnnnnnnnnnnnnnnnnnnnnnnnnnnnnnnnnnnnnnnnnnnnnnnnnnnnnnnnnnnnnnnnnnnnnnnnnnnnnnnnnnnnnnnnnnnnnnnnnnnnnnnnnnnnnnnnnnnnnnnnnnnnnnnnnnnnnnnnnnnnnnnnnnnnnnnnnnnnnnnnnnnnnnnnnnnnnnnnnnnnnnnnnnnnnnnnnnnnnnnnnnnnnnnnnnnnnnnnnnnnnnnnnnnnnnnnnnnnnnnnnnnnnnnnnnnnnnnnnnnnnnnnnnnnnnnnnnnnnnnnnnnnnnnnnnnnnnnnnnnnnnnnnnnnnnnnnnnnnnnnnnnnnnnnnnnnnnnnnnnnnnnnnnnnnnnnnnnnnnnnnnnnnnnnnnnnnnnnnnnnnnnnnnnnnnnnnnnnnnnnnnnnnnnnnnnnnnnnnnnnnnnnnnnnnnnnnnnnnnnnnnnnnnnnnnnnnnnnnnnnnnnnnnnnnnnnnnnnnnnnnnnnnnnnnnnnnnnnnnnnnnnnnnnnnnnnnnnnnnnnnnnnnnnnnnnnnnnnnnnnnnnnnnnnnnnnnnnnnnnnnnnnnnnnnnnnnnnnnnnnnnnnnnnnnnnnnnnnnnnnnnnnnnnnnnnnnnnnnnnnnnnnnnnnnnnnnnnnnnnnnnnnnnnnnnnnnnnnnnnnnnnnnnnnnnnnnnnnnnnnnnnnnnnnnnnnnnnnnnnnnnnnnnnnnnnnnnnnnnnnnnnnnnnnnnnnnnnnnnnnnnnnnnnnnnnnnnnnnnnnnnnnnnnnnnnnnnnnnnnnnnnnnnnnnnnnnnnnnnnnnnnnnnnnnnnnnnnnnnnnnnnnnnnnnnnnnnnnnnnnnnnnnnnnnnnnnnnnnnnnnnnnnnnnnnnnnnnnnnnnnnnnnnnnnnnnnnnnnnnnnnnnnnnnnnnnnnnnnnnnnnnnnnnnnnnnnnnnnnnnnnnnnnnnnnnnnnnnnnnnnnnnnnnnnnnnnnnnnnnnnnnnnnnnnnnnnnnnnnnnnnnnnnnnnnnnnnnnnnnnnnnnnnnnnnnnnnnnnnnnnnnnnnnnnnnnnnnnnnnnnnnnnnnnnnnnnnnnnnnnnnnnnnnnnnnnnnnnnnnnnnnnnnnnnnnnnnnnnnnnnnnnnnnnnnnnnnnnnnnnnnnnnnnnnnnnnnnnnnnnnnnnnnnnnnnnnnnnnnnnnnnnnnnnnnnnnnnnnnnnnnnnnnnnnnnnnnnnnnnnnnnnnnnnnnnnnnnnnnnnnnnnnnnnnnnnnnnnnnnnnnnnnnnnnnnnnnnnnnnnnnnnnnnnnnnnnnnnnnnnnnnnnnnnnnnnnnnnnnnnnnnnnnnnnnnnnnnnnnnnnnnnnnnnnnnnnnnnnnnnnnnnnnnnnnnnnnnnnnnnnnnnnnnnnnnnnnnnnnnnnnnnnnnnnnnnnnnnnnnnnnnnnnnnnnnnnnnnnnnnnnnnnnnnnnnnnnnnnnnnnnnnnnnnnnnnnnnnnnnnnnnnnnnnnnnnnnnnnnnnnnnnnnnnnnnnnnnnnnnnnnnnnnnnnnnnnnnnnnnnnnnnnnnnnnnnnnnnnnnnnnnnnnnnnnnnnnnnnnnnnnnnnnnnnnnnnnnnnnnnnnnnnnnnnnnnnnnnnnnnnnnnnnnnnnnnnnnnnnnnnnnnnnnnnnnnnnnnnnnnnnnnnnnnnnnnnnnnnnnnnnnnnnnnnnnnnnnnnnnnnnnnnnnnnnnnnnnnnnnnnnnnnnnnnnnnnnnnnnnnnnnnnnnnnnnnnnnnnnnnnnnnnnnnnnnnnnnnnnnnnnnnnnnnnnnnnnnnnnnnnnnnnnnnnnnnnnnnnnnnnnnnnnnnnnnnnnnnnnnnnnnnnnnnnnnnnnnnnnnnnnnnnnnnnnnnnnnnnnnnnnnnnnnnnnnnnnnnnnnnnnnnnnnnnnnnnnnnnnnnnnnnnnnnnnnnnnnnnnnnnnnnnnnnnnnnnnnnnnnnnnnnnnnnnnnnnnnnnnnnnnnnnnnnnnnnnnnnnnnnnnnnnnnnnnnnnnnnnnnnnnnnnnnnnnnnnnnnnnnnnnnnnnnnnnnnnnnnnnnnnnnnnnnnnnnnnnnnnnnnnnnnnnnnnnnnnnnnnnnnnnnnnnnnnnnnnnnnnnnnnnnnnnnnnnnnnnnnnnnnnnnnnnnnnnnnnnnnnnnnnnnnnnnnnnnnnnnnnnnnnnnnnnnnnnnnnnnnnnnnnnnnnnnnnnnnnnnnnnnnnnnnnnnnnnnnnnnnnnnnnnnnnnnnnnnnnnnnnnnnnnnnnnnnnnnnnnnnnnnnnnnnnnnnnnnnnnnnnnnnnnnnnnnnnnnnnnnnnnnnnnnnnnnnnnnnnnnnnnnnnnnnnnnnnnnnnnnnnnnnnnnnnnnnnnnnnnnnnnnnnnnnnnnnnnnnnnnnnnnnnnnnnnnnnnnnnnnnnnnnnnnnnnnnnnnnnnnnnnnnnnnnnnnnnnnnnnnnnnnnnnnnnnnnnnnnnnnnnnnnnnnnnnnnnnnnnnnnnnnnnnnnnnnnnnnnnnnnnnnnnnnnnnnnnnnnnnnnnnnnnnnnnnnnnnnnnnnnnnnnnnnnnnnnnnnnnnnnnnnnnnnnnnnnnnnnnnnnnnnnnnnnnnnnnnnnnnnnnnnnnnnnnnnnnnnnnnnnnnnnnnnnnnnnnnnnnnnnnnnnnnnnnnnnnnnnnnnnnnnnnnnnnnnnnnnnnnnnnnnnnnnnnnnnnnnnnnnnnnnnnnnnnnnnnnnnnnnnnnnnnnnnnnnnnnnnnnnnnnnnnnnnnnnnnnnnnnnnnnnnnnnnnnnnnnnnnnnnnnnnnnnnnnnnnnnnnnnnnnnnnnnnnnnnnnnnnnnnnnnnnnnnnnnnnnnnnnnnnnnnnnnnnnnnnnnnnnnnnnnnnnnnnnnnnnnnnnnnnnnnnnnnnnnnnnnnnnnnnnnnnnnnnnnnnnnnnnnnnnnnnnnnnnnnnnnnnnnnnnnnnnnnnnnnnnnnnnnnnnnnnnnnnnnnnnnnnnnnnnnnnnnnnnnnnnnnnnnnnnnnnnnnnnnnnnnnnnnnnnnnnnnnnnnnnnnnnnnnnnnnnnnnnnnnnnnnnnnnnnnnnnnnnnnnnnnnnnnnnnnnnnnnnnnnnnnnnnnnnnnnnnnnnnnnnnnnnnnnnnnnnnnnnnnnnnnnnnnnnnnnnnnnnnnnnnnnnnnnnnnnnnnnnnnnnnnnnnnnnnnnnnnnnnnnnnnnnnnnnnnnnnnnnnnnnnnnnnnnnnnnnnnnnnnnnnnnnnnnnnnnnnnnnnnnnnnnnnnnnnnnnnnnnnnnnnnnnnnnnnnnnnnnnnnnnnnnnnnnnnnnnnnnnnnnnnnnnnnnnnnnnnnnnnnnnnnnnnnnnnnnnnnnnnnnnnnnnnnnnnnnnnnnnnnnnnnnnnnnnnnnnnnnnnnnnnnnnnnnnnnnnnnnnnnnnnnnnnnnnnnnnnnnnnnnnnnnnnnnnnnnnnnnnnnnnnnnnnnnnnnnnnnnnnnnnnnnnnnnnnnnnnnnnnnnnnnnnnnnnnnnnnnnnnnnnnnnnnnnnnnnnnnnnnnnnnnnnnnnnnnnnnnnnnnnnnnnnnnnnnnnnnnnnnnnnnnnnnnnnnnnnnnnnnnnnnnnnnnnnnnnnnnnnnnnnnnnnnnnnnnnnnnnnnnnnnnnnnnnnnnnnnnnnnnnnnnnnnnnnnnnnnnnnnnnnnnnnnnnnnnnnnnnnnnnnnnnnnnnnnnnnnnnnnnnnnnnnnnnnnnnnnnnnnnnnnnnnnnnnnnnnnnnnnnnnnnnnnnnnnnnnnnnnnnnnnnnnnnnnnnnnnnnnnnnnnnnnnnnnnnnnnnnnnnnnnnnnnnnnnnnnnnnnnnnnnnnnnnnnnnnnnnnnnnnnnnnnnnnnnnnnnnnnnnnnnnnnnnnnnnnnnnnnnnnnnnnnnnnnnnnnnnnnnnnnnnnnnnnnnnnnnnnnnnnnnnnnnnnnnnnnnnnnnnnnnnnnnnnnnnnnnnnnnnnnnnnnnnnnnnnnnnnnnnnnnnnnnnnnnnnnnnnnnnnnnnnnnnnnnnnnnnnnnnnnnnnnnnnnnnnnnnnnnnnnnnnnnnnnnnnnnnnnnnnnnnnnnnnnnnnnnnnnnnnnnnnnnnnnnnnnnnnnnnnnnnnnnnnnnnnnnnnnnnnnnnnnnnnnnnnnnnnnnnnnnnnnnnnnnnnnnnnnnnnnnnnnnnnnnnnnnnnnnnnnnnnnnnnnnnnnnnnnnnnnnnnnnnnnnnnnnnnnnnnnnnnnnnnnnnnnnnnnnnnnnnnnnnnnnnnnnnnnnnnnnnnnnnnnnnnnnnnnnnnnnnnnnnnnnnnnnnnnnnnnnnnnnnnnnnnnnnnnnnnnnnnnnnnnnnnnnnnnnnnnnnnnnnnnnnnnnnnnnnnnnnnnnnnnnnnnnnnnnnnnnnnnnnnnnnnnnnnnnnnnnnnnnnnnnnnnnnnnnnnnnnnnnnnnnnnnnnnnnnnnnnnnnnnnnnnnnnnnnnnnnnnnnnnnnnnnnnnnnnnnnnnnnnnnnnnnnnnnnnnnnnnnnnnnnnnnnnnnnnnnnnnnnnnnnnnnnnnnnnnnnnnnnnnnnnnnnnnnnnnnnnnnnnnnnnnnnnnnnnnnnnnnnnnnnnnnnnnnnnnnnnnnnnnnnnnnnnnnnnnnnnnnnnnnnnnnnnnnnnnnnnnnnnnnnnnnnnnnnnnnnnnnnnnnnnnnnnnnnnnnnnnnnnnnnnnnnnnnnnnnnnnnnnnnnnnnnnnnnnnnnnnnnnnnnnnnnnnnnnnnnnnnnnnnnnnnnnnnnnnnnnnnnnnnnnnnnnnnnnnnnnnnnnnnnnnnnnnnnnnnnnnnnnnnnnnnnnnnnnnnnnnnnnnnnnnnnnnnnnnnnnnnnnnnnnnnnnnnnnnnnnnnnnnnnnnnnnnnnnnnnnnnnnnnnnnnnnnnnnnnnnnnnnnnnnnnnnnnnnnnnnnnnnnnnnnnnnnnnnnnnnnnnnnnnnnnnnnnnnnnnnnnnnnnnnnnnnnnnnnnnnnnnnnnnnnnnnnnnnnnnnnnnnnnnnnnnnnnnnnnnnnnnnnnnnnnnnnnnnnnnnnnnnnnnnnnnnnnnnnnnnnnnnnnnnnnnnnnnnnnnnnnnnnnnnnnnnnnnnnnnnnnnnnnnnnnnnnnnnnnnnnnnnnnnnnnnnnnnnnnnnnnnnnnnnnnnnnnnnnnnnnnnnnnnnnnnnnnnnnnnnnnnnnnnnnnnnnnnnnnnnnnnnnnnnnnnnnnnnnnnnnnnnnnnnnnnnnnnnnnnnnnnnnnnnnnnnnnnnnnnnnnnnnnnnnnnnnnnnnnnnnnnnnnnnnnnnnnnnnnnnnnnnnnnnnnnnnnnnnnnnnnnnnnnnnnnnnnnnnnnnnnnnnnnnnnnnnnnnnnnnnnnnnnnnnnnnnnnnnnnnnnnnnnnnnnnnnnnnnnnnnnnnnnnnnnnnnnnnnnnnnnnnnnnnnnnnnnnnnnnnnnnnnnnnnnnnnnnnnnnnnnnnnnnnnnnnnnnnnnnnnnnnnnnnnnnnnnnnnnnnnnnnnnnnnnnnnnnnnnnnnnnnnnnnnnnnnnnnnnnnnnnnnnnnnnnnnnnnnnnnnnnnnnnnnnnnnnnnnnnnnnnnnnnnnnnnnnnnnnnnnnnnnnnnnnnnnnnnnnnnnnnnnnnnnnnnnnnnnnnnnnnnnnnnnnnnnnnnnnnnnnnnnnnnnnnnnnnnnnnnnnnnnnnnnnnnnnnnnnnnnnnnnnnnnnnnnnnnnnnnnnnnnnnnnnnnnnnnnnnnnnnnnnnnnnnnnnnnnnnnnnnnnnnnnnnnnnnnnnnnnnnnnnnnnnnnnnnnnnnnnnnnnnnnnnnnnnnnnnnnnnnnnnnnnnnnnnnnnnnnnnnnnnnnnnnnnnnnnnnnnnnnnnnnnnnnnnnnnnnnnnnnnnnnnnnnnnnnnnnnnnnnnnnnnnnnnnnnnnnnnnnnnnnnnnnnnnnnnnnnnnnnnnnnnnnnnnnnnnnnnnnnnnnnnnnnnnnnnnnnnnnnnnnnnnnnnnnnnnnnnnnnnnnnnnnnnnnnnnnnnnnnnnnnnnnnnnnnnnnnnnnnnnnnnnnnnnnnnnnnnnnnnnnnnnnnnnnnnnnnnnnnnnnnnnnnnnnnnnnnnnnnnnnnnnnnnnnnnnnnnnnnnnnnnnnnnnnnnnnnnnnnnnnnnnnnnnnnnnnnnnnnnnnnnnnnnnnnnnnnnnnnnnnnnnnnnnnnnnnnnnnnnnnnnnnnnnnnnnnnnnnnnnnnnnnnnnnnnnnnnnnnnnnnnnnnnnnnnnnnnnnnnnnnnnnnnnnnnnnnnnnnnnnnnnnnnnnnnnnnnnnnnnnnnnnnnnnnnnnnnnnnnnnnnnnnnnnnnnnnnnnnnnnnnnnnnnnnnnnnnnnnnnnnnnnnnnnnnnnnnnnnnnnnnnnnnnnnnnnnnnnnnnnnnnnnnnnnnnnnnnnnnnnnnnnnnnnnnnnnnnnnnnnnnnnnnnnnnnnnnnnnnnnnnnnnnnnnnnnnnnnnnnnnnnnnnnnnnnnnnnnnnnnnnnnnnnnnnnnnnnnnnnnnnnnnnnnnnnnnnnnnnnnnnnnnnnnnnnnnnnnnnnnnnnnnnnnnnnnnnnnnnnnnnnnnnnnnnnnnnnnnnnnnnnnnnnnnnnnnnnnnnnnnnnnnnnnnnnnnnnnnnnnnnnnnnnnnnnnnnnnnnnnnnnnnnnnnnnnnnnnnnnnnnnnnnnnnnnnnnnnnnnnnnnnnnnnnnnnnnnnnnnnnnnnnnnnnnnnnnnnnnnnnnnnnnnnnnnnnnnnnnnnnnnnnnnnnnnnnnnnnnnnnnnnnnnnnnnnnnnnnnnnnnnnnnnnnnnnnnnnnnnnnnnnnnnnnnnnnnnnnnnnnnnnnnnnnnnnnnnnnnnnnnnnnnnnnnnnnnnnnnnnnnnnnnnnnnnnnnnnnnnnnnnnnnnnnnnnnnnnnnnnnnnnnnnnnnnnnnnnnnnnnnnnnnnnnnnnnnnnnnnnnnnnnnnnnnnnnnnnnnnnnnnnnnnnnnnnnnnnnnnnnnnnnnnnnnnnnnnnnnnnnnnnnnnnnnnnnnnnnnnnnnnnnnnnnnnnnnnnnnnnnnnnnnnnnnnnnnnnnnnnnnnnnnnnnnnnnnnnnnnnnnnnnnnnnnnnnnnnnnnnnnnnnnnnnnnnnnnnnnnnnnnnnnnnnnnnnnnnnnnnnnnnnnnnnnnnnnnnnnnnnnnnnnnnnnnnnnnnnnnnnnnnnnnnnnnnnnnnnnnnnnnnnnnnnnnnnnnnnnnnnnnnnnnnnnnnnnnnnnnnnnnnnnnnnnnnnnnnnnnnnnnnnnnnnnnnnnnnnnnnnnnnnnnnnnnnnnnnnnnnnnnnnnnnnnnnnnnnnnnnnnnnnnnnnnnnnnnnnnnnnnnnnnnnnnnnnnnnnnnnnnnnnnnnnnnnnnnnnnnnnnnnnnnnnnnnnnnnnnnnnnnnnnnnnnnnnnnnnnnnnnnnnnnnnnnnnnnnnnnnnnnnnnnnnnnnnnnnnnnnnnnnnnnnnnnnnnnnnnnnnnnnnnnnnnnnnnnnnnnnnnnnnnnnnnnnnnnnnnnnnnnnnnnnnnnnnnnnnnnnnnnnnnnnnnnnnnnnnnnnnnnnnnnnnnnnnnnnnnnnnnnnnnnnnnnnnnnnnnnnnnnnnnnnnnnnnnnnnnnnnnnnnnnnnnnnnnnnnnnnnnnnnnnnnnnnnnnnnnnnnnnnnnnnnnnnnnnnnnnnnnnnnnnnnnnnnnnnnnnnnnnnnnnnnnnnnnnnnnnnnnnnnnnnnnnnnnnnnnnnnnnnnnnnnnnnnnnnnnnnnnnnnnnnnnnnnnnnnnnnnnnnnnnnnnnnnnnnnnnnnnnnnnnnnnnnnnnnnnnnnnnnnnnnnnnnnnnnnnnnnnnnnnnnnnnnnnnnnnnnnnnnnnnnnnnnnnnnnnnnnnnnnnnnnnnnnnnnnnnnnnnnnnnnnnnnnnnnnnnnnnnnnnnnnnnnnnnnnnnnnnnnnnnnnnnnnnnnnnnnnnnnnnnnnnnnnnnnnnnnnnnnnnnnnnnnnnnnnnnnnnnnnnnnnnnnnnnnnnnnnnnnnnnnnnnnnnnnnnnnnnnnnnnnnnnnnnnnnnnnnnnnnnnnnnnnnnnnnnnnnnnnnnnnnnnnnnnnnnnnnnnnnnnnnnnnnnnnnnnnnnnnnnnnnnnnnnnnnnnnnnnnnnnnnnnnnnnnnnnnnnnnnnnnnnnnnnnnnnnnnnnnnnnnnnnnnnnnnnnnnnnnnnnnnnnnnnnnnnnnnnnnnnnnnnnnnnnnnnnnnnnnnnnnnnnnnnnnnnnnnnnnnnnnnnnnnnnnnnnnnnnnnnnnnnnnnnnnnnnnnnnnnnnnnnnnnnnnnnnnnnnnnnnnnnnnnnnnnnnnnnnnnnnnnnnnnnnnnnnnnnnnnnnnnnnnnnnnnnnnnnnnnnnnnnnnnnnnnnnnnnnnnnnnnnnnnnnnnnnnnnnnnnnnnnnnnnnnnnnnnnnnnnnnnnnnnnnnnnnnnnnnnnnnnnnnnnnnnnnnnnnnnnnnnnnnnnnnnnnnnnnnnnnnnnnnnnnnnnnnnnnnnnnnnnnnnnnnnnnnnnnnnnnnnnnnnnnnnnnnnnnnnnnnnnnnnnnnnnnnnnnnnnnnnnnnnnnnnnnnnnnnnnnnnnnnnnnnnnnnnnnnnnnnnnnnnnnnnnnnnnnnnnnnnnnnnnnnnnnnnnnnnnnnnnnnnnnnnnnnnnnnnnnnnnnnnnnnnnnnnnnnnnnnnnnnnnnnnnnnnnnnnnnnnnnnnnnnnnnnnnnnnnnnnnnnnnnnnnnnnnnnnnnnnnnnnnnnnnnnnnnnnnnnnnnnnnnnnnnnnnnnnnnnnnnnnnnnnnnnnnnnnnnnnnnnnnnnnnnnnnnnnnnnnnnnnnnnnnnnnnnnnnnnnnnnnnnnnnnnnnnnnnnnnnnnnnnnnnnnnnnnnnnnnnnnnnnnnnnnnnnnnnnnnnnnnnnnnnnnnnnnnnnnnnnnnnnnnnnnnnnnnnnnnnnnnnnnnnnnnnnnnnnnnnnnnnnnnnnnnnnnnnnnnnnnnnnnnnnnnnnnnnnnnnnnnnnnnnnnnnnnnnnnnnnnnnnnnnnnnnnnnnnnnnnnnnnnnnnnnnnnnnnnnnnnnnnnnnacacaacaggtgtgctgtggcccccctcgatttgtggggcaactgaaactagcgttgccccctgccgtctccggcaaaggctgtggcccccctcgatttgtggggcaactgaaactaatatgctggccgcccagtggtgtcgttagctgtggctccctttaatgtgtggggcaactgaaagatcgatgaagtgcgcggagggcacaagaaggcggtggccccctcgatttgtggggcaaaatatagagagccaagcataatagtttggctctctttttctttggcaataattatgggttcgactttcaagcactgctgtttaataatctcatcaagtcccacagcaatacttgtttgcaaaggaacaaaccaatcttcagatctgatgaacaagagcattttttcaaactgattcagaagcacatagaggagcctgacgcacccttattgctcgaaggggcaacgggtcttgggaaaactctaccctacctaatggcggccgccgcaagcggtaagagaactgctatagtgtttcctacacaccaactaattgatcaggcattaacaagctgggacttagaagcagttctgtctgaatttcctgttgaggtcagggcgtttagaccaagacatttttttgaagacgatctgtcagagtacaggcagcaaaaagaagaggcctacgaggtagatattcttttctgtacgtcaatatcagtcattatagatcagcggcttgctggggcgtataacggcgttacgacacgggaagtaatcatatttgatgaagcggatcagcttcctcaattcgcggcattgtcttctgaaacttcattaaaaagagaagagctaaggaaattaagaataaatgaagacagtccagccgctacaacgaaggcaatactttctaaaaagggcattgcacccgaattaacggcaaaagcacgtatcattgaggaagcgctgtcaaagactgacgtttggtatcacaaagttggtttctccgatgatggttctttgggtttaagcttgcgcttacctggtaggttactgaagaagatatccaaccgaccatccacgatttttataagcgctacactgtccatcaacagctcatttaaagacttcaaaagatctatgggtattgatgcccagagtaggttttctgatattgttgagccaaaaaaacacggtcaattgaattttgaattttcgacgaagtttgagcattcgaccgatgactggctcgaaaatatttgccatgaaattgaaaacgctgagctacccgcattagtggtaacgccatcacacagtttggctgagaagattggcgaaaatctgtcggatgtgacagtaagaagcagagaagaaacaacgtctgaagctgctgctcgaatgggcaatacaaaagcgctcattgctgccggtgcttgggcgggtctggatacacctattgagtggaaaacaatcgttattcccaaagtgccctacactggccccaaaaaccttcgcgatgtctgggatgagaacgaagaagattttttaagccaagctccagacaatctgtcttcctatatcgattctgcaaatgcagcagctcggcgcctcaaacaagtttttggtcgtggattacggaagccagatgcagaatgctgcgtggttatatgtgatattaggattgatagatttccaaaagttgttcctgaaagatttgaaaaggaattttttgaaggaagagccgtctcgagaaatagaacaatatcggagcgctcgccaaaggtacgaaaagcagcattggcccattatggcgcggtctgcatgacctgtggatacgagccaattgttttgcggcagttagaggtgcatcatcttaagccgttggctgatactgggccgacgtacacaagcttagaagatgttgtagtgatctgcagtaactgccaccgtctggcccataatgaaactccaccattatccttggacgaaattaaaaaaagggttcgcaagagccaacgcccttcgatctcatttgaatgaatgggaagcaacttcgtagcaaatgagtataggtaaattcatagcctagattatgggcgcgcgttttgtgcgctggagggaaagtttgccaccgccttgtgtgaagaaaggtccacaagttccctatcctccacaaagcgtttaagtaattgttattaattgtatttaatgtggagctttaattttctgtggaggattggaaggtgtggaacttaatcagagggtagcggaacatatctctctacggcttcgtttatggctttgaaagtgtagaaattgttctgtcggcctttggcggggtgaacatcatactcctttaatttcctcgccaaccacttcgaagaaatcggcttgccgtactttagtgtgttccattcggcgccaggcaaatcccaaagttggtttaacaattctgcggatgggatgtccgagctagggcggttcttgataattttggatatgtcttgcagcaactcaacgcccttagatatgttgtcatcagtctctcgttcgatttccattttgttgtaggcttttcggcatctgaacagccatgtttcgctggcagcttgtgccaatctaaaaagagcagtccagttgtcctgtgccctatcagaagctccggaaggtgcctcaatagtgagcgcagcaacccgctcagcattatcctcagcccaacgcaaagcgcggcgtctgatgccaacatttttttcgtacaggtcaaagggcagctttgtgacgatttcgtggggtaacttgcgccgcaacccaacctttatagaccggctaagaagtgtatctgcctgacctcctatgcccgcaattacctgtgagccccacaatgagaattctcttggctcaaaacccccatctttggttttctcaactaagatttttgttgcggtacgccgtgtatgaccagcgtttataatcccattgagttcttcgttttcacggagaaacctgtcggcctcatcaatcagtattgtgggctgataggcctcaataatgcggtacagagctgatggcgtaatactgccggtgacctttgcattcttcacaaaagcttcaacagcgttcagaagggaagtcttgccgcactctctctccggtgaatagatgtacagcttgggccagagttgccacacatccatcaaatacgtgccaagagaccataacgcgattgcgtctggttcaaactccgaggcaaaaataatatggcggtctaaagcagccgatatgtcatcaagcagttctcccccatcaacaggagattcagccggttttaaattttcaatgattagattactcactgtccttagccctccgttccgcgcgatattgtgctctctctgaatgctcttgcctggcgattgggattgctgcttttaccagagcttcgtggagattgctccagccatcagagggcgcaaactgacgtgaaactttcaaaatggttttgtcgtccatttctgctcgagcataatgccggaccatatccaacgtagaagtcacccaattaaaatttggaggttgtttgcgaaggccttttctcaacttgtatccctccacgatcagctctcccgataaaaacgaggctgtttatcgaaccattcgttaagttcctgagcagaccaaaagcgccgccttttgatataggtaggcttgggaaaattgagattcttgtcgtggagaaaacgccagagcgacatatcgctgatgcccccaagcatttctctgacctgctttgatgtgattttttgctcgagtgtcattttgtgattcctgcatggttaattcatgaggaaccaagtgccacagaaacttagatctgcataaagggcataattaattttttaccttaattttgacagtgcgctttcgcatgcacgtctgctatcagctttaataccaagattcttgaaaacttctgctgtaattcgttgaaatggcgagtgctgagcattcgtgcccgttccaggcaaagttccattgtgatgaaggtgataaagagcaatagattttgcaacgtcatgcgcacgataatctggtcgcctacctcgcttcttctgaagtgctggtcttcggtgagtttcgtaaaattcaatttgcttagtaagcgttctacgtaagtccgtcatgatagaacttatctctcgaacggaagtgatcggcgcatttcttcgaccgcctaagagtgattttccggtatttaacaattgcatttccaacgatatgaccttttgtaactcgggatctaagctctcaagtttttttaaaaccttctttgttgcactctttaaatcaataatttgatccattgcctgcaatggctgataatataaaaaccttggctgtggtacgaaccagcgaattattgaatgtaacaacggatccttttccttgctcttctggattgtgttccttccaaacctgggcttctttacgtaatctcttagaatttctgatattttattggccttaactgtatttgcatttagccctttccactttccagctttactcataccttaatcacctctttaaaactctaaagcgtctgcccacttttcaagtgcttcccgcttttctttctcgtactcataacgattgtatatccctgcaacgccggcgaacttcccactgaccctgttctgcacgcgctcaatcacttcctggaaaacaccacacctggccatacctgacgctgctgtgcgccgcaggtcatgcggtttccattcctcgaaactagaggagtaggtctcgtcacttatttccgccattttctttttcaggcgcgatgcggctctgccaagattgttaacaggatactcgccgctgaccgtaaagacataccccgtattgcgtccagaactggagagaagctgtttcatggcgggcgttatgggaactctatgcctgacgccgttctttgcacgggcaggggggataacccactcgtcgccctcgatctcctcaaaggtcatatctgaggcctcagtgcggcgctgggcagaaagcagtaggaactgaaaatacgtcccgtatggatagcctagagcctcacaggctcgccagaatatctggatctcatcatcgctgagaatgcggtcacgtgatttttcctttgagggcgggttaatcccctcacatggattatgcctcgtcagatctctggatactgcccaggaaaagaatttgcgtagtgacgctagcactcggttggccatgactggcgaacccctgtctacgatgccgtccataagattgatgacatcccgcttactaagatctgacagcttctttccgcgaaaagctggtagtaaatcatgctcatagatacgggttgtctcatacgttccctttgtttgagagacgtgacgctccagaaacgtctggaaggccttctcaaagcgctctggattgcctgattgtcttgcggggtcctcgccatagctcagacgttccatggcctctctggctcttccacgggcctcggttaaagacagcgctgggaaacggcctaaagttagcttcttagttttaccattgatcctgtaacgcaaggcaaatgacttaatacctgaaggctgcacaatgacatacagcccgcttaggccaccgtctggtatctcgcgacgtacatttgacgctttcagtctagttattccaagttgggtgactactttaaccaataacttctccagggtaacactggggtaacaaaaaaagcctgttaaccactgttagatactgtttatatcatactatatcaatagcaaatagcgacctgtttttgggggtataggggtatattttatccaaaaaactgaatgggttaaaaggtatgattactgatttgtaatcagtaggtccgcggttcgagtccgtgtgggggcaccatataaatcaatgacttagtgagtttttaagtaaagctttatggtactggggtaacgcccagggtaacacatagcagtgttagctactgttatcgttgacggaatgcgtcaattactagtggtgtttgttcagggttattaaccctgtttgagctaccactaagctgtctagtttttggcgccaggaagccttgagcgccacttaactggattgatcatggcttctcaaagccctccgcgcgcgcgatctctgtcaaagaggctgtttgcacacactgaaccaagcatgcgtgcatcaaatagcgatttttagctggtcttcttgaaattctatgctgcagttcccatgtctctgttgtgtcaaggacacaaaccccacaacacaaatggcgaaatgccacagacgcctgcgatgctggcggacaaattgcgttgttttacttcaaaaataggagggtctatgactgaccttattaaaagcgcaaagatctttgcgcgatcaagacatgcggggcagttccgtaaaggagatgcccaagaaccatatatcgtacatgtagaggaagttgctgagctggttacagcttggggcggctctgaaagtgccatagcggccgcgtgggtgcatgacactgtagaggactgtccacccactagctttgctgagatcgagctggagtttggctcagaggtagccggtatcgtccgtgaaatgacagacgacaaatctttgccaaaggctgagcgtaaaaaaatgcagatcttgaatgcagctaaaaaatcagaagctgcttgtttgatcaagctggcggataaaagctctaatgtggctgcgattggtacctctccaccggcagactggagtgctgagcggaagcttgaatatgttgcatgggcgcagactgtaatcgctccgttgccctacaagccagagatggcactgaaaagcttcaacaaccactgtgacgccacattgaaggtaattgatggctgaacggcttttgtttgctctaaggtaagctctttgtaaaaaagcttgaatttcagccgggccgcagttatcgtcctctcaggcacttaatcttcaacttgtgcgccttggcatcccgcctaaagcactaaagcggaggagcagcagatggctgacaatcctatttccccagataaagaagccccaagctcccaggcaaaacgccagccgagaacactagcatccgcggaagaacacgaacagttcgtaaaagacttcgggccagagttaatactcacttttacaagtttgtcggggccggtaatcaaacctcataaagattctgatgagggggataattgatgtctgaggcaactttgtcccaatatgatcaagattttgctcatgcgatgcggttaaaactgcgcttgaacagggaacagcggaactcccagacttccgaaatgtcggcgccggacaacgagcaatccgagcagaccgtaggagacagcttgcgcagctcaataatccagagcgcgatgcagcggcatccggaccttacagcacaggaagcccagaagatgctggacgagctgggaggttgaaatgacaaataccctagaagagcagctaagagatgagctagaagccggtgcatcaaatgatgattttgtagttcaacagttg

SEQ ID NO: 66 - DNA, 17153 bp, Artificial Sequence
  Synthetic Oligonucleotide
  misc_feature (1)..(9735): n is a, c, g, or t
  misc_feature (10253)..(10253): n is a, c, g, or t
  misc_feature (10524)..(10524): n is a, c, g, or t
  misc_feature (12189)..(12189): n is a, c, g, or t
  misc_feature (12206)..(12206): n is a, c, g, or t
nnnnnnnnnnnnnnnnnnnnnnnnnnnnnnnnnnnnnnnnnnnnnnnnnnnnnnnnnnnnnnnnnnnnnnnnnnnnnnnnnnnnnnnnnnnnnnnnnnnnnnnnnnnnnnnnnnnnnnnnnnnnnnnnnnnnnnnnnnnnnnnnnnnnnnnnnnnnnnnnnnnnnnnnnnnnnnnnnnnnnnnnnnnnnnnnnnnnnnnnnnnnnnnnnnnnnnnnnnnnnnnnnnnnnnnnnnnnnnnnnnnnnnnnnnnnnnnnnnnnnnnnnnnnnnnnnnnnnnnnnnnnnnnnnnnnnnnnnnnnnnnnnnnnnnnnnnnnnnnnnnnnnnnnnnnnnnnnnnnnnnnnnnnnnnnnnnnnnnnnnnnnnnnnnnnnnnnnnnnnnnnnnnnnnnnnnnnnnnnnnnnnnnnnnnnnnnnnnnnnnnnnnnnnnnnnnnnnnnnnnnnnnnnnnnnnnnnnnnnnnnnnnnnnnnnnnnnnnnnnnnnnnnnnnnnnnnnnnnnnnnnnnnnnnnnnnnnnnnnnnnnnnnnnnnnnnnnnnnnnnnnnnnnnnnnnnnnnnnnnnnnnnnnnnnnnnnnnnnnnnnnnnnnnnnnnnnnnnnnnnnnnnnnnnnnnnnnnnnnnnnnnnnnnnnnnnnnnnnnnnnnnnnnnnnnnnnnnnnnnnnnnnnnnnnnnnnnnnnnnnnnnnnnnnnnnnnnnnnnnnnnnnnnnnnnnnnnnnnnnnnnnnnnnnnnnnnnnnnnnnnnnnnnnnnnnnnnnnnnnnnnnnnnnnnnnnnnnnnnnnnnnnnnnnnnnnnnnnnnnnnnnnnnnnnnnnnnnnnnnnnnnnnnnnnnnnnnnnnnnnnnnnnnnnnnnnnnnnnnnnnnnnnnnnnnnnnnnnnnnnnnnnnnnnnnnnnnnnnnnnnnnnnnnnnnnnnnnnnnnnnnnnnnnnnnnnnnnnnnnnnnnnnnnnnnnnnnnnnnnnnnnnnnnnnnnnnnnnnnnnnnnnnnnnnnnnnnnnnnnnnnnnnnnnnnnnnnnnnnnnnnnnnnnnnnnnnnnnnnnnnnnnnnnnnnnnnnnnnnnnnnnnnnnnnnnnnnnnnnnnnnnnnnnnnnnnnnnnnnnnnnnnnnnnnnnnnnnnnnnnnnnnnnnnnnnnnnnnnnnnnnnnnnnnnnnnnnnnnnnnnnnnnnnnnnnnnnnnnnnnnnnnnnnnnnnnnnnnnnnnnnnnnnnnnnnnnnnnnnnnnnnnnnnnnnnnnnnnnnnnnnnnnnnnnnnnnnnnnnnnnnnnnnnnnnnnnnnnnnnnnnnnnnnnnnnnnnnnnnnnnnnnnnnnnnnnnnnnnnnnnnnnnnnnnnnnnnnnnnnnnnnnnnnnnnnnnnnnnnnnnnnnnnnnnnnnnnnnnnnnnnnnnnnnnnnnnnnnnnnnnnnnnnnnnnnnnnnnnnnnnnnnnnnnnnnnnnnnnnnnnnnnnnnnnnnnnnnnnnnnnnnnnnnnnnnnnnnnnnnnnnnnnnnnnnnnnnnnnnnnnnnnnnnnnnnnnnnnnnnnnnnnnnnnnnnnnnnnnnnnnnnnnnnnnnnnnnnnnnnnnnnnnnnnnnnnnnnnnnnnnnnnnnnnnnnnnnnnnnnnnnnnnnnnnnnnnnnnnnnnnnnnnnnnnnnnnnnnnnnnnnnnnnnnnnnnnnnnnnnnnnnnnnnnnnnnnnnnnnnnnnnnnnnnnnnnnnnnnnnnnnnnnnnnnnnnnnnnnnnnnnnnnnnnnnnnnnnnnnnnnnnnnnnnnnnnnnnnnnnnnnnnnnnnnnnnnnnnnnnnnnnnnnnnnnnnnnnnnnnnnnnnnnnnnnnnnnnnnnnnnnnnnnnnnnnnnnnnnnnnnnnnnnnnnnnnnnnnnnnnnnnnnnnnnnnnnnnnnnnnnnnnnnnnnnnnnnnnnnnnnnnnnnnnnnnnnnnnnnnnnnnnnnnnnnnnnnnnnnnnnnnnnnnnnnnnnnnnnnnnnnnnnnnnnnnnnnnnnnnnnnnnnnnnnnnnnnnnnnnnnnnnnnnnnnnnnnnnnnnnnnnnnnnnnnnnnnnnnnnnnnnnnnnnnnnnnnnnnnnnnnnnnnnnnnnnnnnnnnnnnnnnnnnnnnnnnnnnnnnnnnnnnnnnnnnnnnnnnnnnnnnnnnnnnnnnnnnnnnnnnnnnnnnnnnnnnnnnnnnnnnnnnnnnnnnnnnnnnnnnnnnnnnnnnnnnnnnnnnnnnnnnnnnnnnnnnnnnnnnnnnnnnnnnnnnnnnnnnnnnnnnnnnnnnnnnnnnnnnnnnnnnnnnnnnnnnnnnnnnnnnnnnnnnnnnnnnnnnnnnnnnnnnnnnnnnnnnnnnnnnnnnnnnnnnnnnnnnnnnnnnnnnnnnnnnnnnnnnnnnnnnnnnnnnnnnnnnnnnnnnnnnnnnnnnnnnnnnnnnnnnnnnnnnnnnnnnnnnnnnnnnnnnnnnnnnnnnnnnnnnnnnnnnnnnnnnnnnnnnnnnnnnnnnnnnnnnnnnnnnnnnnnnnnnnnnnnnnnnnnnnnnnnnnnnnnnnnnnnnnnnnnnnnnnnnnnnnnnnnnnnnnnnnnnnnnnnnnnnnnnnnnnnnnnnnnnnnnnnnnnnnnnnnnnnnnnnnnnnnnnnnnnnnnnnnnnnnnnnnnnnnnnnnnnnnnnnnnnnnnnnnnnnnnnnnnnnnnnnnnnnnnnnnnnnnnnnnnnnnnnnnnnnnnnnnnnnnnnnnnnnnnnnnnnnnnnnnnnnnnnnnnnnnnnnnnnnnnnnnnnnnnnnnnnnnnnnnnnnnnnnnnnnnnnnnnnnnnnnnnnnnnnnnnnnnnnnnnnnnnnnnnnnnnnnnnnnnnnnnnnnnnnnnnnnnnnnnnnnnnnnnnnnnnnnnnnnnnnnnnnnnnnnnnnnnnnnnnnnnnnnnnnnnnnnnnnnnnnnnnnnnnnnnnnnnnnnnnnnnnnnnnnnnnnnnnnnnnnnnnnnnnnnnnnnnnnnnnnnnnnnnnnnnnnnnnnnnnnnnnnnnnnnnnnnnnnnnnnnnnnnnnnnnnnnnnnnnnnnnnnnnnnnnnnnnnnnnnnnnnnnnnnnnnnnnnnnnnnnnnnnnnnnnnnnnnnnnnnnnnnnnnnnnnnnnnnnnnnnnnnnnnnnnnnnnnnnnnnnnnnnnnnnnnnnnnnnnnnnnnnnnnnnnnnnnnnnnnnnnnnnnnnnnnnnnnnnnnnnnnnnnnnnnnnnnnnnnnnnnnnnnnnnnnnnnnnnnnnnnnnnnnnnnnnnnnnnnnnnnnnnnnnnnnnnnnnnnnnnnnnnnnnnnnnnnnnnnnnnnnnnnnnnnnnnnnnnnnnnnnnnnnnnnnnnnnnnnnnnnnnnnnnnnnnnnnnnnnnnnnnnnnnnnnnnnnnnnnnnnnnnnnnnnnnnnnnnnnnnnnnnnnnnnnnnnnnnnnnnnnnnnnnnnnnnnnnnnnnnnnnnnnnnnnnnnnnnnnnnnnnnnnnnnnnnnnnnnnnnnnnnnnnnnnnnnnnnnnnnnnnnnnnnnnnnnnnnnnnnnnnnnnnnnnnnnnnnnnnnnnnnnnnnnnnnnnnnnnnnnnnnnnnnnnnnnnnnnnnnnnnnnnnnnnnnnnnnnnnnnnnnnnnnnnnnnnnnnnnnnnnnnnnnnnnnnnnnnnnnnnnnnnnnnnnnnnnnnnnnnnnnnnnnnnnnnnnnnnnnnnnnnnnnnnnnnnnnnnnnnnnnnnnnnnnnnnnnnnnnnnnnnnnnnnnnnnnnnnnnnnnnnnnnnnnnnnnnnnnnnnnnnnnnnnnnnnnnnnnnnnnnnnnnnnnnnnnnnnnnnnnnnnnnnnnnnnnnnnnnnnnnnnnnnnnnnnnnnnnnnnnnnnnnnnnnnnnnnnnnnnnnnnnnnnnnnnnnnnnnnnnnnnnnnnnnnnnnnnnnnnnnnnnnnnnnnnnnnnnnnnnnnnnnnnnnnnnnnnnnnnnnnnnnnnnnnnnnnnnnnnnnnnnnnnnnnnnnnnnnnnnnnnnnnnnnnnnnnnnnnnnnnnnnnnnnnnnnnnnnnnnnnnnnnnnnnnnnnnnnnnnnnnnnnnnnnnnnnnnnnnnnnnnnnnnnnnnnnnnnnnnnnnnnnnnnnnnnnnnnnnnnnnnnnnnnnnnnnnnnnnnnnnnnnnnnnnnnnnnnnnnnnnnnnnnnnnnnnnnnnnnnnnnnnnnnnnnnnnnnnnnnnnnnnnnnnnnnnnnnnnnnnnnnnnnnnnnnnnnnnnnnnnnnnnnnnnnnnnnnnnnnnnnnnnnnnnnnnnnnnnnnnnnnnnnnnnnnnnnnnnnnnnnnnnnnnnnnnnnnnnnnnnnnnnnnnnnnnnnnnnnnnnnnnnnnnnnnnnnnnnnnnnnnnnnnnnnnnnnnnnnnnnnnnnnnnnnnnnnnnnnnnnnnnnnnnnnnnnnnnnnnnnnnnnnnnnnnnnnnnnnnnnnnnnnnnnnnnnnnnnnnnnnnnnnnnnnnnnnnnnnnnnnnnnnnnnnnnnnnnnnnnnnnnnnnnnnnnnnnnnnnnnnnnnnnnnnnnnnnnnnnnnnnnnnnnnnnnnnnnnnnnnnnnnnnnnnnnnnnnnnnnnnnnnnnnnnnnnnnnnnnnnnnnnnnnnnnnnnnnnnnnnnnnnnnnnnnnnnnnnnnnnnnnnnnnnnnnnnnnnnnnnnnnnnnnnnnnnnnnnnnnnnnnnnnnnnnnnnnnnnnnnnnnnnnnnnnnnnnnnnnnnnnnnnnnnnnnnnnnnnnnnnnnnnnnnnnnnnnnnnnnnnnnnnnnnnnnnnnnnnnnnnnnnnnnnnnnnnnnnnnnnnnnnnnnnnnnnnnnnnnnnnnnnnnnnnnnnnnnnnnnnnnnnnnnnnnnnnnnnnnnnnnnnnnnnnnnnnnnnnnnnnnnnnnnnnnnnnnnnnnnnnnnnnnnnnnnnnnnnnnnnnnnnnnnnnnnnnnnnnnnnnnnnnnnnnnnnnnnnnnnnnnnnnnnnnnnnnnnnnnnnnnnnnnnnnnnnnnnnnnnnnnnnnnnnnnnnnnnnnnnnnnnnnnnnnnnnnnnnnnnnnnnnnnnnnnnnnnnnnnnnnnnnnnnnnnnnnnnnnnnnnnnnnnnnnnnnnnnnnnnnnnnnnnnnnnnnnnnnnnnnnnnnnnnnnnnnnnnnnnnnnnnnnnnnnnnnnnnnnnnnnnnnnnnnnnnnnnnnnnnnnnnnnnnnnnnnnnnnnnnnnnnnnnnnnnnnnnnnnnnnnnnnnnnnnnnnnnnnnnnnnnnnnnnnnnnnnnnnnnnnnnnnnnnnnnnnnnnnnnnnnnnnnnnnnnnnnnnnnnnnnnnnnnnnnnnnnnnnnnnnnnnnnnnnnnnnnnnnnnnnnnnnnnnnnnnnnnnnnnnnnnnnnnnnnnnnnnnnnnnnnnnnnnnnnnnnnnnnnnnnnnnnnnnnnnnnnnnnnnnnnnnnnnnnnnnnnnnnnnnnnnnnnnnnnnnnnnnnnnnnnnnnnnnnnnnnnnnnnnnnnnnnnnnnnnnnnnnnnnnnnnnnnnnnnnnnnnnnnnnnnnnnnnnnnnnnnnnnnnnnnnnnnnnnnnnnnnnnnnnnnnnnnnnnnnnnnnnnnnnnnnnnnnnnnnnnnnnnnnnnnnnnnnnnnnnnnnnnnnnnnnnnnnnnnnnnnnnnnnnnnnnnnnnnnnnnnnnnnnnnnnnnnnnnnnnnnnnnnnnnnnnnnnnnnnnnnnnnnnnnnnnnnnnnnnnnnnnnnnnnnnnnnnnnnnnnnnnnnnnnnnnnnnnnnnnnnnnnnnnnnnnnnnnnnnnnnnnnnnnnnnnnnnnnnnnnnnnnnnnnnnnnnnnnnnnnnnnnnnnnnnnnnnnnnnnnnnnnnnnnnnnnnnnnnnnnnnnnnnnnnnnnnnnnnnnnnnnnnnnnnnnnnnnnnnnnnnnnnnnnnnnnnnnnnnnnnnnnnnnnnnnnnnnnnnnnnnnnnnnnnnnnnnnnnnnnnnnnnnnnnnnnnnnnnnnnnnnnnnnnnnnnnnnnnnnnnnnnnnnnnnnnnnnnnnnnnnnnnnnnnnnnnnnnnnnnnnnnnnnnnnnnnnnnnnnnnnnnnnnnnnnnnnnnnnnnnnnnnnnnnnnnnnnnnnnnnnnnnnnnnnnnnnnnnnnnnnnnnnnnnnnnnnnnnnnnnnnnnnnnnnnnnnnnnnnnnnnnnnnnnnnnnnnnnnnnnnnnnnnnnnnnnnnnnnnnnnnnnnnnnnnnnnnnnnnnnnnnnnnnnnnnnnnnnnnnnnnnnnnnnnnnnnnnnnnnnnnnnnnnnnnnnnnnnnnnnnnnnnnnnnnnnnnnnnnnnnnnnnnnnnnnnnnnnnnnnnnnnnnnnnnnnnnnnnnnnnnnnnnnnnnnnnnnnnnnnnnnnnnnnnnnnnnnnnnnnnnnnnnnnnnnnnnnnnnnnnnnnnnnnnnnnnnnnnnnnnnnnnnnnnnnnnnnnnnnnnnnnnnnnnnnnnnnnnnnnnnnnnnnnnnnnnnnnnnnnnnnnnnnnnnnnnnnnnnnnnnnnnnnnnnnnnnnnnnnnnnnnnnnnnnnnnnnnnnnnnnnnnnnnnnnnnnnnnnnnnnnnnnnnnnnnnnnnnnnnnnnnnnnnnnnnnnnnnnnnnnnnnnnnnnnnnnnnnnnnnnnnnnnnnnnnnnnnnnnnnnnnnnnnnnnnnnnnnnnnnnnnnnnnnnnnnnnnnnnnnnnnnnnnnnnnnnnnnnnnnnnnnnnnnnnnnnnnnnnnnnnnnnnnnnnnnnnnnnnnnnnnnnnnnnnnnnnnnnnnnnnnnnnnnnnnnnnnnnnnnnnnnnnnnnnnnnnnnnnnnnnnnnnnnnnnnnnnnnnnnnnnnnnnnnnnnnnnnnnnnnnnnnnnnnnnnnnnnnnnnnnnnnnnnnnnnnnnnnnnnnnnnnnnnnnnnnnnnnnnnnnnnnnnnnnnnnnnnnnnnnnnnnnnnnnnnnnnnnnnnnnnnnnnnnnnnnnnnnnnnnnnnnnnnnnnnnnnnnnnnnnnnnnnnnnnnnnnnnnnnnnnnnnnnnnnnnnnnnnnnnnnnnnnnnnnnnnnnnnnnnnnnnnnnnnnnnnnnnnnnnnnnnnnnnnnnnnnnnnnnnnnnnnnnnnnnnnnnnnnnnnnnnnnnnnnnnnnnnnnnnnnnnnnnnnnnnnnnnnnnnnnnnnnnnnnnnnnnnnnnnnnnnnnnnnnnnnnnnnnnnnnnnnnnnnnnnnnnnnnnnnnnnnnnnnnnnnnnnnnnnnnnnnnnnnnnnnnnnnnnnnnnnnnnnnnnnnnnnnnnnnnnnnnnnnnnnnnnnnnnnnnnnnnnnnnnnnnnnnnnnnnnnnnnnnnnnnnnnnnnnnnnnnnnnnnnnnnnnnnnnnnnnnnnnnnnnnnnnnnnnnnnnnnnnnnnnnnnnnnnnnnnnnnnnnnnnnnnnnnnnnnnnnnnnnnnnnnnnnnnnnnnnnnnnnnnnnnnnnnnnnnnnnnnnnnnnnnnnnnnnnnnnnnnnnnnnnnnnnnnnnnnnnnnnnnnnnnnnnnnnnnnnnnnnnnnnnnnnnnnnnnnnnnnnnnnnnnnnnnnnnnnnnnnnnnnnnnnnnnnnnnnnnnnnnnnnnnnnnnnnnnnnnnnnnnnnnnnnnnnnnnnnnnnnnnnnnnnnnnnnnnnnnnnnnnnnnnnnnnnnnnnnnnnnnnnnnnnnnnnnnnnnnnnnnnnnnnnnnnnnnnnnnnnnnnnnnnnnnnnnnnnnnnnnnnnnnnnnnnnnnnnnnnnnnnnnnnnnnnnnnnnnnnnnnnnnnnnnnnnnnnnnnnnnnnnnnnnnnnnnnnnnnnnnnnnnnnnnnnnnnnnnnnnnnnnnnnnnnnnnnnnnnnnnnnnnnnnnnnnnnnnnnnnnnnnnnnnnnnnnnnnnnnnnnnnnnnnnnnnnnnnnnnnnnnnnnnnnnnnnnnnnnnnnnnnnnnnnnnnnnnnnnnnnnnnnnnnnnnnnnnnnnnnnnnnnnnnnnnnnnnnnnnnnnnnnnnnnnnnnnnnnnnnnnnnnnnnnnnnnnnnnnnnnnnnnnnnnnnnnnnnnnnnnnnnnnnnnnnnnnnnnnnnnnnnnnnnnnnnnnnnnnnnnnnnnnnnnnnnnnnnnnnnnnnnnnnnnnnnnnnnnnnnnnnnnnnnnnnnnnnnnnnnnnnnnnnnnnnnnnnnnnnnnnnnnnnnnnnnnnnnnnnnnnnnnnnnnnnnnnnnnnnnnnnnnnnnnnnnnnnnnnnnnnnnnnnnnnnnnnnnnnnnnnnnnnnnnnnnnnnnnnnnnnnnnnnnnnnnnnnnnnnnnnnnnnnnnnnnnnnnnnnnnnnnnnnnnnnnnnnnnnnnnnnnnnnnnnnnnnnnnnnnnnnnnnnnnnnnnnnnnnnnnnnnnnnnnnnnnnnnnnnnnnnnnnnnnnnnnnnnnnnnnnnnnnnnnnnnnnnnnnnnnnnnnnnnnnnnnnnnnnnnnnnnnnnnnnnnnnnnnnnnnnnnnnnnnnnnnnnnnnnnnnnnnnnnnnnnnnnnnnnnnnnnnnnnnnnnnnnnnnnnnnnnnnnnnnnnnnnnnnnnnnnnnnnnnnnnnnnnnnnnnnnnnnnnnnnnnnnnnnnnnnnnnnnnnnnnnnnnnnnnnnnnnnnnnnnnnnnnnnnnnnnnnnnnnnnnnnnnnnnnnnnnnnnnnnnnnnnnnnnnnnnnnnnnnnnnnnnnnnnnnnnnnnnnnnnnnnnnnnnnnnnnnnnnnnnnnnnnnnnnnnnnnnnnnnnnnnnnnnnnnnnnnnnnnnnnnnnnnnnnnnnnnnnnnnnnnnnnnnnnnnnnnnnnnnnnnnnnnnnnnnnnnnnnnnnnnnnnnnnnnnnnnnnnnnnnnnnnnnnnnnnnnnnnnnnnnnnnnnnnnnnnnnnnnnnnnnnnnnnnnnnnnnnnnnnnnnnnnnnnnnnnnnnnnnnnnnnnnnnnnnnnnnnnnnnnnnnnnnnnnnnnnnnnnnnnnnnnnnnnnnnnnnnnnnnnnnnnnnnnnnnnnnnnnnnnnnnnnnnnnnnnnnnnnnnnnnnnnnnnnnnnnnnnnnnnnnnnnnnnnnnnnnnnnnnnnnnnnnnnnnnnnnnnnnnnnnnnnnnnnnnnnnnnnnnnnnnnnnnnnnnnnnnnnnnnnnnnnnnnnnnnnnnnnnnnnnnnnnnnnnnnnnnnnnnnnnnnnnnnnnnnnnnnnnnnnnnnnnnnnnnnnnnnnnnnnnnnnnnnnnnnnnnnnnnnnnnnnnnnnnnnnnnnnnnnnnnnnnnnnnnnnnnnnnnnnnnnnnnnnnnnnnnnnnnnnnnnnnnnnnnnnnnnnnnnnnnnnnnnnnnnnnnnnnnnnnnnnnnnnnnnnnnnnnnnnnnnnnnnnnnnnnnnnnnnnnnnnnnnnnnnnnnnnnnnnnnnnnnnnnnnnnnnnnnnnnnnnnnnnnnnnnnnnnnnnnnnnnnnnnnnnnnnnnnnnnnnnnnnnnnnnnnnnnnnnnnnnnnnnnnnnnnnnnnnnnnnnnnnnnnnnnnnnnnnnnnnnnnnnnnnnnnnnnnnnnnnnnnnnnnnnnnnnnnnnnnnnnnnnnnnnnnnnnnnnnnnnnnnnnnnnnnnnnnnnnnnnnnnnnnnnnnnnnnnnnnnnnnnnnnnnnnnnnnnnnnnnnnnnnnnnnnnnnnnnnnnnnnnnnnnnnnnnnnnnnnnnnnnnnnnnnnnnnnnnnnnnnnnnnnnnnnnnnnnnnnnnnnnnnnnnnnnnnnnnnnnnnnnnnnnnnnnnnnnnnnnnnnnnnnnnnnnnnnnnnnnnnnnnnnnnnnnnnnnnnnnnnnnnnnnnnnnacacaacaggtgtgctgtggcccccctcgatttgtggggcaactgaaactagcgttgccccctgccgtctccggcaaaggctgtggcccccctcgatttgtggggcaactgaaactaatatgctggccgcccagtggtgtcgttagctgtggctccctttaatgtgtggggcaactgaaagatcgatgaagtgcgcggagggcacaagaaggcggtggccccctcgatttgtggggcaaaatatagagagccaagcataatagtttggctctctttttctttggcaataattatgggttcgactttcaagcactgctgtttaataatctcatcaagtcccacagcaatacttgtttgcaaaggaacaaaccaatcttcagatctgatgaacaagagcattttttcaaactgattcagaagcacatagaggagcctgacgcacccttattgctcgaaggggcaacgggtcttgggaaaactctaccctacctaatggcggccgccgcaagcggtaaganaactgctatagtgtttcctacacaccaactaattgatcaggcattaacaagctgggacttagaagcagttctgtctgaatttcctgttgaggtcagggcgtttagaccaagacatttttttgaagacgatctgtcagagtacaggcagcaaaaagaagaggcctacgaggtagatattcttttctgtacgtcaatatcagtcattatagatcagcggcttgctggggcgtataacggcgttacgacacgggaagtaatcatatttgatgangcggatcagcttcctcaattcgcggcattgtcttctgaaacttcattaaaaagagaagagctaaggaaattaagaataaatgaagacagtccagccgctacaacgaaggcaatactttctaaaaagggcattgcacccgaattaacggcaaaagcacgtatcattgaggaagcgctgtcaaagactgacgtttggtatcacaaagttggtttctccgatgatggttctttgggtttaagcttgcgcttacctggtaggttactgaagaagatatccaaccgaccatccacgatttttataagcgctacactgtccatcaacagctcatttaaagacttcaaaagatctatgggtattgatgcccagagtaggttttctgatattgttgagccaaaaaaacacggtcaattgaattttgaattttcgacgaagtttgagcattcgaccgatgactggctcgaaaatatttgccatgaaattgaaaacgctgagctacccgcattagtggtaacgccatcacacagtttggctgagaagattggcgaaaatctgtcggatgtgacagtaagaagcagagaagaaacaacgtctgaagctgctgctcgaatgggcaatacaaaagcgctcattgctgccggtgcttgggcgggtctggatacacctattgagtggaaaacaatcgttattcccaaagtgccctacactggccccaaaaaccttcgcgatgtctgggatgagaacgaagaagattttttaagccaagctccagacaatctgtcttcctatatcgattctgcaaatgcagcagctcggcgcctcaaacaagtttttggtcgtggattacggaagccagatgcagaatgctgcgtggttatatgtgatattaggattgatagatttccaaaagttgttcctgaaagatttgaaaaggaattttttgaaggaagagccgtctcgagaaatagaacaatatcggagcgctcgccaaaggtacgaaaagcagcattggcccattacggcgaggtctgcatgacttgtggatacgagccaattgttttgcggcagttagaggtgcatcatcttaagccgttggctgatactgggccgacgtacacaagcttagaagatgttgtagtgatctgcagtaactgccaccgtctggcccataatgaaactccaccattatccttggacgaaattaaaaaaagggttcgcaagagccaacgcccttcgatctcatttgaatgaatgggaagcaacttcgtagcaaatgagtataggtaaattcatagcctagattatgggcgcgcgttttgtgcgctggagggaaagtttgccaccgccttgtgtgaagaaaggtccacaagttccctatcctccacaaagcgtttaagtaattgttattaattgtatttaatgtggagctttaattttctgtggaggattggaaggtgtggaacttaatcagagggtagcggaacatatctctctacggcttcgtttatggctttgaaagtgtagaaattgttctgtcggcctttggcggggtgaacatcatactcctttaatttcctcgccaaccacttcgaagaaatcggcttgccgtactttagtgtgttccattcggcgccaggcaaatcccaaagttggtttaacaattctgcngatgggatgtccgagcnagggcggttcttgataattttggatatgtcttgcagcaactcaacgcccttagatatgttgtcatcagtctctcgttcgatttccattttgttgtaggcttttcggcatctgaacagccatgtttcgctggcagcttgtgccaatctaaaaagagcagtccagttgtcctgtgccctatcagaagctccggaaggtgcctcaatagtgagcgcagcaacccgctcagcattatcctcagcccaacgcaaagcgcggcgtctgatgccaacatttttttcgtacaggtcaaagggcagctttgtgacgatttcgtggggtaacttgcgccgcaacccaacctttatagaccggctaagaagtgtatctgcctgacctcctatgcccgcaattacctgtgagccccacaatgagaattctcttggctcaaaacccccatctttggttttctcaactaagatttttgttgcggtacgccgtgtatgaccagcgtttataatcccattgagttcttcgttttcacggagaaacctgtcggcctcatcaatcagtattgtgggctgataggcctcaataatgcggtacagagctgatggcgtaatactgccggtgacctttgcattcttcacaaaagcttcaacagcgttcagaagggaagtcttgccgcactctctctccggtgaatagatgtacagcttgggccagagttgccacacatccatcaaatacgtgccaagagaccataacgcgattgcgtctggttcaaactccgaggcaaaaataatatggcggtctaaagcagccgatatgtcatcaagcagttctcccccatcaacaggagattcagccggttttaaattttcaatgattagattactcactgtccttagccctccgttccgcgcgatattgtgctctctctgaatgctcttgcctggcgattgggattgctgcttttaccagagcttcgtggagattgctccagccatcagagggcgcaaactgacgtgaaactttcaaaatggttttgtcgtccatttctgctcgagcataatgccggaccatatccaacgtagaagtcacccaattaaaatttggaggttgtttgcgaaggccttttctcaacttgtatccctccacgatcagctctcccgataaaaacgaggctgtttgtcgaaccattcattaagttcctgagcagaccaaaagcgccgccttttgatataagtaggcttgggaaaattgagattcttgtcgtggagaaaacgccagagcgacatatcgctgatgcccccaagcatttctctgacctgctttgatgtgattttttgctcgagtgtcattttgtgattcctgcatggttaattcatgaggaaccaagtgccacagaaacttagatctgcataaagggcataattaattttttaccttaattttgacagtgcgctttcgcatgcacgtctgctatcagctttaataccaagattcttgaaaacttctgctgtaattcgttgaaatggcgagtgctgagcattcgtgcccgttccaggcaaagttccattgtgatgaaggtgataaagagcaatagattttgcaacgtcatgcgcacgataatctggtcgcctacctcgcttcttctgaagtgctggtcttcggtgagtttcgtaaaattcaatttgcttagtaagcgttctacgtaagtccgtcatgatagaacttatctctcgaacggaagtgatcggcgcatttcttcgaccgcctaagagtgattttccggtatttaacaattgcatttccaacgatatgaccttttgtaactcgggatctaagctctcaagtttttttaaaaccttctttgttgcactctttaaatcaataatttgatccattgcctgcaatggctgataatataaaaaccttggctgtggtacgaaccagcgaattattgaatgtaacaacggatccttttccttgctcttctggattgtgttccttccaaacctgggcttctttacgtaatctcttagaatttctgatattttattggccttaactgtatttgcatttagccctttccactttccagctttactcataccttaatcacctctttaaaactctaaagcgtctgcccacttttcaagtgcttcccgcttttctttctcgtactcataacgattgtatatccctgcaacgccggcgaacttcccactgaccctgttctgcacgcgctcaatcacttcctggaaaacaccacacctggccatacctgacgctgctgtgcgccgcaggtcatgcggtttccattcctcgaaactagaggagtaggtctcgtcacttatttccgccattttctttttcaggcgcgatgcggctctgccaagattgttaacaggatactggccgctgaccgtaaagacataccccgtattgcgtccagaactggagagaagctgtttcatggcgggcgttatgggaactctatgcctgacgccgttctttgcacgggcaggggggataacccactcgtcgccctcgatctcctcaaaggtcatatctgaggcctcagtgcggcgctgggcagaaagcagtaggaactgaaaatacgtcccgtatggatagcctagagcctcacaggctcgccagaatatctggatctcatcatcgctgagaatgcggtcacgtgatttttcctttgagggcgggttaatcccctcacatggattatgcctcgtcagatctctggatactgcccaggaaaagaatttgcgtagtgacgctagcactcggttggccatgactggcgaacccctgtctacgatgccgtccataagattgatgacatcccgcttactaagatctgacagcttctttccgcgaaaagctggtagtaaatcatgctcatagatacgggttgtctcatacgttccctttgtttgagagacgtgacgctccagaaacgtctggaaggccttctcaaagcgctctggattgcctgattgtcttgcggggtcctcgccatagctcagacgttccatggcctctcgggcccttacacgggcatcgattaaagacagcgctgggaaacggcctaaagttagcttcttagttttaccattgatcctgtaacgcaaggcaaatgacttaatacctgaaggttgcacaatgacatacagcccgcttaggccaccgtctggtatctcgcgacgtacatttgacgctttcagtctagttattccaagttgggtgactactttaaccaataacttctccagggtaacactggggtaacaaaaaaagcctgttaaccactgttagatactgtttatatcatactatatcaatagcaaatagcgacctgtttttgggggtataggggtatattttatctaaataactgaataggttaaaacgtatgattactgatttgtaatcagtaggtccgcggttcgagtccgtgtgggggcaccatataaatcaatgacttagtgagtttttaagtaaagctttatggtactggggtaacgcccagggtaacacatagcagtgttagctactgttatcgttgacggaatgcgtcaattactagtggtgtttgttcagggttattaaccctgtttgagctaccactaagctgtctagtttttggcgccaggaagccttgagcgccacttaactggattgatcatggcttctcaaagccctccgcgcgcgcgatctctgtcaaagaggctgtttgcacacactgaaccaagcatgcgtgcatcaaatagcgatttttagctggtcttcttgaaattctatgctgcagttcccatgtctctgttgtgtcaaagacacaaaccccacaacacaaatggcgaaatgccacagacgcctgcaatgctggcggacaaattgcgttgtttaacttcaaaaataggagggtctatgactgatcttattaaaagcgcagagatctttgcgcgatcaagacatgcgggacaattccgtaaaggagatgcccaagaaccatatatcgtacatgtggaggaagttgctgagctggttacagcttggggtggctctgagagcgccatagcagctgcgtggctgcatgacactgtagaagactgtccacccactagctttgctgagatcgagcaggagtttggctcagaggtagcgggtattgtccgcgaaatgacggacgacaaatccttgccaagggctgagcgtaaaaagctacaaatcatgaatgcggccaaaaagtctgaggctgcctgtttgatcaagctggctgacaaaagctctaatgtggctgcgattggcagttctccaccggcagactggagtggtgagcggaagcgtgactatgtggcatgggcgcggactgtagttgctccattgccatataagccagagatggccgtgagggcctttaacagccgctgtgaggccacattgaacattattgacgaagtggctggctaaacgggttttgttcactacaaggcgtgttctttgccaaaaagcttgtttcgaatcgatatagcagttatgttattctcaggtacttaatcttcaacttgtgcgccttggcattccgcctaaagcactaaagcggagggacagcaaatggctgagaatcctatttccccaaataaagaaccccaaagctcgacggtaaaacgcaagcacagatggctagcatccgaggaagagcacgaacagttcaaaagagacttctcgccagagttaatactcacttttacaagtttgtcggggccggtaatcaaacctcataaagattctgatgagggggataattgatgtgaggcaactttgtcccaatatgatcaagattttgctcatgcaatgcggttaaaactgcgcttgaacagggaacagcggaactcccagacttccgaaatgtcggcgccggacaacgagcaatccgagcagaccgt

SEQ ID NO: 67 - DNA, 16931 bp, Artificial Sequence
  Synthetic Oligonucleotide
  misc_feature (1)..(5945): n is a, c, g, or t
nnnnnnnnnnnnnnnnnnnnnnnnnnnnnnnnnnnnnnnnnnnnnnnnnnnnnnnnnnnnnnnnnnnnnnnnnnnnnnnnnnnnnnnnnnnnnnnnnnnnnnnnnnnnnnnnnnnnnnnnnnnnnnnnnnnnnnnnnnnnnnnnnnnnnnnnnnnnnnnnnnnnnnnnnnnnnnnnnnnnnnnnnnnnnnnnnnnnnnnnnnnnnnnnnnnnnnnnnnnnnnnnnnnnnnnnnnnnnnnnnnnnnnnnnnnnnnnnnnnnnnnnnnnnnnnnnnnnnnnnnnnnnnnnnnnnnnnnnnnnnnnnnnnnnnnnnnnnnnnnnnnnnnnnnnnnnnnnnnnnnnnnnnnnnnnnnnnnnnnnnnnnnnnnnnnnnnnnnnnnnnnnnnnnnnnnnnnnnnnnnnnnnnnnnnnnnnnnnnnnnnnnnnnnnnnnnnnnnnnnnnnnnnnnnnnnnnnnnnnnnnnnnnnnnnnnnnnnnnnnnnnnnnnnnnnnnnnnnnnnnnnnnnnnnnnnnnnnnnnnnnnnnnnnnnnnnnnnnnnnnnnnnnnnnnnnnnnnnnnnnnnnnnnnnnnnnnnnnnnnnnnnnnnnnnnnnnnnnnnnnnnnnnnnnnnnnnnnnnnnnnnnnnnnnnnnnnnnnnnnnnnnnnnnnnnnnnnnnnnnnnnnnnnnnnnnnnnnnnnnnnnnnnnnnnnnnnnnnnnnnnnnnnnnnnnnnnnnnnnnnnnnnnnnnnnnnnnnnnnnnnnnnnnnnnnnnnnnnnnnnnnnnnnnnnnnnnnnnnnnnnnnnnnnnnnnnnnnnnnnnnnnnnnnnnnnnnnnnnnnnnnnnnnnnnnnnnnnnnnnnnnnnnnnnnnnnnnnnnnnnnnnnnnnnnnnnnnnnnnnnnnnnnnnnnnnnnnnnnnnnnnnnnnnnnnnnnnnnnnnnnnnnnnnnnnnnnnnnnnnnnnnnnnnnnnnnnnnnnnnnnnnnnnnnnnnnnnnnnnnnnnnnnnnnnnnnnnnnnnnnnnnnnnnnnnnnnnnnnnnnnnnnnnnnnnnnnnnnnnnnnnnnnnnnnnnnnnnnnnnnnnnnnnnnnnnnnnnnnnnnnnnnnnnnnnnnnnnnnnnnnnnnnnnnnnnnnnnnnnnnnnnnnnnnnnnnnnnnnnnnnnnnnnnnnnnnnnnnnnnnnnnnnnnnnnnnnnnnnnnnnnnnnnnnnnnnnnnnnnnnnnnnnnnnnnnnnnnnnnnnnnnnnnnnnnnnnnnnnnnnnnnnnnnnnnnnnnnnnnnnnnnnnnnnnnnnnnnnnnnnnnnnnnnnnnnnnnnnnnnnnnnnnnnnnnnnnnnnnnnnnnnnnnnnnnnnnnnnnnnnnnnnnnnnnnnnnnnnnnnnnnnnnnnnnnnnnnnnnnnnnnnnnnnnnnnnnnnnnnnnnnnnnnnnnnnnnnnnnnnnnnnnnnnnnnnnnnnnnnnnnnnnnnnnnnnnnnnnnnnnnnnnnnnnnnnnnnnnnnnnnnnnnnnnnnnnnnnnnnnnnnnnnnnnnnnnnnnnnnnnnnnnnnnnnnnnnnnnnnnnnnnnnnnnnnnnnnnnnnnnnnnnnnnnnnnnnnnnnnnnnnnnnnnnnnnnnnnnnnnnnnnnnnnnnnnnnnnnnnnnnnnnnnnnnnnnnnnnnnnnnnnnnnnnnnnnnnnnnnnnnnnnnnnnnnnnnnnnnnnnnnnnnnnnnnnnnnnnnnnnnnnnnnnnnnnnnnnnnnnnnnnnnnnnnnnnnnnnnnnnnnnnnnnnnnnnnnnnnnnnnnnnnnnnnnnnnnnnnnnnnnnnnnnnnnnnnnnnnnnnnnnnnnnnnnnnnnnnnnnnnnnnnnnnnnnnnnnnnnnnnnnnnnnnnnnnnnnnnnnnnnnnnnnnnnnnnnnnnnnnnnnnnnnnnnnnnnnnnnnnnnnnnnnnnnnnnnnnnnnnnnnnnnnnnnnnnnnnnnnnnnnnnnnnnnnnnnnnnnnnnnnnnnnnnnnnnnnnnnnnnnnnnnnnnnnnnnnnnnnnnnnnnnnnnnnnnnnnnnnnnnnnnnnnnnnnnnnnnnnnnnnnnnnnnnnnnnnnnnnnnnnnnnnnnnnnnnnnnnnnnnnnnnnnnnnnnnnnnnnnnnnnnnnnnnnnnnnnnnnnnnnnnnnnnnnnnnnnnnnnnnnnnnnnnnnnnnnnnnnnnnnnnnnnnnnnnnnnnnnnnnnnnnnnnnnnnnnnnnnnnnnnnnnnnnnnnnnnnnnnnnnnnnnnnnnnnnnnnnnnnnnnnnnnnnnnnnnnnnnnnnnnnnnnnnnnnnnnnnnnnnnnnnnnnnnnnnnnnnnnnnnnnnnnnnnnnnnnnnnnnnnnnnnnnnnnnnnnnnnnnnnnnnnnnnnnnnnnnnnnnnnnnnnnnnnnnnnnnnnnnnnnnnnnnnnnnnnnnnnnnnnnnnnnnnnnnnnnnnnnnnnnnnnnnnnnnnnnnnnnnnnnnnnnnnnnnnnnnnnnnnnnnnnnnnnnnnnnnnnnnnnnnnnnnnnnnnnnnnnnnnnnnnnnnnnnnnnnnnnnnnnnnnnnnnnnnnnnnnnnnnnnnnnnnnnnnnnnnnnnnnnnnnnnnnnnnnnnnnnnnnnnnnnnnnnnnnnnnnnnnnnnnnnnnnnnnnnnnnnnnnnnnnnnnnnnnnnnnnnnnnnnnnnnnnnnnnnnnnnnnnnnnnnnnnnnnnnnnnnnnnnnnnnnnnnnnnnnnnnnnnnnnnnnnnnnnnnnnnnnnnnnnnnnnnnnnnnnnnnnnnnnnnnnnnnnnnnnnnnnnnnnnnnnnnnnnnnnnnnnnnnnnnnnnnnnnnnnnnnnnnnnnnnnnnnnnnnnnnnnnnnnnnnnnnnnnnnnnnnnnnnnnnnnnnnnnnnnnnnnnnnnnnnnnnnnnnnnnnnnnnnnnnnnnnnnnnnnnnnnnnnnnnnnnnnnnnnnnnnnnnnnnnnnnnnnnnnnnnnnnnnnnnnnnnnnnnnnnnnnnnnnnnnnnnnnnnnnnnnnnnnnnnnnnnnnnnnnnnnnnnnnnnnnnnnnnnnnnnnnnnnnnnnnnnnnnnnnnnnnnnnnnnnnnnnnnnnnnnnnnnnnnnnnnnnnnnnnnnnnnnnnnnnnnnnnnnnnnnnnnnnnnnnnnnnnnnnnnnnnnnnnnnnnnnnnnnnnnnnnnnnnnnnnnnnnnnnnnnnnnnnnnnnnnnnnnnnnnnnnnnnnnnnnnnnnnnnnnnnnnnnnnnnnnnnnnnnnnnnnnnnnnnnnnnnnnnnnnnnnnnnnnnnnnnnnnnnnnnnnnnnnnnnnnnnnnnnnnnnnnnnnnnnnnnnnnnnnnnnnnnnnnnnnnnnnnnnnnnnnnnnnnnnnnnnnnnnnnnnnnnnnnnnnnnnnnnnnnnnnnnnnnnnnnnnnnnnnnnnnnnnnnnnnnnnnnnnnnnnnnnnnnnnnnnnnnnnnnnnnnnnnnnnnnnnnnnnnnnnnnnnnnnnnnnnnnnnnnnnnnnnnnnnnnnnnnnnnnnnnnnnnnnnnnnnnnnnnnnnnnnnnnnnnnnnnnnnnnnnnnnnnnnnnnnnnnnnnnnnnnnnnnnnnnnnnnnnnnnnnnnnnnnnnnnnnnnnnnnnnnnnnnnnnnnnnnnnnnnnnnnnnnnnnnnnnnnnnnnnnnnnnnnnnnnnnnnnnnnnnnnnnnnnnnnnnnnnnnnnnnnnnnnnnnnnnnnnnnnnnnnnnnnnnnnnnnnnnnnnnnnnnnnnnnnnnnnnnnnnnnnnnnnnnnnnnnnnnnnnnnnnnnnnnnnnnnnnnnnnnnnnnnnnnnnnnnnnnnnnnnnnnnnnnnnnnnnnnnnnnnnnnnnnnnnnnnnnnnnnnnnnnnnnnnnnnnnnnnnnnnnnnnnnnnnnnnnnnnnnnnnnnnnnnnnnnnnnnnnnnnnnnnnnnnnnnnnnnnnnnnnnnnnnnnnnnnnnnnnnnnnnnnnnnnnnnnnnnnnnnnnnnnnnnnnnnnnnnnnnnnnnnnnnnnnnnnnnnnnnnnnnnnnnnnnnnnnnnnnnnnnnnnnnnnnnnnnnnnnnnnnnnnnnnnnnnnnnnnnnnnnnnnnnnnnnnnnnnnnnnnnnnnnnnnnnnnnnnnnnnnnnnnnnnnnnnnnnnnnnnnnnnnnnnnnnnnnnnnnnnnnnnnnnnnnnnnnnnnnnnnnnnnnnnnnnnnnnnnnnnnnnnnnnnnnnnnnnnnnnnnnnnnnnnnnnnnnnnnnnnnnnnnnnnnnnnnnnnnnnnnnnnnnnnnnnnnnnnnnnnnnnnnnnnnnnnnnnnnnnnnnnnnnnnnnnnnnnnnnnnnnnnnnnnnnnnnnnnnnnnnnnnnnnnnnnnnnnnnnnnnnnnnnnnnnnnnnnnnnnnnnnnnnnnnnnnnnnnnnnnnnnnnnnnnnnnnnnnnnnnnnnnnnnnnnnnnnnnnnnnnnnnnnnnnnnnnnnnnnnnnnnnnnnnnnnnnnnnnnnnnnnnnnnnnnnnnnnnnnnnnnnnnnnnnnnnnnnnnnnnnnnnnnnnnnnnnnnnnnnnnnnnnnnnnnnnnnnnnnnnnnnnnnnnnnnnnnnnnnnnnnnnnnnnnnnnnnnnnnnnnnnnnnnnnnnnnnnnnnnnnnnnnnnnnnnnnnnnnnnnnnnnnnnnnnnnnnnnnnnnnnnnnnnnnnnnnnnnnnnnnnnnnnnnnnnnnnnnnnnnnnnnnnnnnnnnnnnnnnnnnnnnnnnnnnnnnnnnnnnnnnnnnnnnnnnnnnnnnnnnnnnnnnnnnnnnnnnnnnnnnnnnnnnnnnnnnnnnnnnnnnnnnnnnnnnnnnnnnnnnnnnnnnnnnnnnnnnnnnnnnnnnnnnnnnnnnnnnnnnnnnnnnnnnnnnnnnnnnnnnnnnnnnnnnnnnnnnnnnnnnnnnnnnnnnnnnnnnnnnnnnnnnnnnnnnnnnnnnnnnnnnnnnnnnnnnnnnnnnnnnnnnnnnnnnnnnnnnnnnnnnnnnnnnnnnnnnnnnnnnnnnnnnnnnnnnnnnnnnnnnnnnnnnnnnnnnnnnnnnnnnnnnnnnnnnnnnnnnnnnnnnnnnnnnnnnnnnnnnnnnnnnnnnnnnnnnnnnnnnnnnnnnnnnnnnnnnnnnnnnnnnnnnnnnnnnnnnnnnnnnnnnnnnnnnnnnnnnnnnnnnnnnnnnnnnnnnnnnnnnnnnnnnnnnnnnnnnnnnnnnnnnnnnnnnnnnnnnnnnnnnnnnnnnnnnnnnnnnnnnnnnnnnnnnnnnnnnnnnnnnnnnnnnnnnnnnnnnnnnnnnnnnnnnnnnnnnnnnnnnnnnnnnnnnnnnnnnnnnnnnnnnnnnnnnnnnnnnnnnnnnnnnnnnnnnnnnnnnnnnnnnnnnnnnnnnnnnnnnnnnnnnnnnnnnnnnnnnnnnnnnnnnnnnnnnnnnnnnnnnnnnnnnnnnnnnnnnnnnnnnnnnnnnnnnnnnnnnnnnnnnnnnnnnnnnnnnnnnnnnnnnnnnnnnnnnnnnnnnnnnnnnnnnnnnnnnnnnnnnnnnnnnnnnnnnnnnnnnnnnnnnnnnnnnnnnnnnnnnnnnnnnnnnnnnnnnnnnnnnnnnnnnnnnnnnnnnnnnnnnnnnnnnnnnnnnnnnnnnnnnnnnnnnnnnnnnnnnnnnnnnnnnnnnnnnnnnnnnnnnnnnnnnnnnnnnnnnnnnnnnnnnnnnnnnnnnnnnnnnnnnnnnnnnnnnnnnnnnnnnnnnnnnnnnnnnnnnnnnnnnnnnnnnnnnnnnnnnnnnnnnnnnnnnnnnnnnnnnnnnnnnnnnnnnnnnnnnnnnnnnnnnnnnnnnnnnnnnnnnnnnnnnnnnnnnnnnnnnnnnnnnnnnnnnnnnnnnnnnnnnnnnnnnnnnnnnnnnnnnnnnnnnnnnnnnnnnnnnnnnnnnnnnnnnnnnnnnnnnnnnnnnnnnnnnnnnnnnnnnnnnnnnnnnnnnnnnnnnnnnnnnnnnnnnnnnnnnnnnnnnnnngcgcaaagtgcgcgcggctcttgatcggcttgcgctcgatgccgaagccggcaaggcgctgcaaggcgatctcaaaggactgcgcagcctgcgggtggcacgctttcgcgccatctaccgggcgcccgcgcgccgggtcatcgagatcgtgtcgatcggaccccgggaccgcatctacgaagagaccctgcggctggtatcggcggagcgcaggcgttaaggcatcgcagtcgcggtcggtatgctcgaccgtgctccggaaactatcattcgatctttgccggggacaacgggcgggtactgggttacgacagccaacatggtcgccatcaccggcattacctcgggattgtgaccgagatcacgtttgagagcttcgaggaaatcgaagccctgttcgagggtaagttgcatcaattgctaaaacgaggttccctaaggtagtgccatggcactcgggcacctttcgatgcgcgagacttcgagcagggattttcattaggggaaccgtagactgttccccgccattctcgtaggcaatatggcttggaagccaatacccatgcgggtttcaatcctatttgcgcttctaaaaacactaatatttatgatcctgcaccctcgctccgtgattaaaagaacaacgcccgcgcaaggcgggcgttgggtgaggtgtttcaacttttattgatcgcgcgcatacgagaagacactgcgcgcccgaagccatcagggggattatcaggcttgggtttacttgctacggcgggcggtgaatctgccgttgcgggagtttgcaaagcagagcaaggtatcgccttcacgtatatcgaaaatccagcggacgattgtccaggctacgtaatagattacgttacgctattgaagcgcgaggatgcggatagtccgagtaatatgcattggcagacgacgggggatcagctttttatttgtggaggcgtgatgcaaaagacattttcggtaacggcctatctttcctcgcctttcgtgacgggcggcggatatatgacgcttgacggcttgttagcggcgcggttgttcgaggaattgcaaaatgtcgaagccgcgcacgcggcggtgcctgtcaggtgtaatgcggggcttgcctgtgccagcggtgcgatttacgagccagtatcggtagaccgaatagcgttcgtcgcgcaacttcgggcggggcattccctgaatccagacctgatcaaaaagaataagcgtggagcattgcatagagacgtgaacgacacatcgttatgcaacgtgatgaatgcatacacgctagtcaccgcgcctaccatcacctggtatggggagggcgatggcaatgaggtgatgcgcctgctggctggcgttgaattcatcggcaagcggcgcgcgtccggttttgggcgggtcacgaggtgggaaattgctgacggcgatctggacggcataacgggctacgcgggagaaccattgcgccccgtgccggttgaaatgttttccggtgatgatgccaggccaatagtcgatgcggcgtggcgtttgccgtattggtcgcctgttaatcgcgctgcttgttacgtgccgaccggagcaataaatgcttgaattcttcaatagcaacttcggccgccacttcgccgagcaaacaggcgacgcaatggcggatgccaaggccgcgctatctggcggccatcccatgaagaaaggcggtatgcctcagcgcatttcgtcgggttgggcgatcgtgcgccctggcaagtccgtgatgcagatgaagttcgcggcgaagggggtggattacgcggttgaggacagatacacggcattcctctctgaactacaggcatgggatggaaagccgcgcattttcctcacattcgacaagaagccgatcccggttggcaatgtgtttgtaacgtatgacctgcgggcagttcgtatttgctctcccgccggggttgaaacttttgattttacggttccgccggagaaatccagcggcgtggctcataaggttatctggaaaaagaaagcggggaaaaaatgatagtcgattacgtgttgcccaagccagcaagcgcagggggttattctttgcatcggattgtcgaggggttaactggcggtgcgcgcccgttgttcgcggacatgggcgaccgccttttggtgcgtagcgcagtgccaataaacggtgtggaaaccttgccggtgcgcgaacttgctgcgggagatatggcggcattccagttgcgcgcctcggtcagcaagaaaacgcgcggtaaacgcagttactacccgacggctgattggtcaacccgtcacgactggctgcggcggcaaggcgagcggcatgggttcgaggtgctgaccgttcattgcaccgctgatttctcaaagattgaaaagacgggacagcgatttacagtggacaggacggacttcaccggggttttgaaagtcagggatacagagaaattcagcgcagcactgcgcgacggtattagcggatgcggtaaggcttttggttttggaatgttgttaatttgaatgcaaaggaaataacatgaaaaacagcaacagtatcctcatcaactctaccatcaccaccgtcggcccgttgtccatcaagatgccggtcgcgcaaggcggaatcgagaacaggttcgggaacttcccgctgttcacggtcggcgcaaaggaaatgcagggcaaggacggcgagagctacaccgcgaaggagcacaccggctaccttccctcgacaacggtccggggtttcctgcggcgcgccatcgtaacggatgcaatgacacgcgccgccgaggaaggtaaccactacacactgcaaagggcctacgccgacctgatcggccaagacgcggcatcggagaagtctgagaagattgacctgctggcggctcgcaagctgcgagatgagaacgaggttctcgacctattcgggtgcggcatcagcatgtcatcgcgtttacttgttagccacttcatgcccgcgggcggcgcagcgttgccggagtttgtaagtgtcgtcaggaaagacctcgaggacaccgagggcgtggttgaggctctgacgccctttgatcgcgatgcttactatgcccgcggcgattccaattcacgtcgggcagacgccgctgggttggccgctgacctgaagcggaagttgaaggctgcttccaagaaaggcgaagacgtaaaaggtcttgacgcgcagttgaaggaggccgaggcgttggttgcgaagttcgaggttcagatgggcgacatgcagaacagcagccgtacattggcgggctactacgcgctgcctcccggcaccgtgctgacaggcaagatcatcatcgagcgtccgcgtgaccgtgatttgccgatgattgagttggcgctggatgcgctgagccgccgcccgttgctcggcggtcaggtggctcgcggctgcggtgagattgccggcagcttcgatgtgttgaagggcggcgtattgctgaaaaaaatcaccatcggtggttttgcgcctgccgccgtggtcaattttggcgcggtggataatgagaaaaaatcagcgtaattgcagggatgcttgaagtcgggtcaagccacccgttatttgggtggttactagaaccggttaaaggtcagcttgaaccagcgcaccggtcaagccacccgttatttgggtggttactagaactgatttccctttcagtgctgcgcgggcttgggtcaagccacccgttatttgggtggttactagaacagtcaccagcttccagcgtctaacgggcgcggtcaagccacccgttatttcggtggttactagaacattgataaccgagtgaggccgaaatgacctggtcaagccacccgttatttgggtggttactggaacttgtggatgttctcgccgcatgccgggtagggtcaagccactcgttattcgggtggttactagaaccagatgatgacggggtaaatgtcgatgttcattcaagccatccgctattggagtggttcctaagagggaaaaatgtttcgcagcgcagaacaaaagaacttcgcaaacatcgtcgcggcacatatcgagcgccatgacgggccactgctcatagaaggcggcgtcgggttgggcaagactcgcgcatatttgtcggcagtgatgaacgcggctcgcagtgggaagcgcatcgcgctggcgttgccgactcatgcattgatagaccaattactcgcgtcgagcgaccttgccgctactggggaaggcgtgacggttgcggcattcagaccggcgcggatgtatgaaacgcgcagcgagtatcaagaggcgcgcaaatcggcaatggcagcgcaagtcatgctttgcactgcggcggccatcgtcatcgacaaccgcaacagcggggaatacagcggcgcgaccacacgcgactacctgctattcgacgaggccgatcagttgccatcagcagcggcgatgcaggttgacatggaaataccggcgcatacgtttagcgaatttcacatcaaggttgacacagccgagcaggctgcgcgtgatctgttgacgcgcaagctggctgaacctgaacacaaggcggcggcgaaattggtgctggagattcttggcgaccccgcgtggtatcacagtgcaggcgtgaccgaggacggcggagttgcggctcatcaccagatgccggggcttctgctcaaacgcgttgccaatcggggaaattcggccttcgtttctgccacccttacgctgggcggttcgttcgctgatttcaagcgcgcactgggtattggcaatgagtctacgctgtcatcaaccatcgaacccgcaaagcacggcgatctgcgtttcgtagtcaacgacgcacatgaggtagacacgcccgaatggatgacggcggtgctgggcgccattgccggtgctgcgcgtccggttctggtggtcaccccgtctcacgatctggcgcagaccatcggcgaggcagtgcccggtgctgtggtgcgcgcagatgacgaaaccacggctggcgctgcggcgcgtgttggtgacgatggtgtgctggtagccgctggtgcgtgggctgggttagacacaccgacccaatgggcgtcggtagtggtgccgaaggtgccgtatccgatgccgacgattttggatggtagaacggaaagcacctacctgtccgcgcgaggcgtcgccatccgcaggttgaggcaagtattcgggcgcgggttgcggacgccagattcggtctgcacgatctatttgcttgacccacgggcacgcaagctgtcgggcatagtgccttcacggttcgcgcagcaatggcaagagcgcgtgtatcaagaaggcacgcgtggggaggtggtgctgtcaaaggcagaacgcgatcccgcgctccggaaggctgcgctgcaaaagtttggatgcaaatgcgctgcctgcgggttcatgcctaaagtctcgcaacagatcgaaatacatcatctaaatccggtagcggacggggagcgcaagacaacactggcggacgttgtgccgctttgcgcaaattgtcaccggctcgcgcactcgaccacgccgccgatgccgcttgatgcactgcgtagggcagcggctgacaatactcaaatttaaaactaccccctcgtgcattcaatacaaagtgcaaggcgagcggatgggatccattgcaggtaagtgttttccgtgcgcatgctgtagtgcttcacgcgcagacgatcgcgtacctggtcgagcaagcgtggtgacgacatgacctcctccggtggtgcctataccgaacgaacgtagagtcgtctatcccgattgacgcggttgaggaattagaggcttgagcgtaagctgaccgcgctagaccccgcttttggggtcttataaggcccaactgaagggggcgacttcttgttgggcgggcgcgaaggaagatggtttcagatgaacgaagcgcaacgttttctgcggtatgtgacgccgggcctagtgttccttgcggagactctattcctgcttctgatactgctgccgggctggacgctagagcaagtaaaggcggtcaaagaaggtgaggcactcggagttgtcttcgcgaccttgctcgcgtcaggcggcgtcggattcgtcttcagtctcgtgcatcatgtggtccactgggcgcgacctaggccgggactcgaccattccaaattgatatctcgactgcgaaacgccaatgtcatccaactggtggacgcagagagcggccttgaaatcgcggaggacgcgaaagtcagcccggcgaacgcctggataatcgtcacgagcttgtggcatgagcgcctgacaaaatcggatcacattaaggcggcagaaccgaaagcctcggtacttgtggacatgactcatacaactggcacagcgcgtgtagcatgcgcttttgcatggattaccacattcctgatcgcagggcatgcggcgcaggtctcgtttgagcccgagccagtgtttcgcttcatcggcgcaaacgtccttgccggactcctcttcttcgtacatcactggaactgtaagcgcgtccgctatttggcgcagggtgtaatcgaggaggtgcttcatgatgccttagttgcggagaaggagcagccagtgaaaacaagagtggctctgacgaggagctaatgtctggtcagacaactcgagctaggccgcccaacctggcagtggagcggtcggctttgagccgccgcccacttctacgttagggcgcatggaaaccgtcgagcaagcgcgagagactattctcaaggagctgacctccgatgactcggaggttcgcgaagagtacctcaagatctttgacggagacgctaaagcatttgccgagttcatggctcaggccttcgtcaaatggcgcgacttcgataatgatatcaaggacgacgaaaaacgagcacatatttccgcgctggtttatgttgccatcaccttgcatgttctctcaatgaagttattcctttccggccacaccgttgcagccggcaatctatttcgccaagtgattgagagcatcgccttagctctgctgtgctcaggaaaggactttgacgtattgaagcggttcatggagaataaatattcgagcaacgatgccgtccgcgatgtattgcggcaccacgagaaactttctctgaagggcaacgcgctagaggcgctaaaggagtctcaggagttctaccataagtacagccatgtcacgaaaatgacaattgcggcgggcatgtctttctccaaacaaggtgggctctacgtaggcgcgtccttcgatgacgaaaaattggacgcatacaagaaggaaatacatggtcgggtcggattggctaaggtgtttccaaacttcgtcgcagccgtaactggcaacgtcgcaaagtggtgatgcgccctaaccacgtggtggaaagcgcgcgcggcaagagcggccgcgcgcacttcaccacggacgttaggcattgctagatatggcgtcgctgagagctgaactgcaaaaaattactcacgatggtaatttggcaaaccacgctcgccgaatcgccgaattacgagcgcaagtcccacattcgatcgaaatactaactaaacccggcgataatctccggtataactgcataatgcacgcgctcggagtgccagagaacacagaactgataggactcgtgatgcgttgtcctcgctcaattcatcctaatactcgctttctgaagttcttgaaggaccgcggtatattgtccccaatcgcgcaacttgcagccggccttgtggttacatactcaaacggccgcggtatccggcatgccggacgaacaatctctgaattagtggtggaatcgaagtggggaatcggacatctatatcgacatgctctgatggaggttccgagcagctacggaaacaagctctcatactttgcgccccccgacgttcaggctgtggttggagaattcattgaatttgcgaggtcacaaggtgcgcgcgtgtaatttggcaatgcctaaccgcgtgttcgagattgggcgcgcgataaagctgcgcgccattcaacacggacgttagtggcaacaggaagatcgcaatggactggaatctgatactcgaatacttgaaggttcttctatctgcgcccgtaatgggggctgcggctgtgattactttctacatcatgttcaggacagaaatacgagggtatataacccgcatcgcaatcataaaatttcccggtggggccgaagtctctacttctcaggcacaggttgctgttgaggaggccagggtggtgcaacgcccacttcctcaagtcacagaaccagcagcagcccttccggcaggcctcacaccccaacagaaagaagagatcggccagttacttaaagcagaaaaggcagcgtcatatctctgggagtaccgatacctcaataagtttcttgtgtatcaaactcagcaggtactggattggttggtaggcattcctcagccaataactacacggctctatgacacgcactggcttattcacataccaaaagccgaggagcgtagcgcaatcctctttgcacttcaggcgcaccacctaattcagataacgggtgaaaaacttgaggtaacggaaaagggtcgggagtatcagggttggcgcgggccacttcctgcgttgcccgttcctgcgtcatgagttgccgctaacaattcgttgcaggcgcgacggccctgacgggccgcggcctgagctcaaacgttatgcgcaaatcaacggaacgctagacacgccgttgtagcgcaggcgcctggcctgctccgtacgattggaggcgaggcgcctgcgctacgttttattgaaacgagcgacgttagcggggtattgcaatatcagtttttggaggcgcaaaaatgcagtgtaaaccacgaatccggacatccgatatcagagggaggtgagatgcgcagcgggtgtacctttcttgtttgcgaagacgagataggagacacacgatggctacgcacctcaccttgcacgaacgctaccagattgacctgaaccttgcacagggcctgaaaccgacgatcattgcgcggcgcctgggacgcggcagaagcacaatctacgaggagatcaagcggggacagttcaaaggtcgctattggtccgctcatgccgagcaccgggcggacgctgccaagcagcgctcggcggccaaccatcgaaccaagccggcggcgctgtgggactggatcgaggcgagcctcgtgcaggatcactcgcccgcgcaaatcgtggcgcggctgccgtgcgttgcgccgtcgcagtggtgcatcagcgcgccggcgatctacaaacgcgttgcgcgcgatcggcgtagtggcggcgcgctgcatcttcatctgcgccgcgctcaccggcacgaccgctggcgttactcctcgggtgggttgcccaaggaccggccctccatccgcgagcgccctgcgcacgtgcgtaaccgaagacggcgcgggcactgggagggcgacacctgccatggcagtcacgctgcccccgattgcacgctggtcgcggtggaacgcaagagcttgtattcggtgctgcgcaaactcaagcgcgccaccgccccggaaaccgctgacgggttgatcgagggcatgcgcgatctacctgtgcactccatcaccttcgacaacggctccgagttcgccgaatacgagcgtgtgcgtgactgccttcactgcgcggctttctttgctcaaccccgccagccgacccagcgggcgcgctgcgagaacaccatcggcctgctgcgccaatacgtgcccaaataccgaagccagaagaaaattacccaagaacagctcgatgaattcgctgagcgcctgaatcatcgtccacgcgtaacactgggcggacgcaccccacatgaggtattgttcaacctaacacccgtccggattcgaagttaattctgcaaaaattcctgaaagccgcatggttattggtctgcgcgtcgacgagccgacgccgcaatggcagtcttcggcgccgcgaaattacagcagcttgacgtggaagattgcgcaggctgtcctcatgccgccgtcgagcgttgcgatcggaacaccaagcctgcgcgccagctcgaaataaatgacgtcgtatccctgcaggtggtaacgcaagccgagatcgacgacgtcagccgcatcaagctcgaccgcaagcgtttcgaattcgagtgccctgagcgtcgcctgcgaggcgccgagttttgctgccgaaattcgcttgtcacgtttcgcggcgaccagtacgctgccaagctcgtagtgccacagatccggcaccgcgggaaacagtttccccgcgcttatccgttcgagtatcccctcggcgtaccgctggcccggtcccccgccaggcaggaaccattcgactgctacgctcgcatcaaggacgatgcgttcagcggccatgtcgcgcggcgcgaacttccttgagataggcgcggcccaacccaaccgcgcggccacgcttcgcccgccgcatcgcggtcaacaacaccaatgccgcgtgccgggcagacgcgcgtgatttcgccgacgccgcccgcagcacgtatacgccgggcgccacgcaaatcctgaggttcttttcgggcgcattcatgattagtttccgtttgccggatcattatagcgggaaaaataaagcgggtcagtctaactatcccgtggaaaatgcgcagaccggggtacgggaaggcggagtaaggcgtcagaggtggactgcaggcgaggcgcctgcgctagtgtgcccggcatgggcattgtacttgttatctgaaaggagataaccggagatagtgacaacaaccgtagcgaaaccccaaggtggaagccgcgaggcgagactg

SEQ ID NO: 68 - DNA, 16905 bp, Artificial Sequence
  Synthetic Oligonucleotide
  misc_feature (1)..(4311): n is a, c, g, or t
nnnnnnnnnnnnnnnnnnnnnnnnnnnnnnnnnnnnnnnnnnnnnnnnnnnnnnnnnnnnnnnnnnnnnnnnnnnnnnnnnnnnnnnnnnnnnnnnnnnnnnnnnnnnnnnnnnnnnnnnnnnnnnnnnnnnnnnnnnnnnnnnnnnnnnnnnnnnnnnnnnnnnnnnnnnnnnnnnnnnnnnnnnnnnnnnnnnnnnnnnnnnnnnnnnnnnnnnnnnnnnnnnnnnnnnnnnnnnnnnnnnnnnnnnnnnnnnnnnnnnnnnnnnnnnnnnnnnnnnnnnnnnnnnnnnnnnnnnnnnnnnnnnnnnnnnnnnnnnnnnnnnnnnnnnnnnnnnnnnnnnnnnnnnnnnnnnnnnnnnnnnnnnnnnnnnnnnnnnnnnnnnnnnnnnnnnnnnnnnnnnnnnnnnnnnnnnnnnnnnnnnnnnnnnnnnnnnnnnnnnnnnnnnnnnnnnnnnnnnnnnnnnnnnnnnnnnnnnnnnnnnnnnnnnnnnnnnnnnnnnnnnnnnnnnnnnnnnnnnnnnnnnnnnnnnnnnnnnnnnnnnnnnnnnnnnnnnnnnnnnnnnnnnnnnnnnnnnnnnnnnnnnnnnnnnnnnnnnnnnnnnnnnnnnnnnnnnnnnnnnnnnnnnnnnnnnnnnnnnnnnnnnnnnnnnnnnnnnnnnnnnnnnnnnnnnnnnnnnnnnnnnnnnnnnnnnnnnnnnnnnnnnnnnnnnnnnnnnnnnnnnnnnnnnnnnnnnnnnnnnnnnnnnnnnnnnnnnnnnnnnnnnnnnnnnnnnnnnnnnnnnnnnnnnnnnnnnnnnnnnnnnnnnnnnnnnnnnnnnnnnnnnnnnnnnnnnnnnnnnnnnnnnnnnnnnnnnnnnnnnnnnnnnnnnnnnnnnnnnnnnnnnnnnnnnnnnnnnnnnnnnnnnnnnnnnnnnnnnnnnnnnnnnnnnnnnnnnnnnnnnnnnnnnnnnnnnnnnnnnnnnnnnnnnnnnnnnnnnnnnnnnnnnnnnnnnnnnnnnnnnnnnnnnnnnnnnnnnnnnnnnnnnnnnnnnnnnnnnnnnnnnnnnnnnnnnnnnnnnnnnnnnnnnnnnnnnnnnnnnnnnnnnnnnnnnnnnnnnnnnnnnnnnnnnnnnnnnnnnnnnnnnnnnnnnnnnnnnnnnnnnnnnnnnnnnnnnnnnnnnnnnnnnnnnnnnnnnnnnnnnnnnnnnnnnnnnnnnnnnnnnnnnnnnnnnnnnnnnnnnnnnnnnnnnnnnnnnnnnnnnnnnnnnnnnnnnnnnnnnnnnnnnnnnnnnnnnnnnnnnnnnnnnnnnnnnnnnnnnnnnnnnnnnnnnnnnnnnnnnnnnnnnnnnnnnnnnnnnnnnnnnnnnnnnnnnnnnnnnnnnnnnnnnnnnnnnnnnnnnnnnnnnnnnnnnnnnnnnnnnnnnnnnnnnnnnnnnnnnnnnnnnnnnnnnnnnnnnnnnnnnnnnnnnnnnnnnnnnnnnnnnnnnnnnnnnnnnnnnnnnnnnnnnnnnnnnnnnnnnnnnnnnnnnnnnnnnnnnnnnnnnnnnnnnnnnnnnnnnnnnnnnnnnnnnnnnnnnnnnnnnnnnnnnnnnnnnnnnnnnnnnnnnnnnnnnnnnnnnnnnnnnnnnnnnnnnnnnnnnnnnnnnnnnnnnnnnnnnnnnnnnnnnnnnnnnnnnnnnnnnnnnnnnnnnnnnnnnnnnnnnnnnnnnnnnnnnnnnnnnnnnnnnnnnnnnnnnnnnnnnnnnnnnnnnnnnnnnnnnnnnnnnnnnnnnnnnnnnnnnnnnnnnnnnnnnnnnnnnnnnnnnnnnnnnnnnnnnnnnnnnnnnnnnnnnnnnnnnnnnnnnnnnnnnnnnnnnnnnnnnnnnnnnnnnnnnnnnnnnnnnnnnnnnnnnnnnnnnnnnnnnnnnnnnnnnnnnnnnnnnnnnnnnnnnnnnnnnnnnnnnnnnnnnnnnnnnnnnnnnnnnnnnnnnnnnnnnnnnnnnnnnnnnnnnnnnnnnnnnnnnnnnnnnnnnnnnnnnnnnnnnnnnnnnnnnnnnnnnnnnnnnnnnnnnnnnnnnnnnnnnnnnnnnnnnnnnnnnnnnnnnnnnnnnnnnnnnnnnnnnnnnnnnnnnnnnnnnnnnnnnnnnnnnnnnnnnnnnnnnnnnnnnnnnnnnnnnnnnnnnnnnnnnnnnnnnnnnnnnnnnnnnnnnnnnnnnnnnnnnnnnnnnnnnnnnnnnnnnnnnnnnnnnnnnnnnnnnnnnnnnnnnnnnnnnnnnnnnnnnnnnnnnnnnnnnnnnnnnnnnnnnnnnnnnnnnnnnnnnnnnnnnnnnnnnnnnnnnnnnnnnnnnnnnnnnnnnnnnnnnnnnnnnnnnnnnnnnnnnnnnnnnnnnnnnnnnnnnnnnnnnnnnnnnnnnnnnnnnnnnnnnnnnnnnnnnnnnnnnnnnnnnnnnnnnnnnnnnnnnnnnnnnnnnnnnnnnnnnnnnnnnnnnnnnnnnnnnnnnnnnnnnnnnnnnnnnnnnnnnnnnnnnnnnnnnnnnnnnnnnnnnnnnnnnnnnnnnnnnnnnnnnnnnnnnnnnnnnnnnnnnnnnnnnnnnnnnnnnnnnnnnnnnnnnnnnnnnnnnnnnnnnnnnnnnnnnnnnnnnnnnnnnnnnnnnnnnnnnnnnnnnnnnnnnnnnnnnnnnnnnnnnnnnnnnnnnnnnnnnnnnnnnnnnnnnnnnnnnnnnnnnnnnnnnnnnnnnnnnnnnnnnnnnnnnnnnnnnnnnnnnnnnnnnnnnnnnnnnnnnnnnnnnnnnnnnnnnnnnnnnnnnnnnnnnnnnnnnnnnnnnnnnnnnnnnnnnnnnnnnnnnnnnnnnnnnnnnnnnnnnnnnnnnnnnnnnnnnnnnnnnnnnnnnnnnnnnnnnnnnnnnnnnnnnnnnnnnnnnnnnnnnnnnnnnnnnnnnnnnnnnnnnnnnnnnnnnnnnnnnnnnnnnnnnnnnnnnnnnnnnnnnnnnnnnnnnnnnnnnnnnnnnnnnnnnnnnnnnnnnnnnnnnnnnnnnnnnnnnnnnnnnnnnnnnnnnnnnnnnnnnnnnnnnnnnnnnnnnnnnnnnnnnnnnnnnnnnnnnnnnnnnnnnnnnnnnnnnnnnnnnnnnnnnnnnnnnnnnnnnnnnnnnnnnnnnnnnnnnnnnnnnnnnnnnnnnnnnnnnnnnnnnnnnnnnnnnnnnnnnnnnnnnnnnnnnnnnnnnnnnnnnnnnnnnnnnnnnnnnnnnnnnnnnnnnnnnnnnnnnnnnnnnnnnnnnnnnnnnnnnnnnnnnnnnnnnnnnnnnnnnnnnnnnnnnnnnnnnnnnnnnnnnnnnnnnnnnnnnnnnnnnnnnnnnnnnnnnnnnnnnnnnnnnnnnnnnnnnnnnnnnnnnnnnnnnnnnnnnnnnnnnnnnnnnnnnnnnnnnnnnnnnnnnnnnnnnnnnnnnnnnnnnnnnnnnnnnnnnnnnnnnnnnnnnnnnnnnnnnnnnnnnnnnnnnnnnnnnnnnnnnnnnnnnnnnnnnnnnnnnnnnnnnnnnnnnnnnnnnnnnnnnnnnnnnnnnnnnnnnnnnnnnnnnnnnnnnnnnnnnnnnnnnnnnnnnnnnnnnnnnnnnnnnnnnnnnnnnnnnnnnnnnnnnnnnnnnnnnnnnnnnnnnnnnnnnnnnnnnnnnnnnnnnnnnnnnnnnnnnnnnnnnnnnnnnnnnnnnnnnnnnnnnnnnnnnnnnnnnnnnnnnnnnnnnnnnnnnnnnnnnnnnnnnnnnnnnnnnnnnnnnnnnnnnnnnnnnnnnnnnnnnnnnnnnnnnnnnnnnnnnnnnnnnnnnnnnnnnnnnnnnnnnnnnnnnnnnnnnnnnnnnnnnnnnnnnnnnnnnnnnnnnnnnnnnnnnnnnnnnnnnnnnnnnnnnnnnnnnnnnnnnnnnnnnnnnnnnnnnnnnnnnnnnnnnnnnnnnnnnnnnnnnnnnnnnnnnnnnnnnnnnnnnnnnnnnnnnnnnnnnnnnnnnnnnnnnnnnnnnnnnnnnnnnnnnnnnnnnnnnnnnnnnnnnnnnnnnnnnnnnnnnnnnnnnnnnnnnnnnnnnnnnnnnnnnnnnnnnnnnnnnnnnnnnnnnnnnnnnnnnnnnnnnnnnnnnnnnnnnnnnnnnnnnnnnnnnnnnnnnnnnnnnnnnnnnnnnnnnnnnnnnnnnnnnnnnnnnnnnnnnnnnnnnnnnnnnnnnnnnnnnnnnnnnnnnnnnnnnnnnnnnnnnnnnnnnnnnnnnnnnnnnnnnnnnnnnnnnnnnnnnnnnnnnnnnnnnnnnnnnnnnnnnnnnnnnnnnnnnnnnnnnnnnnnnnnnnnnnnnnnnnnnnnnnnnnnnnnnnnnnnnnnntcggttaacgagcgaggcaacgtggaaggtcacagttgcgggtctaacgagaataatcgcgctggccatatatgggattacgccgaagaagacggttcaataggcggcacggcctgtgctgttgtgccatggtttgctgatcgttacgctgagggcgctgattggcgcgcacttgcatactggattcataaccatctgccatatagcgacctctgtttccacccgaaactttgtgcattcaatatcacttggcatcagaacaagaagcggcgcgtttacagttacatcgcacccaccggcaagttgctcgacggtgagccgcccgacccgaagttcgcaagccattacgcggatttcccagagttgcggtttcattaatttgtgagttcattaagagtcacgcccaatcttaagggattgacttattttcgacatcaagcaacaccatggacacctttaattacagggtgttatggtgatcgcgcaacgcttagacgagcgcttcaaggtggcgtaaatccgtgccgactggcgtcagcgtgtggcaagccctttggcattcgtactcccgggatgggcgtttaaattgcatccgacatgtccccaagtctccaactaactaccaagcggcaagcaactctcctccacgagtttcacgctgccttcgaggcgacctctcgtcgagatctccaggagtggggcgcgcggactgtcgatgtgctcgggagcgttgcggttcgccggggcaagaactttgctttattggcgtcgcggatcggtgggtttgtttcagacgaagctctaggacttcttgccgcgctcgaaagaaacgatggcctttcgcatctgcgtgcacgaggttatgccgccgcagaaggaacccaagtacttggacaagactttgtcttgctctctcaaacgttcagttcaagtctttataaccgtcctggcgaagccgcgccgaaggtagtggcgggcattctgggattccttgtcggctctggaggcgtggacggcgacggcggcattcccgacctcgattttttggggggcattggcgcgcatcgctcgatcttcacgcactcagttgtgtccggaatagttgttgagacgctagtcctgagctttcttgatttatcaaagacggtgtaccgaaatctgcctgaagagcacgaccgattctgggaagacctcaacgcggctagcgacgatgtgttcgaagcacttaccattggcatcagtttaggtatcgctcatcaccttgctgtagatgcgaccattgacggcgatggcacctacaaagacctgccgatttccatccctgccgaaggccatcaagcaatcttagttgccaatgctgtagttgaaggtggtgatgctgccaagagggctctggaagcgaaggtcgctgaaattgaagccagagtcttcggtacattccgcgaagcggcggagtttgccaagcgggagcggggatcggtcattgttcgagcaaccgagacgcaggggtttcgagtgctgcggaaggtcatccgagtatgattaaactggccgctctgatccaacttcccaaacaagcacctcgaagcgagttccgtaaatggacaaaatcaaactgaccgccaccatgttgtcgccgatagttacgggcggcggctacatgacgctggacggactgctagcggcattgctgtttgacgaattacaggacgtcgaggctgcacacgcggcgatccccatccaatgcaaggacggactcttttcagcttctgcggcgatcatggagcccatcaaggagcgggtgacattcatcgctgcactccgtcccggccacagcatcgatccagacctgatccttaagaataagcagggccagttgcatcgcaagttcgatacttcactcacgaatgtcttaaacacctacgccatgctcacggcgcagacagtgacttggtataccgaaggcgacgcagcacaaattgagcggctggtctcgccggttcagttcatcggtaaacgaagagcctccgggttcggtcgcgtttctgggtggcaaatagaggcggatgaactcgatggtattgaaggtccattcggtgaaccgctgcgaccggtgccaatcgatatgtttacaggcgacaaatcccagcccatcgtcgatgccgcgtggcgaccggcgtactgggacccacttcatcgcaccgcttgctttgcgccaacttgagggggaatagtgctgcaatttttcaacgataactttggtcgttacttggtagaacagcttggcgatccagcggacgatgcgcgccgcgcgctttcatccagccacaggatgaagaaagcgggtgggctgcagcggatcgcgtccggatgggcgattgtgcggcccgaccggtcaacgatgcagtttgagctggctgcaacaggaattgaatacagcaagctgacgcgctatgaagcgtttcttgcggagcttgagcgttgggacggttcgccccgcatgttcattgaatttgccaagaggcccgtgcctgtcgccaatctttttcgcacattcgatgtgcgtcaggttcgagtgtgctcaccagttggtgtggagacgtttgactttaccaagccaccagaaaaagacgggtgcaagacgcacaaagttctttggaaactcaaaacaggaggaaagtagacatggacttcgttatgcaaaaaccagcaagtgttcgcgggtatgccctacaccggatggccgccgggttggcagatggcgagaaaatcttgttcgccgatcagggcgaccaaatgttattgcgcaccaacaaagccctcgcctgcgatcaaaagccagtgcgcacggttgtgcacggcgagatcatcgggtttgaacttcgcgcctgcgttggcaaaaaggtcaagggcaaacatcgctactttcccattgcagattggcgcagtcggcatgagtggctagaccgacaagggacgctacatggatttgagatcatcacggttaactgccaagcgcagtttcagacggttaagaaaggtgatcggacgtttacagtcgaccagacagacttcaccggcgttctaaaaatcacagacgttgagcccttcaatcgcgcggtatcgcatggtgtcggcaacaaggcgaaagcctttggctttggcatgttggtcatctaaaaaaaaggacacctgaatatgaaaaccattgtcatcaatgccaccatcacgaccgttggcccgctctccatcaccatgccgattgccgagggccaaatgggaaacaagttcaacaactttcctgttgtgacgcgcggcctagacgaaggcggcaacaagctgcagactgcgtatctcccggccacgacgtttcgcgggtttcttcgtcgcgccatcgtcacgcagaaaatgactgaggcagcggcaatcggcaaaccctacaccttgcagaaagcctacgcagatttgatcgggcaggacgccgcctctgagtcaaaggacgacatcgacttgatcaagctgaggcacactcgcgaggaaaatgccgtactcgatctattcggctccggcttgggcatcaagtcccggttgttggtatcgcatttcatgccgtcgcacaatgtgctgcccgaagtcatcaccggcgtgcgcaaggacttggaggacaccgacgggattctcgatttgctcacgccagcagatagcgacaagtatcttggacggtccgtcgcgaacagcaaacgttctgccgccatgacactcgtcaaagggcttgagcataaaattaaaaaagcaacgaaggctggtgaagacctgacggaactccgcacagcgcttgacgctgcaaaaggggtcgcagatcgatacgaatctgacatgggtgaaatgaccaactcatcgcgcacactcaccaactactatgcattcccagccgggatcgaactgaaggggcggctcgtcattgagaacgccagagatcgggatatgccaatgatcgagctagcactggaagcgctatctcatcgtccgattctaggtgcgcagagtgcgcgtgggtgtggcgagattgagggtgtgttcgatgtcttgatcgacagcgttcttttgaaaaaaattacgattgggggctggcaaccggcaaccgtgatggctttttcaggggcggaaacagcaaaagtttcagcgtagacaaggcgttacgaagggtcaggtgaagccaccccttgtttgggtggttactagaactgtggcacgcgaggatcttctcgcccgatgggtgaagccaccccttgtttgggtggttactagaactaatagcccattgtcgggtcgatcggcgtgggtgaagccaccccttgtttgggtggttactagaactgagccaaatttgagcgcatcgtgagcgtcggtgaagccaccccttgtttgggtggttactagaactaggacgccgcatcttcgccaaaagtatgtggtgaagccaccccttgtttgggtggttactagaacattgccgcgcaggaggctttgctatgagcgaggtgaagccaccccttgtttgggtggttactagaaccgtacaaaggcgtgaattgccgcgacttcgggtgaagccaccccttgtttgggtggttactagaacaacagatccggtgcgttgccgctgcgctttggtgaagccaccccttgtttgggtggttactagaacgccgttgacgatgatgtctgtcgaaaacgcggtgaagccaccccttgtttgggtggttactagaacgcgaacaccagccagtcaaccgcgtttgcgggtgaagccaccccttgtttgggtggttactagaactagtcgatcatcaccgtgcgcatggcaaacggtgaagccaccccttgtttgggtggttactagaaccgtgcttccgcgacacttgagactgcgtttggtgaagccaccccttgtttgggtggttactagaactgagaggggattataggggagagcacgttcggtgaagccaccccttgtttgggtggttactagaacaccgaaagcgatgccacgaaagccgcacgaggtgaagccaccccttgtttgggtggttactagaaccaaagagtatgggtgcacgaggaccgaagggtgaagccaccccttgtttgggtggttactagaacagtgtggcgcacggggcacggtgatggtcgggtgaagccaccccttgtttgggtggttactagaactagatggccggtgcagcctcgccgatgccggtgaagccaccccttgtttgggtggttactagaacttggatgttttctttacgcaaacagttgcgggtgaagccaccccttgtttgggtggttactagaactaggaccttttaggaaagccatttttctgcggtgaagccaccccttgtttgggtggctactagaacaacggagcgcacaaaagccccgctatggcggccgaagccaccttttgtttgggtggttactagaacgacgatagaggtggctaacagcgcgactcaggcggagccaccctgcgcaagggtggttacgaaagcaagcaggaaataagtttattgggttcaatccgtatcgcaacgcagcgtttgcgcagctattatttgcaccagagctaatatcaatccgaatcaacgcaccaaaatcaaccaacaggacggtttgatgtttcgttcaacagaacaagcacagtttgcatcgatcgtcgcaacgcacctagcaggcagtgacacgccgctgctgttggaggggggcgttggaatcggcaagacgcgcgcttatctttctgcattgattcaatccgaaaagaacgtcgcagtcgttctgcccacccatccgttgatcgaccaactactcgcatcaaccgacctcgcggcggcgcgcgagatggtaaccgttgccgcgttcagaccggcgcgaatgtttgcgcgcaggaccgactacgacgccaacaagcgcgaagcgatgcagacacgggtgatgctctgcaccgccgcaagtgtcatcatcgatcagcggcttggtggcgaatacaacggcgcaacgacgcgcgcctatattctgtttgatgaggccgatcaactacccgatatggccgcgctgcaaagcgacttcaccatcaccgcgaccgatctctcggacctaggcatccgcctgacaaccgccgccgaaacgttaagcgcaattctcgcaaagccaccgcgcatcgttgagcccgagatcagggccgcggcgagaatcattctcgacgccatcgaagcgcccgcttggtaccaatccgcaggcattagcgacgatggtgacatcatgcttactcacaagctccccggacgtttgttgaagaagattagcaacaggggaaatgtcgcgttcatctccgcaaccttgacagtcgggggtcgattcaaggagtttcagaactcgatgggcatcgagacgctgagcctactgtcgagcgtaatcgagccagcccggcatggcgcgctagattttcatctgatcccgatggagatcgatacgcccgagtggatcgacgcgatagtgaaggcggccaacgatgcaccaaagcccgcgctagtggcgacaacgtctcacgagctttcgatgctgctgggtgaacgtttgccatcggctgttgtaagagcaagtgatgaaactgctgcacaggcagcagttaaggttgatggcagcggcgttctgattgcggctggggcgtgggcagggctagacacgccactacgctggcgcgccatcatcgtgccgcgcgtgccattcggccagccagtcgtgattgacggggacgtgacgaccagctacctcgatgcgcggaatacagcagtacgcagactgcggcaagtgattggacgtggcttgaggacgccggacgcggtgtgtagcgtgtatgtattggacgctagagtcgagaaattgagcggatttattcctgagcggttttcttccgcgtgggtggaccgaacctatctggagggggcaaagaaggacatcgtactttccaaggcggagcgacacccgttgattcgcaaagcggcgctaaaacactacggtcgaaaatgcatgaacccggcttgcggattcgtccctaaggttgattcccagcttgatgttcatcacctcaacccaatcgccgaggggcaacgtcgcacgagaatagaagacgtcgttgtcttgtgtgcgaactgccaccgactggcgcacgcgactgttccaccgacgaggctgcatgagggggtgtagaactgcgcccccgtttctgcgaacaagctataatgcaacatggttgcattaacgtccaaaaccagtagattcgtcgaggaatacgcgctcgatcacaacggtactgccgctgccgtgcgcgcggggtattcgcctcgctctgctcccgtaacagcgtctcggctgctaagaaatgctaacgtcaggggcgctctagcagagcgccagggcgagcttgccgagaagcttgccctagaccgtcagcaggtcgttggaggcctcctcaaggccgcagaactggccgaggagcagcggaacccattggcgatggtggcggcgctgcgtgagattggcaagatgcttgggtattacgagccggagcgaaagacaattgcaattgaggctgtcggcgacgacgttaaggcgaactttagcgtcatgtcgaacgcacaactgactacgctaatcgcagccggttcagctgcttgagcagctgaaccgcatgtagaagagataaagaccgctgcagcggtctcttctctatatagcactatcatctatcatctcgttgatttcattggattttatggcctgatacgtcactatcagctatcacccctaagcctttgatttgcgggcttttttcactgatgatagcgaagcgtcgaccatcatctgggtatcagctatcgggctcgcgcccggcgcattcggtccccgccaaagcaaatggctgccgcctgcagcaatgataagttggccgttcaggatggccttttttatcaatgccctcactcgtatcttgccaagcttcagcacaccaagttcaccgccgattttttcagagaacgcggtcgacgagtagtgccgcccctgtgccgcttcgctaagcacaactttgacgactttggcgaggtcgttactggcagctggtggctcaccatcgatgtgcgtgagcactccgtgatctccttggcgcagcagaattggatcgattggcttgccgtaattactcttggtaacggtcgccaccagatatttcttgcgctgctcttccgaaaatccccaccgcttggctgcttctgcagtcagccgatttaggttcatctgccatcgcacaccgtcggtcaatgcgcttgagccgcgcgatgcaccctgccctggcgcatcttggctcatagagcctttgtttgtatggtgcaatatcaagattgtcgcgccagtggccatccgtattcgctccagctcttcaacaaaacgtgtcgtgtcttgtgcagtattttcatcaccaccacggaagcgcgacgccgggtcgataacgatcaatcgaagatcaggtatctgattggcgctcaaaatgaggcggtcggcatagccagtcgatgcaactgatctgtgttgctgtccctcagtcatcaggttgttatgactgaccatcgacttaatgaagagccgcatgccgacaacggcagcgagcgcggggtctatcgctcggagggggttcatggcggcgtccaatcgccggtgcacctcatcatcgtcatcttcggcgaacagtaggagcacgccacctggtttaggtacgccgaacgcgccgaggaagtcgtgaccactagcgaccgcgataccgagttgaagcgccagcatgctcttaccggttccaccctgcgcaaccagcatcccaacaatggcttgcggcaacaacccatcgagcacccatcgcattcgcggcggcggagtactgagcttccccgtgatacttgcgctggtaagatcgaatagcggttcgagcaagtcgtaatgtgtggtcgctgggtgattacgctggtgtcgatcccagatgctgctacaagtcgactcgattttctcgtcatcaagcggcggtgtattcgaagcgttccagtccttgcacagcgtgatcacctcggccaacggcttggcttgccatgtccaccatccgcacaacttaagaagatgggttgtgcgctcaccgtctttgcaaaccttcaggaggtccgctgaacctccagtggtatagatgacatcgttttgcgctggcctaatggcgcgcggcggcacggtttttttcgcgacgccgatgccatccagtcccaagtcttttacaagcgctaagtatttcggcttcccatcttcttcccgcgctttcaggagtattaacgattgatttttcacgatttaattctcacaatttgggttataaaggggcggtctttttgatgcacgaagccaggtacgcgcatcacacgcgcgagatcaatgacggccggatcaccatcgaacttcgcggccaattgcttctgtcgacgcgtgaaatcggtattggggcaacctggcgcaagccagtaagcgtgatatctgcccacgctgctttcgacgatgatgtccggtggcaccgctgctccctgaacggggtcgagcggcgcgccgtcgaggtccacaaatagcgctcgaatagcgatgacgttctcattagttcggcaggtcttgttgccgtcaagcaaaatgccgttgccgtgattcaccatgaaaaatactccagcaccttgagcgttgagattggccaattcgtctttatgatctgcgaacgttccatgaaggacgcaacgcagccagccgtcttttttgtgctccccctccccaaaggtctggaatgtaaataggcccttagggtccagcgcatcaagaaatttctgtgcttcatcaaagactggtgacaagcgttctttgggcgcgctcatttcgagcccccatttgcgtcgacccaatcgaagaaggccccctcgtcaattaagatgcagcgccctgcgcgtcggataacggcattgaagccgttacgcttggcgttgaaaatgagatgcctgagtccccccttgggtggccatgaatgatgttgttgccattcgctcgcgcggatgtattttcttgcggtgcttttcatgttggttccttttgaagttcagcgctgcaaatgcaccgctgggtccaatcacgatcccaaggcaaaatcggcaacacaacacaatcattgacagcagttttgtgtgcgtcaaatcaatgagttaggaaaaagtaggcaagtaggcggactttatgggcagacttgcccataaaaaacccgccgtgaaggcgggttgaagtgaaatttaagtcaacagttggtcacgatttccaccaactcgcgtcgatctctcgataaatagttgattccgctttgtccttgtatatttctgccagctgcttcgctattttgcggcgtgtgattttcccttggaagttatccttgcgtagtgtcctcgccgcctcaatgcaggcctctttccatttctgtttttttcccttggcgtcgcgctgggtgtttggcgtgccagaggtcgctttggttgcgaacccctccagcagaagctcccgttcctcctttgtcatgacagggttgtcattccatttcatcgggcaactctccggccaatggtcgccaagccccgctaacggctcagcgctggtggtggtgtaatcgacggcggcgcatctcattttcgaagcgtactcaaacatcggccgaacaatgtcgtacggtacaaaaactccagcgtatagagctcgcacttccgcattacttgccccacgttgtctagccgcataaacgtcttcgcgcattcgcatgaagtcagtgccgctaataccgcaaacattgcctgacgcgtcaatgtgttgcgggtcgagggcgttgctgacagggttaggcgaccaattagggtcatacaacaaagtcgcaacatcagaagcagaccacgcgccgttggtgaaatatggcagcgcgcgtagggggacgactcgttggccattaataagaattggttgcatgattttctccctcaaatatttttgcgttcatcgatgtgacaactttggccgtgtgctcatttgcaatgtgcgcatagcgcttcaccatctgtagcgttctgtgtccgaggacgctcgcaatttccataggcgaggccccattcatggccaaataagaggcggctgtatggcgcaaatcgtgaaaccggaagtcagtgatctctgccttgcgaatggcagtgccccaggcctttttgatttcgattggctttgccgcatcaatgccaggaaagacataaatggcgatggcatccgactgtgcgcgccgctcaattaaaagatcacgtgcgtatcccgccaccttcacgccgcgcctgtcgccattcttggtttcatccaggatcaaccatcctcgcgtgagatcaagctgacaccaacgcagcgtttgaatttcgtttaatcgcatgcctgtcgaaatagccagaaccacaatgggcaacagcgatttactgcttgaagcccgacacgcagcgaggagtgcagtacgctcggtctcactcaagaagcgcgcgcgtccactcgccgcgcgcggcttgctcaccttgcggaacgggttgtcgtcgatccactgccactccttcatggcgatcgtcattacgtgtgacaaggcagccatatagcgaatgacggtggcaccggagcggcgcttggttgtctttcctgacttgtacgagcctgcgtgaagttcgtcgcggcactggatgatgacgagaggctttgcctcggctagcgctagctttccgattcgtttgtcccaccaatccagatgacccttcgtgttgcgcgcattttttggtttgtcgcacagcacctctccccgatagcgcttgatggcgtcgccaacggtgtggcgtttggcggcagctgacgggaagtgccgtccttcgagcacagcgccatctacttgagtcgaccatttcttagcgtcagtcaggcgagagaaagttttggtctgcgtcgccgtccccttgcgacggactttgacgcggtaagcgacactaccgtcttgcgatttacgcgtttcaatatttgccatgaaaacaactccagaaagcgctcgtttgcactagcgcgattcgaaaaaatctggagtcagaaaacaaaaccccagacaactggaaccgtctggggtcaatgaaatacaaaagcggccgcagacgataatttagcttcgtaactaagttgtctgcgagccacgcgccgatgggaattgccccaccagtgtcccttaggccgggataaggaagaaaggtgccccttttcctcccctgaattcaagcgctaactacttgattgaattcatataaatctttggctccccgacctggattcgaaccagggacctgcggattaacagtccgtcgctctaccggctgagctatcagggaatcgacgctgaattgctccaacgaagtc

SEQ ID NO: 69 - DNA, 16833 bp, Artificial Sequence
  Synthetic Oligonucleotide
  misc_feature (1)..(9999): n is a, c, g, or t
nnnnnnnnnnnnnnnnnnnnnnnnnnnnnnnnnnnnnnnnnnnnnnnnnnnnnnnnnnnnnnnnnnnnnnnnnnnnnnnnnnnnnnnnnnnnnnnnnnnnnnnnnnnnnnnnnnnnnnnnnnnnnnnnnnnnnnnnnnnnnnnnnnnnnnnnnnnnnnnnnnnnnnnnnnnnnnnnnnnnnnnnnnnnnnnnnnnnnnnnnnnnnnnnnnnnnnnnnnnnnnnnnnnnnnnnnnnnnnnnnnnnnnnnnnnnnnnnnnnnnnnnnnnnnnnnnnnnnnnnnnnnnnnnnnnnnnnnnnnnnnnnnnnnnnnnnnnnnnnnnnnnnnnnnnnnnnnnnnnnnnnnnnnnnnnnnnnnnnnnnnnnnnnnnnnnnnnnnnnnnnnnnnnnnnnnnnnnnnnnnnnnnnnnnnnnnnnnnnnnnnnnnnnnnnnnnnnnnnnnnnnnnnnnnnnnnnnnnnnnnnnnnnnnnnnnnnnnnnnnnnnnnnnnnnnnnnnnnnnnnnnnnnnnnnnnnnnnnnnnnnnnnnnnnnnnnnnnnnnnnnnnnnnnnnnnnnnnnnnnnnnnnnnnnnnnnnnnnnnnnnnnnnnnnnnnnnnnnnnnnnnnnnnnnnnnnnnnnnnnnnnnnnnnnnnnnnnnnnnnnnnnnnnnnnnnnnnnnnnnnnnnnnnnnnnnnnnnnnnnnnnnnnnnnnnnnnnnnnnnnnnnnnnnnnnnnnnnnnnnnnnnnnnnnnnnnnnnnnnnnnnnnnnnnnnnnnnnnnnnnnnnnnnnnnnnnnnnnnnnnnnnnnnnnnnnnnnnnnnnnnnnnnnnnnnnnnnnnnnnnnnnnnnnnnnnnnnnnnnnnnnnnnnnnnnnnnnnnnnnnnnnnnnnnnnnnnnnnnnnnnnnnnnnnnnnnnnnnnnnnnnnnnnnnnnnnnnnnnnnnnnnnnnnnnnnnnnnnnnnnnnnnnnnnnnnnnnnnnnnnnnnnnnnnnnnnnnnnnnnnnnnnnnnnnnnnnnnnnnnnnnnnnnnnnnnnnnnnnnnnnnnnnnnnnnnnnnnnnnnnnnnnnnnnnnnnnnnnnnnnnnnnnnnnnnnnnnnnnnnnnnnnnnnnnnnnnnnnnnnnnnnnnnnnnnnnnnnnnnnnnnnnnnnnnnnnnnnnnnnnnnnnnnnnnnnnnnnnnnnnnnnnnnnnnnnnnnnnnnnnnnnnnnnnnnnnnnnnnnnnnnnnnnnnnnnnnnnnnnnnnnnnnnnnnnnnnnnnnnnnnnnnnnnnnnnnnnnnnnnnnnnnnnnnnnnnnnnnnnnnnnnnnnnnnnnnnnnnnnnnnnnnnnnnnnnnnnnnnnnnnnnnnnnnnnnnnnnnnnnnnnnnnnnnnnnnnnnnnnnnnnnnnnnnnnnnnnnnnnnnnnnnnnnnnnnnnnnnnnnnnnnnnnnnnnnnnnnnnnnnnnnnnnnnnnnnnnnnnnnnnnnnnnnnnnnnnnnnnnnnnnnnnnnnnnnnnnnnnnnnnnnnnnnnnnnnnnnnnnnnnnnnnnnnnnnnnnnnnnnnnnnnnnnnnnnnnnnnnnnnnnnnnnnnnnnnnnnnnnnnnnnnnnnnnnnnnnnnnnnnnnnnnnnnnnnnnnnnnnnnnnnnnnnnnnnnnnnnnnnnnnnnnnnnnnnnnnnnnnnnnnnnnnnnnnnnnnnnnnnnnnnnnnnnnnnnnnnnnnnnnnnnnnnnnnnnnnnnnnnnnnnnnnnnnnnnnnnnnnnnnnnnnnnnnnnnnnnnnnnnnnnnnnnnnnnnnnnnnnnnnnnnnnnnnnnnnnnnnnnnnnnnnnnnnnnnnnnnnnnnnnnnnnnnnnnnnnnnnnnnnnnnnnnnnnnnnnnnnnnnnnnnnnnnnnnnnnnnnnnnnnnnnnnnnnnnnnnnnnnnnnnnnnnnnnnnnnnnnnnnnnnnnnnnnnnnnnnnnnnnnnnnnnnnnnnnnnnnnnnnnnnnnnnnnnnnnnnnnnnnnnnnnnnnnnnnnnnnnnnnnnnnnnnnnnnnnnnnnnnnnnnnnnnnnnnnnnnnnnnnnnnnnnnnnnnnnnnnnnnnnnnnnnnnnnnnnnnnnnnnnnnnnnnnnnnnnnnnnnnnnnnnnnnnnnnnnnnnnnnnnnnnnnnnnnnnnnnnnnnnnnnnnnnnnnnnnnnnnnnnnnnnnnnnnnnnnnnnnnnnnnnnnnnnnnnnnnnnnnnnnnnnnnnnnnnnnnnnnnnnnnnnnnnnnnnnnnnnnnnnnnnnnnnnnnnnnnnnnnnnnnnnnnnnnnnnnnnnnnnnnnnnnnnnnnnnnnnnnnnnnnnnnnnnnnnnnnnnnnnnnnnnnnnnnnnnnnnnnnnnnnnnnnnnnnnnnnnnnnnnnnnnnnnnnnnnnnnnnnnnnnnnnnnnnnnnnnnnnnnnnnnnnnnnnnnnnnnnnnnnnnnnnnnnnnnnnnnnnnnnnnnnnnnnnnnnnnnnnnnnnnnnnnnnnnnnnnnnnnnnnnnnnnnnnnnnnnnnnnnnnnnnnnnnnnnnnnnnnnnnnnnnnnnnnnnnnnnnnnnnnnnnnnnnnnnnnnnnnnnnnnnnnnnnnnnnnnnnnnnnnnnnnnnnnnnnnnnnnnnnnnnnnnnnnnnnnnnnnnnnnnnnnnnnnnnnnnnnnnnnnnnnnnnnnnnnnnnnnnnnnnnnnnnnnnnnnnnnnnnnnnnnnnnnnnnnnnnnnnnnnnnnnnnnnnnnnnnnnnnnnnnnnnnnnnnnnnnnnnnnnnnnnnnnnnnnnnnnnnnnnnnnnnnnnnnnnnnnnnnnnnnnnnnnnnnnnnnnnnnnnnnnnnnnnnnnnnnnnnnnnnnnnnnnnnnnnnnnnnnnnnnnnnnnnnnnnnnnnnnnnnnnnnnnnnnnnnnnnnnnnnnnnnnnnnnnnnnnnnnnnnnnnnnnnnnnnnnnnnnnnnnnnnnnnnnnnnnnnnnnnnnnnnnnnnnnnnnnnnnnnnnnnnnnnnnnnnnnnnnnnnnnnnnnnnnnnnnnnnnnnnnnnnnnnnnnnnnnnnnnnnnnnnnnnnnnnnnnnnnnnnnnnnnnnnnnnnnnnnnnnnnnnnnnnnnnnnnnnnnnnnnnnnnnnnnnnnnnnnnnnnnnnnnnnnnnnnnnnnnnnnnnnnnnnnnnnnnnnnnnnnnnnnnnnnnnnnnnnnnnnnnnnnnnnnnnnnnnnnnnnnnnnnnnnnnnnnnnnnnnnnnnnnnnnnnnnnnnnnnnnnnnnnnnnnnnnnnnnnnnnnnnnnnnnnnnnnnnnnnnnnnnnnnnnnnnnnnnnnnnnnnnnnnnnnnnnnnnnnnnnnnnnnnnnnnnnnnnnnnnnnnnnnnnnnnnnnnnnnnnnnnnnnnnnnnnnnnnnnnnnnnnnnnnnnnnnnnnnnnnnnnnnnnnnnnnnnnnnnnnnnnnnnnnnnnnnnnnnnnnnnnnnnnnnnnnnnnnnnnnnnnnnnnnnnnnnnnnnnnnnnnnnnnnnnnnnnnnnnnnnnnnnnnnnnnnnnnnnnnnnnnnnnnnnnnnnnnnnnnnnnnnnnnnnnnnnnnnnnnnnnnnnnnnnnnnnnnnnnnnnnnnnnnnnnnnnnnnnnnnnnnnnnnnnnnnnnnnnnnnnnnnnnnnnnnnnnnnnnnnnnnnnnnnnnnnnnnnnnnnnnnnnnnnnnnnnnnnnnnnnnnnnnnnnnnnnnnnnnnnnnnnnnnnnnnnnnnnnnnnnnnnnnnnnnnnnnnnnnnnnnnnnnnnnnnnnnnnnnnnnnnnnnnnnnnnnnnnnnnnnnnnnnnnnnnnnnnnnnnnnnnnnnnnnnnnnnnnnnnnnnnnnnnnnnnnnnnnnnnnnnnnnnnnnnnnnnnnnnnnnnnnnnnnnnnnnnnnnnnnnnnnnnnnnnnnnnnnnnnnnnnnnnnnnnnnnnnnnnnnnnnnnnnnnnnnnnnnnnnnnnnnnnnnnnnnnnnnnnnnnnnnnnnnnnnnnnnnnnnnnnnnnnnnnnnnnnnnnnnnnnnnnnnnnnnnnnnnnnnnnnnnnnnnnnnnnnnnnnnnnnnnnnnnnnnnnnnnnnnnnnnnnnnnnnnnnnnnnnnnnnnnnnnnnnnnnnnnnnnnnnnnnnnnnnnnnnnnnnnnnnnnnnnnnnnnnnnnnnnnnnnnnnnnnnnnnnnnnnnnnnnnnnnnnnnnnnnnnnnnnnnnnnnnnnnnnnnnnnnnnnnnnnnnnnnnnnnnnnnnnnnnnnnnnnnnnnnnnnnnnnnnnnnnnnnnnnnnnnnnnnnnnnnnnnnnnnnnnnnnnnnnnnnnnnnnnnnnnnnnnnnnnnnnnnnnnnnnnnnnnnnnnnnnnnnnnnnnnnnnnnnnnnnnnnnnnnnnnnnnnnnnnnnnnnnnnnnnnnnnnnnnnnnnnnnnnnnnnnnnnnnnnnnnnnnnnnnnnnnnnnnnnnnnnnnnnnnnnnnnnnnnnnnnnnnnnnnnnnnnnnnnnnnnnnnnnnnnnnnnnnnnnnnnnnnnnnnnnnnnnnnnnnnnnnnnnnnnnnnnnnnnnnnnnnnnnnnnnnnnnnnnnnnnnnnnnnnnnnnnnnnnnnnnnnnnnnnnnnnnnnnnnnnnnnnnnnnnnnnnnnnnnnnnnnnnnnnnnnnnnnnnnnnnnnnnnnnnnnnnnnnnnnnnnnnnnnnnnnnnnnnnnnnnnnnnnnnnnnnnnnnnnnnnnnnnnnnnnnnnnnnnnnnnnnnnnnnnnnnnnnnnnnnnnnnnnnnnnnnnnnnnnnnnnnnnnnnnnnnnnnnnnnnnnnnnnnnnnnnnnnnnnnnnnnnnnnnnnnnnnnnnnnnnnnnnnnnnnnnnnnnnnnnnnnnnnnnnnnnnnnnnnnnnnnnnnnnnnnnnnnnnnnnnnnnnnnnnnnnnnnnnnnnnnnnnnnnnnnnnnnnnnnnnnnnnnnnnnnnnnnnnnnnnnnnnnnnnnnnnnnnnnnnnnnnnnnnnnnnnnnnnnnnnnnnnnnnnnnnnnnnnnnnnnnnnnnnnnnnnnnnnnnnnnnnnnnnnnnnnnnnnnnnnnnnnnnnnnnnnnnnnnnnnnnnnnnnnnnnnnnnnnnnnnnnnnnnnnnnnnnnnnnnnnnnnnnnnnnnnnnnnnnnnnnnnnnnnnnnnnnnnnnnnnnnnnnnnnnnnnnnnnnnnnnnnnnnnnnnnnnnnnnnnnnnnnnnnnnnnnnnnnnnnnnnnnnnnnnnnnnnnnnnnnnnnnnnnnnnnnnnnnnnnnnnnnnnnnnnnnnnnnnnnnnnnnnnnnnnnnnnnnnnnnnnnnnnnnnnnnnnnnnnnnnnnnnnnnnnnnnnnnnnnnnnnnnnnnnnnnnnnnnnnnnnnnnnnnnnnnnnnnnnnnnnnnnnnnnnnnnnnnnnnnnnnnnnnnnnnnnnnnnnnnnnnnnnnnnnnnnnnnnnnnnnnnnnnnnnnnnnnnnnnnnnnnnnnnnnnnnnnnnnnnnnnnnnnnnnnnnnnnnnnnnnnnnnnnnnnnnnnnnnnnnnnnnnnnnnnnnnnnnnnnnnnnnnnnnnnnnnnnnnnnnnnnnnnnnnnnnnnnnnnnnnnnnnnnnnnnnnnnnnnnnnnnnnnnnnnnnnnnnnnnnnnnnnnnnnnnnnnnnnnnnnnnnnnnnnnnnnnnnnnnnnnnnnnnnnnnnnnnnnnnnnnnnnnnnnnnnnnnnnnnnnnnnnnnnnnnnnnnnnnnnnnnnnnnnnnnnnnnnnnnnnnnnnnnnnnnnnnnnnnnnnnnnnnnnnnnnnnnnnnnnnnnnnnnnnnnnnnnnnnnnnnnnnnnnnnnnnnnnnnnnnnnnnnnnnnnnnnnnnnnnnnnnnnnnnnnnnnnnnnnnnnnnnnnnnnnnnnnnnnnnnnnnnnnnnnnnnnnnnnnnnnnnnnnnnnnnnnnnnnnnnnnnnnnnnnnnnnnnnnnnnnnnnnnnnnnnnnnnnnnnnnnnnnnnnnnnnnnnnnnnnnnnnnnnnnnnnnnnnnnnnnnnnnnnnnnnnnnnnnnnnnnnnnnnnnnnnnnnnnnnnnnnnnnnnnnnnnnnnnnnnnnnnnnnnnnnnnnnnnnnnnnnnnnnnnnnnnnnnnnnnnnnnnnnnnnnnnnnnnnnnnnnnnnnnnnnnnnnnnnnnnnnnnnnnnnnnnnnnnnnnnnnnnnnnnnnnnnnnnnnnnnnnnnnnnnnnnnnnnnnnnnnnnnnnnnnnnnnnnnnnnnnnnnnnnnnnnnnnnnnnnnnnnnnnnnnnnnnnnnnnnnnnnnnnnnnnnnnnnnnnnnnnnnnnnnnnnnnnnnnnnnnnnnnnnnnnnnnnnnnnnnnnnnnnnnnnnnnnnnnnnnnnnnnnnnnnnnnnnnnnnnnnnnnnnnnnnnnnnnnnnnnnnnnnnnnnnnnnnnnnnnnnnnnnnnnnnnnnnnnnnnnnnnnnnnnnnnnnnnnnnnnnnnnnnnnnnnnnnnnnnnnnnnnnnnnnnnnnnnnnnnnnnnnnnnnnnnnnnnnnnnnnnnnnnnnnnnnnnnnnnnnnnnnnnnnnnnnnnnnnnnnnnnnnnnnnnnnnnnnnnnnnnnnnnnnnnnnnnnnnnnnnnnnnnnnnnnnnnnnnnnnnnnnnnnnnnnnnnnnnnnnnnnnnnnnnnnnnnnnnnnnnnnnnnnnnnnnnnnnnnnnnnnnnnnnnnnnnnnnnnnnnnnnnnnnnnnnnnnnnnnnnnnnnnnnnnnnnnnnnnnnnnnnnnnnnnnnnnnnnnnnnnnnnnnnnnnnnnnnnnnnnnnnnnnnnnnnnnnnnnnnnnnnnnnnnnnnnnnnnnnnnnnnnnnnnnnnnnnnnnnnnnnnnnnnnnnnnnnnnnnnnnnnnnnnnnnnnnnnnnnnnnnnnnnnnnnnnnnnnnnnnnnnnnnnnnnnnnnnnnnnnnnnnnnnnnnnnnnnnnnnnnnnnnnnnnnnnnnnnnnnnnnnnnnnnnnnnnnnnnnnnnnnnnnnnnnnnnnnnnnnnnnnnnnnnnnnnnnnnnnnnnnnnnnnnnnnnnnnnnnnnnnnnnnnnnnnnnnnnnnnnnnnnnnnnnnnnnnnnnnnnnnnnnnnnnnnnnnnnnnnnnnnnnnnnnnnnnnnnnnnnnnnnnnnnnnnnnnnnnnnnnnnnnnnnnnnnnnnnnnnnnnnnnnnnnnnnnnnnnnnnnnnnnnnnnnnnnnnnnnnnnnnnnnnnnnnnnnnnnnnnnnnnnnnnnnnnnnnnnnnnnnnnnnnnnnnnnnnnnnnnnnnnnnnnnnnnnnnnnnnnnnnnnnnnnnnnnnnnnnnnnnnnnnnnnnnnnnnnnnnnnnnnnnnnnnnnnnnnnnnnnnnnnnnnnnnnnnnnnnnnnnnnnnnnnnnnnnnnnnnnnnnnnnnnnnnnnnnnnnnnnnnnnnnnnnnnnnnnnnnnnnnnnnnnnnnnnnnnnnnnnnnnnnnnnnnnnnnnnnnnnnnnnnnnnnnnnnnnnnnnnnnnnnnnnnnnnnnnnnnnnnnnnnnnnnnnnnnnnnnnnnnnnnnnnnnnnnnnnnnnnnnnnnnnnnnnnnnnnnnnnnnnnnnnnnnnnnnnnnnnnnnnnnnnnnnnnnnnnnnnnnnnnnnnnnnnnnnnnnnnnnnnnnnnnnnnnnnnnnnnnnnnnnnnnnnnnnnnnnnnnnnnnnnnnnnnnnnnnnnnnnnnnnnnnnnnnnnnnnnnnnnnnnnnnnnnnnnnnnnnnnnnnnnnnnnnnnnnnnnnnnnnnnnnnnnnnnnnnnnnnnnnnnnnnnnnnnnnnnnnnnnnnnnnnnnnnnnnnnnnnnnnnnnnnnnnnnnnnnnnnnnnnnnnnnnnnnnnnnnnnnnnnnnnnnnnnnnnnnnnnnnnnnnnnnnnnnnnnnnnnnnnnnnnnnnnnnnnnnnnnnnnnnnnnnnnnnnnnnnnnnnnnnnnnnnnnnnnnnnnnnnnnnnnnnnnnnnnnnnnnnnnnnnnnnnnnnnnnnnnnnnnnnnnnnnnnnnnnnnnnnnnnnnnnnnnnnnnnnnnnnnnnnnnnnnnnnnnnnnnnnnnnnnnnnnnnnnnnnnnnnnnnnnnnnnnnnnnnnnnnnnnnnnnnnnnnnnnnnnnnnnnnnnnnnnnnnnnnnnnnnnnnnnnnnnnnnnnnnnnnnnnnnnnnnnnnnnnnnnnnnnnnnnnnnnnnnnnnnnnnnnnnnnnnnnnnnnnnnnnnnnnnnnnnnnnnnnnnnnnnnnnnnnnnnnnnnnnnnnnnnnnnnnnnnnnnnnnnnnnnnnnnnnnnnnnnnnnnnnnnnnnnnnnnnnnnnnnnnnnnnnnnnnnnnnnnnnnnnnnnnnnnnnnnnnnnnnnnnnnnnnnnnnnnnnnnnnnnnnnnnnnnnnnnnnnnnnnnnnnnnnnnnnnnnnnnnnnnnnnnnnnnnnnnnnnnnnnnnnnnnnnnnnnnnnnnnnnnnnnnnnnnnnnnnnnnnnnnnnnnnnnnnnnnnnnnnnnnnnnnnnnnnnnnnnnnnnnnnnnnnnnnnnnnnnnnnnnnnnnnnnnnnnnnnnnnnnnnnnnnnnnnnnnnnnnnnnnnnnnnnnnnnnnnnnnnnnnnnnnnnnnnnnnnnnnnnnnnnnnnnnnnnnnnnnnnnnnnnnnnnnnnnnnnnnnnnnnnnnnnnnnnnnnnnnnnnnnnnnnnnnnnnnnnnnnnnnnnnnnnnnnnnnnnnnnnnnnnnnnnnnnnnnnnnnnnnnnnnnnnnnnnnnnnnnnnnnnnnnnnnnnnnnnnnnnnnnnnnnnnnnnnnnnnnnnnnnnnnnnnnnnnnnnnnnnnnnnnnnnnnnnnnnnnnnnnnnnnnnnnnnnnnnnnnnnnnnnnnnnnnnnnnnnnnnnnnnnnnnnnnnnnnnnnnnnnnnnnnnnnnnnnnnnnnnnnnnnnnnnnnnnnnnnnnnnnnnnnnnnnnnnnnnnnnnnnnnnnnnnnnnnnnnnnnnnnnnnnnnnnnnnnnnnnnnnnnnnnnnnnnnnnnnnnnnnnnnnnnnnnnnnnnnnnnnnnnnnnnnnnnnnnnnnnnnnnnnnnnnnnnnnnnnnnnnnnnnnnnnnnnnnnnnnnnnnnnnnnnnnnnnnnnnnnnnnnnnnnnnnnnnnnnnnnnnnnnnnnnnnnnnnnnnnnnnnnnnnnnnnnnnnnnnnnnnnnnnnnnnnnnnnnnnnnnnnnnnnnnnnnnnnnnnnnnnnnnnnnnnnnnnnnnnnnnnnnnnnnnnnnnnnnnnnnnnnnnnnnnnnnnnnnnnnnnnnnnnnnnnnnnnnnnnnnnnnnnnnnnnnnnnnnnnnnnnnnnnnnnnnnnnnnnnnnnnnnnnnnnnnnnnnnnnnnnnnnnnnnnnnnnnnnnnnnnnnnnnnnnnnnnnnnnnnnnnnnnnnnnnnnnnnnnnnnnnnnnnnnnnnnnnnnnnnnnnnnnnnnnnnnnnnnnnnnnnnnnnnnnnnnnnnnnnnnnnnnnnnnnnnnnnnnnnnnnnnnnnnnnnnnnnnnnnnnnnnnnnnnnnnnnnnnnnnnnnnnnnnnnnnnnnnnnnnnnnnnnnnnnnnnnnnnnnnnnnnnnnnnnnnnnnnnnnnnnnnnnnnnnnnnnnnnnnnnnnnnnnnnnnnnnnnnnnnnnnnnnnnnnnnnnnnnnnnnnnnnnnnnnnnnnnnnnnnnnnnnnnnnnnnnnnnnnnnnnnnnnnnnnnnnnnnnnnnnnnnnnnnnnnnnnnnnnnnnnnnnnnnnnnnnnnnnnnnnnnnnnnnnnnnnnnnnnnnnnnnnnnnnnnnnnnnnnnnnnnnnnnnnnnnnnnnnnnnnnnnnnnnnnnnnnnnnnnnnnnnnnnnnnnnnnnnnnnnnnnnnnnnnnnnnnnnnnnnnnnnnnnnnnnnnnnnnnnnnnnnnnnnnnnnnnnnnnnnnnnnnnnnnnnnnnnnnnnnnnnnnnnnnnnnnnnnnnnnnnnnnnnnnnnnnnnnnnnnnnnnnnnnnnnnnnnnnnnnnnnnnnnnnnnnnnnnnnnnnnnnnnnnnnnnnnnnnnnnnnnnnnnnnnnnnnnnnnnnnnnnnnnnnnnnnnnnnnnnnnnnnnnnnnnnnnnnnnnnnnnnnnnnnnnnnnnatccccaaggcgccatacggccccccagtcgaagtggatggacagcaacttacccattacctagacagtcgcgtggtcgccgtgcggcgcatctgccaggggctgcatcgcggtttgcgcacctcggatgcccattgcacgctgatccttcaagatcctcgctgtcgtcggcccgagctgatggaagccatcccttcaaggttcaagggagcgctgatcagtgccatggaaggcgaagttgaggcggccctgcgcaatgagcgtgagcgacatagacccttcaggaccctggcgctcaagcactatggatgccagtgcatgtggcatgagggctgcgatgtcaaagcgccttatttgctggatgtgcatcaccgcgatcccgtctcagaaggggtgcgccgcaccgctctgcaagacctgatggttctttgtaaaaaccaccatgctgaagcccatcagcagatgcggctactcattttcaatggaggagattcaacaaaaattgatgatggatcaatgatttagcgaacatcgatgcaagctgccctttgtcggggcagctactagaacgagcatcacctcacccgggctgtgcctgacatgcaagctgccctttgtcggggcagctactagaactcgtaggtgtagttcgtcttcgggtagtcgatgcaagctgccttttgtcggggcagctactagaacgagacagccactacatcgatgaagctgaacatgcaagctgccctttgtcggagcagctactagaatgaaaccgcagtgcaggagtaagcccccatgatgcaagctgccctttgtcggggcagctactagaaccgccgcaagttcgacgccaacaagctccaaatgcaagctgccctttgtcggggcagctactagaactagtcgcaggcgcgcagctcccggccctcgatgcaagcagccctttgtcggggcagctactagaacagcacgccctggcttgtgccgctcacgaacatgcaagctgccctttgtcggggcagctactagaaccagcggcgcagcttgcccgagtcgtccagcatgcaagctgccctttgtcggggcagctactagaactacaccttgctggctgctgctgtgggcacgatgcaagctgccctttgtcggagcagctactagaaccaaacaggtcttgcgcctggttcgtgatgaatgcaagctgccctttgtcggggcagctactagaactagtgcacgcgaaacgctgcgggtttgctcatgcaagctgccctttgtcggggcagctactagaacagcaccgatcaggctttcgctgatgccgagatgcaagctgcccattgtcggggcagctactagaacttgggcaagttggtccagcggcttggttttatgcaagctgccctttgtcggggcagctactagaacaccggacgcggccggtattcgacgccgtagatgcaagctgccctttgtcggggcagctactagaaccgggaaactctgcggttggtggctgaaagatgcaagctgccctttgacggggcagctactagaacctggccctgctgctggctgcgctgcctgacatgcaagctgccctttgtcggggcagctactagaacatggcggggtggcatgtgatcgtctgcccgatgcaagctgccctttgtcgaggcagctactagaactacggtgtgtcgatgtcgccgcgaacggccaatgcaagctgccctttgtcggggcagctactagaaccaggaatttctcgacacgatgcaaggtctgatgcaagcagccctttgtcggggcagctactagaacgacatcgagcgtgaggccgctcgcacggtaatgcaagctgccctttgtcggggcagctactagaacaggttgtagttgttgtcggcctgcgtgtagatgcaagctgccctttgtcggagcagctactagaagactatggaagtggtggcggaagattggggcatgcaagctgtcctttgtcggggcagctactagaacttcgtgtacgtcatggaagagttcgccaagatgtaagctgcctcttgtcggtgcagctactagaacgtagctcaactggatagagcaccagcctcatgcaagctgccctttgtcggggcagctactagaacttcaaccccgcgcaaaacggtgcccgctcgatgcaagctgacctttgtcggggcagctactagaactccacggcctgggcctagtagttgacctgcacgcaagctgccttttatcggggcagctactagaactagcatgccggcaccgttggggtgatggggatgtaagctgccctttgtcggggcagctactagaactgggatgtgggcggcgagggcgacccgattatgcaagctgccctttgtggggcagttactagaacgggtggatgaggttatcggcctggtcggccatgcaagctgccctttgtcggggcagttactaaagcgtgcagttgtaatactggctgtggaggaagtgcaagcagcccctgtcggggtagatgcgacttttgaaaactggtcagaaactgcgcgcaactacgttgggcttgcaccccgtctggcgtacctgcgaaagaggggtatgggggagggagtccgtccccctctgaattcagtttccgtttttggctttttctatgagccctgggctgcatgcgtcagcgtagctgacgctggcccatacggaaaccctgacctcaatagtgcccagctcgccctaggtagaaagtgttgatggtggctgtacggaattcacttgatttccgtatagtgaccgggcacgatcctgagccaccaactcagggagtccacatgactaagcgaagtcgccagctcagggtcgcgctgtatgcgcgggtgtccaccgacaagcaatccacggagaaccagctgcaagagctgcggcatgccgctgagcgtttgggttggcaggtggttgatgagttcgtggatcgaggcatcagcggggccaaagggcgcaaggatcgcccgcagctcgatgcgttgctgaagggcgtggcccgcaaggagtttgatgtggtcggtgcctggtcggtggatcgactgtgtcgctcactgatcgatctggtcaacatgctgcaagagctgcacgcgacaggcgttgacttgtacctgcatcagcaaggtatcaacaccaccacaccggcggggcgagcgatcttcgggatgatgggcgtcttcgcagagtttgagcgagctttgattcaggagcggattaaggccggattgcagcgtgccagaaaactgggtaccaaatccggcaatgccattggtcggccgcgtgcttcacccgacgtggaggctcgaattcacgaactgcgagcaaccggcctgggtatggtgaagatcgcagctcaggttggctgcggagtctcggtggtgcagcgcgtgttgcacgattcgtagctcgaccctagggcctttgtgtggctccctatatccgcaacacaagagcaagtgttggtgtttgctaacttaaatgcaagcggtttgactgcaaactttgggtgcatcaagtccgaaatgctgggctagaaaactggatgtgatgacgctgcctgaattttgctgctcgcggtggcttgctgggtgaaaccgaaacccgaaggcgcgaatgctggtgttctacacgcgtctgcagtgatttctgcggcttttaggcgcttcaattgggcagccatggatttgatcaaaggcttgcccgccggtatgaagagccgcgctgacaaggcctgcttcgaatcatgcaactttgaagcggccgcagcttcgccaatggcagttttaactgtgggtgctacataaactgaacttatgacgcgcacttggggaggagggggcaataacgctggttcgttgcgttatgttttgggatgctgcccttcaattggcaattctgggcgctccgagagtatcaagtctggagcgcacttggcttgcttacttcaccgaattaacacgacaagatagattgaacagtctttgtgctcgggcagcgaaccgaagaaaaggagaagccatcacgcctgtctgaccgaattgcatgaccttgaattcgtacatagccattgtttgggtaagtcacggctacaaggccactcatgcttcccgtgccaaatcgacagcccgtacctgagctcgtgccggataggttggcaatttgccccgtgtttgcgccatttgagaacttgactgcgcccgagaactggcagtttgcattgattgcgaccttgatcgattggctggagtcgatgctcaccgtcaaggtgctgttcatctcatcactggcgttccacgttcccttggcgtcagctgctcctgtcgcaagtgtcatgtattcgctgaacttcaattcaaagtttgatgggccactggcatagattgccgaaccggagaggcccactccagggcggtattgcccgctgatcgagcctgaggaaactcctgcttgcgagtagtcagaagtggtgccgttgaactgtccgccgtcgccagatacaagcccgtcgacaaagccacgagatgagccaaatgcatcttcatagtagatggcaaatcttccgtccggagagacaactaggtcttggaagatgggtagacgtcccgtggttactttgcctttgtatcgaccgacggcttgaatgtccattcccttgggctgactgacagaaccggcattcgatgagttggtcgcccccccgtcgctgccgccgccaccgcatcccgcgattgacagcatcaaacccagcgaacaagctgcttttttgatcatcatttctccctcaatttaatgagttatttttgggagcgagatgttcgccatccttcccttgtcggtcaagtcctttcgtttgatgaggcttccttttttctcgggcacttagggaaataacggcgatgggctgcggggctggcttgagttggatgaccgcgatggcagagcggggggtgcgcttaacttattgatcaatgagctggcagggcgccgcgcttagggtggtagcgcaattcgagtaccggtcggccgctgaactttgccctcgggagatgttgtgccgttcgctgcttcggacggctgccatgttgatgctcggttttctaactggcgtcggtagctgcatgcgtagtcgctgaagtcgcgcttgatgttcgccagttcggggcgttggatggtgacttcctcgcagggcttgcggtcacttggggagtgcggtgcacatgcagaatgcctcacctatcttggcgcccatcacctggggtagcatccaactgaggcagcctgttgctgagattgctccgtgtttggaacgcggcaggaggctcagcaatctggttgcctctactcttttgggtcttcaaagtgtgggaatgcctgtgctcgacgtgacctgcttccggtggttgggtgtgcgtggagcagcgtggtcactgcgaatcctctgccgtacatcaatggctgcatgcggactacatgcttatggcaagggcgttttcgcagagtttgagcgggccttgattcaagagcgaatcagggcagggctggctctggccaggaagtcgggcacaaagacaggcctcgccattggtcgccccaaggcctcagctgaaatcgagagcaggatccgcgaactgcgagcccaggggattggcataaagaagattgcttcccaggtgcctcgtggcgtgtctgtggtgcaaaggttactcgcaggccacgaattaaagacgtaaagcgggcacctgtagtgggtagctgcgccaccatcatgtcagggattgtcagtgataactaacctttatgcaacgcagatcggtgtgcttggcctgtcccggattctttgatattgcgcgaacttgtcgtacgcttgcagctcgttcgtcgcaaaatttgccttcacacggcaggggtcgcaggttcgaaccctgcaccgcccaccaagcctgaaagcccctcaagtcatgcgcttgcggggctttttctttgccccagcgttgcgatggcttgagctgctctcggccgctcggcttagagcggatagagtggaggttttcaacgcagcggccctggacgaggggagacgagtgaagcctcagaagaacatgatgatcaagcgcagagtttgtttgacggccggtgctcgagtggcggctttgcgcttgggtggaggtgccctggctgaattggcctgcgcgcaagcgccaactcccggtgcaggtcgagccgcattcgatgccaagaccatgaacgaggccttgaaggccttgggctatgcggcgccagtcgaaagccgtgatatgagcatccaggcccctgatattgccgaagatggcgcctccgtggccgtgtcagccgcttgcagccttgccggtgtcaagcaagtcatgttcttgcttgacggtgcaccgacggccttggccgccgtgttcaatttgggtgcggaacttgaggccgaggcgtccacgcgtttgcggctggcgcgcagttcggtggtgtttgccgtggccatcacacaggacaagaaggtcttgtttgcgcagaaggaagtcaaggtcgccatgggtgcttgcggtgccgatgcgaaaccggcccgaggcttgcgggcggacggtgtcagcggtgcgccggtccggtgctgagatcaggagagacattcccatggcaagtccgattcgaatccgcctgcgattgagtggcgacaagctcgctgtgcgagtggcgatcacgcatgaaatggaaagtggcctgcggcttgatgctgccggcaagaccatcgcg

SEQ ID NO: 70 - DNA, 16833 bp, Artificial Sequence; identical to SEQ ID NO: 69
  Synthetic Oligonucleotide
  misc_feature (1)..(9999): n is a, c, g, or t

SEQ ID NO: 71 - DNA, 16739 bp, Artificial Sequence
  Synthetic Oligonucleotide
  misc_feature (1)..(9998): n is a, c, g, or t
nnnnnnnnnnnnnnnnnnnnnnnnnnnnnnnnnnnnnnnnnnnnnnnnnnnnnnnnnnnnnnnnnnnnnnnnnnnnnnnnnnnnnnnnnnnnnnnnnnnnnnnnnnnnnnnnnnnnnnnnnnnnnnnnnnnnnnnnnnnnnnnnnnnnnnnnnnnnnnnnnnnnnnnnnnnnnnnnnnnnnnnnnnnnnnnnnnnnnnnnnnnnnnnnnnnnnnnnnnnnnnnnnnnnnnnnnnnnnnnnnnnnnnnnnnnnnnnnnnnnnnnnnnnnnnnnnnnnnnnnnnnnnnnnnnnnnnnnnnnnnnnnnnnnnnnnnnnnnnnnnnnnnnnnnnnnnnnnnnnnnnnnnnnnnnnnnnnnnnnnnnnnnnnnnnnnnnnnnnnnnnnnnnnnnnnnnnnnnnnnnnnnnnnnnnnnnnnnnnnnnnnnnnnnnnnnnnnnnnnnnnnnnnnnnnnnnnnnnnnnnnnnnnnnnnnnnnnnnnnnnnnnnnnnnnnnnnnnnnnnnnnnnnnnnnnnnnnnnnnnnnnnnnnnnnnnnnnnnnnnnnnnnnnnnnnnnnnnnnnnnnnnnnnnnnnnnnnnnnnnnnnnnnnnnnnnnnnnnnnnnnnnnnnnnnnnnnnnnnnnnnnnnnnnnnnnnnnnnnnnnnnnnnnnnnnnnnnnnnnnnnnnnnnnnnnnnnnnnnnnnnnnnnnnnnnnnnnnnnnnnnnnnnnnnnnnnnnnnnnnnnnnnnnnnnnnnnnnnnnnnnnnnnnnnnnnnnnnnnnnnnnnnnnnnnnnnnnnnnnnnnnnnnnnnnnnnnnnnnnnnnnnnnnnnnnnnnnnnnnnnnnnnnnnnnnnnnnnnnnnnnnnnnnnnnnnnnnnnnnnnnnnnnnnnnnnnnnnnnnnnnnnnnnnnnnnnnnnnnnnnnnnnnnnnnnnnnnnnnnnnnnnnnnnnnnnnnnnnnnnnnnnnnnnnnnnnnnnnnnnnnnnnnnnnnnnnnnnnnnnnnnnnnnnnnnnnnnnnnnnnnnnnnnnnnnnnnnnnnnnnnnnnnnnnnnnnnnnnnnnnnnnnnnnnnnnnnnnnnnnnnnnnnnnnnnnnnnnnnnnnnnnnnnnnnnnnnnnnnnnnnnnnnnnnnnnnnnnnnnnnnnnnnnnnnnnnnnnnnnnnnnnnnnnnnnnnnnnnnnnnnnnnnnnnnnnnnnnnnnnnnnnnnnnnnnnnnnnnnnnnnnnnnnnnnnnnnnnnnnnnnnnnnnnnnnnnnnnnnnnnnnnnnnnnnnnnnnnnnnnnnnnnnnnnnnnnnnnnnnnnnnnnnnnnnnnnnnnnnnnnnnnnnnnnnnnnnnnnnnnnnnnnnnnnnnnnnnnnnnnnnnnnnnnnnnnnnnnnnnnnnnnnnnnnnnnnnnnnnnnnnnnnnnnnnnnnnnnnnnnnnnnnnnnnnnnnnnnnnnnnnnnnnnnnnnnnnnnnnnnnnnnnnnnnnnnnnnnnnnnnnnnnnnnnnnnnnnnnnnnnnnnnnnnnnnnnnnnnnnnnnnnnnnnnnnnnnnnnnnnnnnnnnnnnnnnnnnnnnnnnnnnnnnnnnnnnnnnnnnnnnnnnnnnnnnnnnnnnnnnnnnnnnnnnnnnnnnnnnnnnnnnnnnnnnnnnnnnnnnnnnnnnnnnnnnnnnnnnnnnnnnnnnnnnnnnnnnnnnnnnnnnnnnnnnnnnnnnnnnnnnnnnnnnnnnnnnnnnnnnnnnnnnnnnnnnnnnnnnnnnnnnnnnnnnnnnnnnnnnnnnnnnnnnnnnnnnnnnnnnnnnnnnnnnnnnnnnnnnnnnnnnnnnnnnnnnnnnnnnnnnnnnnnnnnnnnnnnnnnnnnnnnnnnnnnnnnnnnnnnnnnnnnnnnnnnnnnnnnnnnnnnnnnnnnnnnnnnnnnnnnnnnnnnnnnnnnnnnnnnnnnnnnnnnnnnnnnnnnnnnnnnnnnnnnnnnnnnnnnnnnnnnnnnnnnnnnnnnnnnnnnnnnnnnnnnnnnnnnnnnnnnnnnnnnnnnnnnnnnnnnnnnnnnnnnnnnnnnnnnnnnnnnnnnnnnnnnnnnnnnnnnnnnnnnnnnnnnnnnnnnnnnnnnnnnnnnnnnnnnnnnnnnnnnnnnnnnnnnnnnnnnnnnnnnnnnnnnnnnnnnnnnnnnnnnnnnnnnnnnnnnnnnnnnnnnnnnnnnnnnnnnnnnnnnnnnnnnnnnnnnnnnnnnnnnnnnnnnnnnnnnnnnnnnnnnnnnnnnnnnnnnnnnnnnnnnnnnnnnnnnnnnnnnnnnnnnnnnnnnnnnnnnnnnnnnnnnnnnnnnnnnnnnnnnnnnnnnnnnnnnnnnnnnnnnnnnnnnnnnnnnnnnnnnnnnnnnnnnnnnnnnnnnnnnnnnnnnnnnnnnnnnnnnnnnnnnnnnnnnnnnnnnnnnnnnnnnnnnnnnnnnnnnnnnnnnnnnnnnnnnnnnnnnnnnnnnnnnnnnnnnnnnnnnnnnnnnnnnnnnnnnnnnnnnnnnnnnnnnnnnnnnnnnnnnnnnnnnnnnnnnnnnnnnnnnnnnnnnnnnnnnnnnnnnnnnnnnnnnnnnnnnnnnnnnnnnnnnnnnnnnnnnnnnnnnnnnnnnnnnnnnnnnnnnnnnnnnnnnnnnnnnnnnnnnnnnnnnnnnnnnnnnnnnnnnnnnnnnnnnnnnnnnnnnnnnnnnnnnnnnnnnnnnnnnnnnnnnnnnnnnnnnnnnnnnnnnnnnnnnnnnnnnnnnnnnnnnnnnnnnnnnnnnnnnnnnnnnnnnnnnnnnnnnnnnnnnnnnnnnnnnnnnnnnnnnnnnnnnnnnnnnnnnnnnnnnnnnnnnnnnnnnnnnnnnnnnnnnnnnnnnnnnnnnnnnnnnnnnnnnnnnnnnnnnnnnnnnnnnnnnnnnnnnnnnnnnnnnnnnnnnnnnnnnnnnnnnnnnnnnnnnnnnnnnnnnnnnnnnnnnnnnnnnnnnnnnnnnnnnnnnnnnnnnnnnnnnnnnnnnnnnnnnnnnnnnnnnnnnnnnnnnnnnnnnnnnnnnnnnnnnnnnnnnnnnnnnnnnnnnnnnnnnnnnnnnnnnnnnnnnnnnnnnnnnnnnnnnnnnnnnnnnnnnnnnnnnnnnnnnnnnnnnnnnnnnnnnnnnnnnnnnnnnnnnnnnnnnnnnnnnnnnnnnnnnnnnnnnnnnnnnnnnnnnnnnnnnnnnnnnnnnnnnnnnnnnnnnnnnnnnnnnnnnnnnnnnnnnnnnnnnnnnnnnnnnnnnnnnnnnnnnnnnnnnnnnnnnnnnnnnnnnnnnnnnnnnnnnnnnnnnnnnnnnnnnnnnnnnnnnnnnnnnnnnnnnnnnnnnnnnnnnnnnnnnnnnnnnnnnnnnnnnnnnnnnnnnnnnnnnnnnnnnnnnnnnnnnnnnnnnnnnnnnnnnnnnnnnnnnnnnnnnnnnnnnnnnnnnnnnnnnnnnnnnnnnnnnnnnnnnnnnnnnnnnnnnnnnnnnnnnnnnnnnnnnnnnnnnnnnnnnnnnnnnnnnnnnnnnnnnnnnnnnnnnnnnnnnnnnnnnnnnnnnnnnnnnnnnnnnnnnnnnnnnnnnnnnnnnnnnnnnnnnnnnnnnnnnnnnnnnnnnnnnnnnnnnnnnnnnnnnnnnnnnnnnnnnnnnnnnnnnnnnnnnnnnnnnnnnnnnnnnnnnnnnnnnnnnnnnnnnnnnnnnnnnnnnnnnnnnnnnnnnnnnnnnnnnnnnnnnnnnnnnnnnnnnnnnnnnnnnnnnnnnnnnnnnnnnnnnnnnnnnnnnnnnnnnnnnnnnnnnnnnnnnnnnnnnnnnnnnnnnnnnnnnnnnnnnnnnnnnnnnnnnnnnnnnnnnnnnnnnnnnnnnnnnnnnnnnnnnnnnnnnnnnnnnnnnnnnnnnnnnnnnnnnnnnnnnnnnnnnnnnnnnnnnnnnnnnnnnnnnnnnnnnnnnnnnnnnnnnnnnnnnnnnnnnnnnnnnnnnnnnnnnnnnnnnnnnnnnnnnnnnnnnnnnnnnnnnnnnnnnnnnnnnnnnnnnnnnnnnnnnnnnnnnnnnnnnnnnnnnnnnnnnnnnnnnnnnnnnnnnnnnnnnnnnnnnnnnnnnnnnnnnnnnnnnnnnnnnnnnnnnnnnnnnnnnnnnnnnnnnnnnnnnnnnnnnnnnnnnnnnnnnnnnnnnnnnnnnnnnnnnnnnnnnnnnnnnnnnnnnnnnnnnnnnnnnnnnnnnnnnnnnnnnnnnnnnnnnnnnnnnnnnnnnnnnnnnnnnnnnnnnnnnnnnnnnnnnnnnnnnnnnnnnnnnnnnnnnnnnnnnnnnnnnnnnnnnnnnnnnnnnnnnnnnnnnnnnnnnnnnnnnnnnnnnnnnnnnnnnnnnnnnnnnnnnnnnnnnnnnnnnnnnnnnnnnnnnnnnnnnnnnnnnnnnnnnnnnnnnnnnnnnnnnnnnnnnnnnnnnnnnnnnnnnnnnnnnnnnnnnnnnnnnnnnnnnnnnnnnnnnnnnnnnnnnnnnnnnnnnnnnnnnnnnnnnnnnnnnnnnnnnnnnnnnnnnnnnnnnnnnnnnnnnnnnnnnnnnnnnnnnnnnnnnnnnnnnnnnnnnnnnnnnnnnnnnnnnnnnnnnnnnnnnnnnnnnnnnnnnnnnnnnnnnnnnnnnnnnnnnnnnnnnnnnnnnnnnnnnnnnnnnnnnnnnnnnnnnnnnnnnnnnnnnnnnnnnnnnnnnnnnnnnnnnnnnnnnnnnnnnnnnnnnnnnnnnnnnnnnnnnnnnnnnnnnnnnnnnnnnnnnnnnnnnnnnnnnnnnnnnnnnnnnnnnnnnnnnnnnnnnnnnnnnnnnnnnnnnnnnnnnnnnnnnnnnnnnnnnnnnnnnnnnnnnnnnnnnnnnnnnnnnnnnnnnnnnnnnnnnnnnnnnnnnnnnnnnnnnnnnnnnnnnnnnnnnnnnnnnnnnnnnnnnnnnnnnnnnnnnnnnnnnnnnnnnnnnnnnnnnnnnnnnnnnnnnnnnnnnnnnnnnnnnnnnnnnnnnnnnnnnnnnnnnnnnnnnnnnnnnnnnnnnnnnnnnnnnnnnnnnnnnnnnnnnnnnnnnnnnnnnnnnnnnnnnnnnnnnnnnnnnnnnnnnnnnnnnnnnnnnnnnnnnnnnnnnnnnnnnnnnnnnnnnnnnnnnnnnnnnnnnnnnnnnnnnnnnnnnnnnnnnnnnnnnnnnnnnnnnnnnnnnnnnnnnnnnnnnnnnnnnnnnnnnnnnnnnnnnnnnnnnnnnnnnnnnnnnnnnnnnnnnnnnnnnnnnnnnnnnnnnnnnnnnnnnnnnnnnnnnnnnnnnnnnnnnnnnnnnnnnnnnnnnnnnnnnnnnnnnnnnnnnnnnnnnnnnnnnnnnnnnnnnnnnnnnnnnnnnnnnnnnnnnnnnnnnnnnnnnnnnnnnnnnnnnnnnnnnnnnnnnnnnnnnnnnnnnnnnnnnnnnnnnnnnnnnnnnnnnnnnnnnnnnnnnnnnnnnnnnnnnnnnnnnnnnnnnnnnnnnnnnnnnnnnnnnnnnnnnnnnnnnnnnnnnnnnnnnnnnnnnnnnnnnnnnnnnnnnnnnnnnnnnnnnnnnnnnnnnnnnnnnnnnnnnnnnnnnnnnnnnnnnnnnnnnnnnnnnnnnnnnnnnnnnnnnnnnnnnnnnnnnnnnnnnnnnnnnnnnnnnnnnnnnnnnnnnnnnnnnnnnnnnnnnnnnnnnnnnnnnnnnnnnnnnnnnnnnnnnnnnnnnnnnnnnnnnnnnnnnnnnnnnnnnnnnnnnnnnnnnnnnnnnnnnnnnnnnnnnnnnnnnnnnnnnnnnnnnnnnnnnnnnnnnnnnnnnnnnnnnnnnnnnnnnnnnnnnnnnnnnnnnnnnnnnnnnnnnnnnnnnnnnnnnnnnnnnnnnnnnnnnnnnnnnnnnnnnnnnnnnnnnnnnnnnnnnnnnnnnnnnnnnnnnnnnnnnnnnnnnnnnnnnnnnnnnnnnnnnnnnnnnnnnnnnnnnnnnnnnnnnnnnnnnnnnnnnnnnnnnnnnnnnnnnnnnnnnnnnnnnnnnnnnnnnnnnnnnnnnnnnnnnnnnnnnnnnnnnnnnnnnnnnnnnnnnnnnnnnnnnnnnnnnnnnnnnnnnnnnnnnnnnnnnnnnnnnnnnnnnnnnnnnnnnnnnnnnnnnnnnnnnnnnnnnnnnnnnnnnnnnnnnnnnnnnnnnnnnnnnnnnnnnnnnnnnnnnnnnnnnnnnnnnnnnnnnnnnnnnnnnnnnnnnnnnnnnnnnnnnnnnnnnnnnnnnnnnnnnnnnnnnnnnnnnnnnnnnnnnnnnnnnnnnnnnnnnnnnnnnnnnnnnnnnnnnnnnnnnnnnnnnnnnnnnnnnnnnnnnnnnnnnnnnnnnnnnnnnnnnnnnnnnnnnnnnnnnnnnnnnnnnnnnnnnnnnnnnnnnnnnnnnnnnnnnnnnnnnnnnnnnnnnnnnnnnnnnnnnnnnnnnnnnnnnnnnnnnnnnnnnnnnnnnnnnnnnnnnnnnnnnnnnnnnnnnnnnnnnnnnnnnnnnnnnnnnnnnnnnnnnnnnnnnnnnnnnnnnnnnnnnnnnnnnnnnnnnnnnnnnnnnnnnnnnnnnnnnnnnnnnnnnnnnnnnnnnnnnnnnnnnnnnnnnnnnnnnnnnnnnnnnnnnnnnnnnnnnnnnnnnnnnnnnnnnnnnnnnnnnnnnnnnnnnnnnnnnnnnnnnnnnnnnnnnnnnnnnnnnnnnnnnnnnnnnnnnnnnnnnnnnnnnnnnnnnnnnnnnnnnnnnnnnnnnnnnnnnnnnnnnnnnnnnnnnnnnnnnnnnnnnnnnnnnnnnnnnnnnnnnnnnnnnnnnnnnnnnnnnnnnnnnnnnnnnnnnnnnnnnnnnnnnnnnnnnnnnnnnnnnnnnnnnnnnnnnnnnnnnnnnnnnnnnnnnnnnnnnnnnnnnnnnnnnnnnnnnnnnnnnnnnnnnnnnnnnnnnnnnnnnnnnnnnnnnnnnnnnnnnnnnnnnnnnnnnnnnnnnnnnnnnnnnnnnnnnnnnnnnnnnnnnnnnnnnnnnnnnnnnnnnnnnnnnnnnnnnnnnnnnnnnnnnnnnnnnnnnnnnnnnnnnnnnnnnnnnnnnnnnnnnnnnnnnnnnnnnnnnnnnnnnnnnnnnnnnnnnnnnnnnnnnnnnnnnnnnnnnnnnnnnnnnnnnnnnnnnnnnnnnnnnnnnnnnnnnnnnnnnnnnnnnnnnnnnnnnnnnnnnnnnnnnnnnnnnnnnnnnnnnnnnnnnnnnnnnnnnnnnnnnnnnnnnnnnnnnnnnnnnnnnnnnnnnnnnnnnnnnnnnnnnnnnnnnnnnnnnnnnnnnnnnnnnnnnnnnnnnnnnnnnnnnnnnnnnnnnnnnnnnnnnnnnnnnnnnnnnnnnnnnnnnnnnnnnnnnnnnnnnnnnnnnnnnnnnnnnnnnnnnnnnnnnnnnnnnnnnnnnnnnnnnnnnnnnnnnnnnnnnnnnnnnnnnnnnnnnnnnnnnnnnnnnnnnnnnnnnnnnnnnnnnnnnnnnnnnnnnnnnnnnnnnnnnnnnnnnnnnnnnnnnnnnnnnnnnnnnnnnnnnnnnnnnnnnnnnnnnnnnnnnnnnnnnnnnnnnnnnnnnnnnnnnnnnnnnnnnnnnnnnnnnnnnnnnnnnnnnnnnnnnnnnnnnnnnnnnnnnnnnnnnnnnnnnnnnnnnnnnnnnnnnnnnnnnnnnnnnnnnnnnnnnnnnnnnnnnnnnnnnnnnnnnnnnnnnnnnnnnnnnnnnnnnnnnnnnnnnnnnnnnnnnnnnnnnnnnnnnnnnnnnnnnnnnnnnnnnnnnnnnnnnnnnnnnnnnnnnnnnnnnnnnnnnnnnnnnnnnnnnnnnnnnnnnnnnnnnnnnnnnnnnnnnnnnnnnnnnnnnnnnnnnnnnnnnnnnnnnnnnnnnnnnnnnnnnnnnnnnnnnnnnnnnnnnnnnnnnnnnnnnnnnnnnnnnnnnnnnnnnnnnnnnnnnnnnnnnnnnnnnnnnnnnnnnnnnnnnnnnnnnnnnnnnnnnnnnnnnnnnnnnnnnnnnnnnnnnnnnnnnnnnnnnnnnnnnnnnnnnnnnnnnnnnnnnnnnnnnnnnnnnnnnnnnnnnnnnnnnnnnnnnnnnnnnnnnnnnnnnnnnnnnnnnnnnnnnnnnnnnnnnnnnnnnnnnnnnnnnnnnnnnnnnnnnnnnnnnnnnnnnnnnnnnnnnnnnnnnnnnnnnnnnnnnnnnnnnnnnnnnnnnnnnnnnnnnnnnnnnnnnnnnnnnnnnnnnnnnnnnnnnnnnnnnnnnnnnnnnnnnnnnnnnnnnnnnnnnnnnnnnnnnnnnnnnnnnnnnnnnnnnnnnnnnnnnnnnnnnnnnnnnnnnnnnnnnnnnnnnnnnnnnnnnnnnnnnnnnnnnnnnnnnnnnnnnnnnnnnnnnnnnnnnnnnnnnnnnnnnnnnnnnnnnnnnnnnnnnnnnnnnnnnnnnnnnnnnnnnnnnnnnnnnnnnnnnnnnnnnnnnnnnnnnnnnnnnnnnnnnnnnnnnnnnnnnnnnnnnnnnnnnnnnnnnnnnnnnnnnnnnnnnnnnnnnnnnnnnnnnnnnnnnnnnnnnnnnnnnnnnnnnnnnnnnnnnnnnnnnnnnnnnnnnnnnnnnnnnnnnnnnnnnnnnnnnnnnnnnnnnnnnnnnnnnnnnnnnnnnnnnnnnnnnnnnnnnnnnnnnnnnnnnnnnnnnnnnnnnnnnnnnnnnnnnnnnnnnnnnnnnnnnnnnnnnnnnnnnnnnnnnnnnnnnnnnnnnnnnnnnnnnnnnnnnnnnnnnnnnnnnnnnnnnnnnnnnnnnnnnnnnnnnnnnnnnnnnnnnnnnnnnnnnnnnnnnnnnnnnnnnnnnnnnnnnnnnnnnnnnnnnnnnnnnnnnnnnnnnnnnnnnnnnnnnnnnnnnnnnnnnnnnnnnnnnnnnnnnnnnnnnnnnnnnnnnnnnnnnnnnnnnnnnnnnnnnnnnnnnnnnnnnnnnnnnnnnnnnnnnnnnnnnnnnnnnnnnnnnnnnnnnnnnnnnnnnnnnnnnnnnnnnnnnnnnnnnnnnnnnnnnnnnnnnnnnnnnnnnnnnnnnnnnnnnnnnnnnnnnnnnnnnnnnnnnnnnnnnnnnnnnnnnnnnnnnnnnnnnnnnnnnnnnnnnnnnnnnnnnnnnnnnnnnnnnnnnnnnnnnnnnnnnnnnnnnnnnnnnnnnnnnnnnnnnnnnnnnnnnnnnnnnnnnnnnnnnnnnnnnnnnnnnnnnnnnnnnnnnnnnnnnnnnnnnnnnnnnnnnnnnnnnnnnnnnnnnnnnnnnnnnnnnnnnnnnnnnnnnnnnnnnnnnnnnnnnnnnnnnnnnnnnnnnnnnnnnnnnnnnnnnnnnnnnnnnnnnnnnnnnnnnnnnnnnnnnnnnnnnnnnnnnnnnnnnnnnnnnnnnnnnnnnnnnnnnnnnnnnnnnnnnnnnnnnnnnnnnnnnnnnnnnnnnnnnnnnnnnnnnnnnnnnnnnnnnnnnnnnnnnnnnnnnnnnnnnnnnnnnnnnnnnnnnnnnnnnnnnnnnnnnnnnnnnnnnnnnnnnnnnnnnnnnnnnnnnnnnnnnnnnnnnnnnnnnnnnnnnnnnnnnnnnnnnnnnnnnnnnnnnnnnnnnnnnnnnnnnnnnnnnnnnnnnnnnnnnnnnnnnnnnnnnnnnnnnnnnnnnnnnnnnnnnnnnnnnnnnnnnnnnnnnnnnnnnnnnnnnnnnnnnnnnnnnnnnnnnnnnnnnnnnnnnnnnnnnnnnnnnnnnnnnnnnnnnnnnnnnnnnnnnnnnnnnnnnnnnnnnnnnnnnnnnnnnnnnnnnnnnnnnnnnnnnnnnnnnnnnnnnnnnnnnnnnnnnnnnnnnnnnnnnnnnnnnnnnnnnnnnnnnnnnnnnnnnnnnnnnnnnnnnnnnnnnnnnnnnnnnnnnnnnnnnnnnnnnnnnnnnnnnnnnnnnnnnnnnnnnnnnnnnnnnnnnnnnnnnnnnnnnnnnnnnnnnnnnnnnnnnnnnnnnnnnnnnnnnnnnnnnnnnnnnnnnnnnnnnnnnnnnnnnnnnnnnnnnnnnnnnnnnnnnnnnnnnnnnnnnnnnnnnnnnnnnnnnnnnnnnnnnncctgccaggtcgcttattaaagaaaattagcaatcgcggtagcacggtgtttctttctgcaacgctgacctacaacgacaagtttgatgacttcaagatcgccatgggcctagacgcggtgagtagcctgtcaacaagcattgagccagaacagcatggcacgctcgacttcaccgtacacgcgcacgaggtggacacgcctgactggtttgcggccaccgttcagtgcatacaaagcgcgcagcgccccacgttggtggtcacacctagccatgacctcacagagcggctacaaaccgctgtgggtgagcaaacagacttgcttatacgtgcgggtgcatgggcgggtcttgacacgccaacgcgctggcgtaccgtggttattccgcgcgtgccatttggcgcaccagtcattgttgacggggtagcggtcacgtcttacttggccgccaaggtgacggctagtcggcggatgcgccaagcaattggccgtgggcttagaacacctgaggcggtgtgcacggttgtggttttggatgcgcgggcacacaacttaggtcgctttgtgccagagcgttttgcggcagattggtcgtctcggcaagtgtttgaggagggtgcccgccatgcggtggtgctgtccaaagcggagcgcgaccccgctttggccaaagccgcgctcagacactacggcgctcaatgccaacaagcgggttgttccgtgacagaggcgtgtcagctggacgtgcaccaccttgaccccgtaagcgaaggcgtgcgccgcacaaccttgaaggatgtgaccgtgctgtgtgcaaaccaccaccgacaggcccaccacgacatgaaaatggggctgaacgtgtcgtagcgcaacaaaaaacccgccatacctttgggtacgcgggttttgggagttctggcaaggcctgaaacctaaatgtggtggtgataggtggacttgaaccaccgaccccagcattatgaatgctgtgctctaaccaactgagctatatcaccgagcctgaaattatagccaaaattctcagggctttggcttgccgccaaaagtttttgttagccattttgtcgcgcctgtacgacgcgccaagcccttggttattggtgtttgaaggcgggtttgcgcttgtttatgaacgcatccatgccctctttttggtcttcggttgcaaacagcgcgtggaacagacggcgctcaaaacgcacgccttcgctgaggctgccttcaaacgcttggttcaccgcttcctttgccgccatgacactggggagggagtagttgcaaatcatcagggctgcccccaaggcctcggtcatgagttggtcatcggcgaccacgcggctcaccagtccgccgcgctcggcttctgcggcgtccatcatgcggcctgtgagggccatgtccatggccttggctttaccaacggcgcgtggcaggcgctgcgtgccacctgcgccggggataacgcccaacttgatttcgggttggccaaatttggcgctctcgctggcaatgatgacgtcgcacatcatggccaattcacaaccgccgccgagcgcaaaaccgctgacggcggcaataacgggcttgcgaacgctgcgaatggtttcccagttgcgcgtgatgtagtctgacttgtagacgtcagcaaaggtgtaggtggccatggcgccaatgtcggcacccgcggcaaaggctttttcactgcctgtgagcacaatgcagccaatgtccgggtcggcgtcgaatgcggttagcgccgcgccaagctcgtccattagcgcactgttgagggcattgagttgtttggggcggttgagggtgagtatgcccacgcggccttcggtgcggattaaaaccagttgctcactcatgtctgtgttctccaatgtggtgcgaaaagttgcttagaaaaagttgtttcgaaagttgcttcgacgtaagcggttgatcatagccaagcggtgagcttgctagggtctttcaccaccagttcggcgatctggttggcgtgggtcgatggccagatgagggggcacgacaacatgcggccatcgcgcgcgacaccggcaaccaatgggtgctgggctacgtcggcgtggcgtctcgcaatgttctccacatcgctcagtgacttcacccgccattgatcggtgccgtcaaatagcgtcacccattcgtcacccgccgccatgcccgcttgttcgcctgcaccgcctcttgccacgtgggtgatgcggatgccgtctcgctcaacgacacgcatgcccaagcgctgggcgagggtgccgctcttggccgccaccgcgacaccgtaatgactaagcagtgcgtgtaccggcaggtcttccgtgctgtgtacccagtgcgcgagttgtgtggcgacgttggcgtgcccttgctggttgagcagggcgtagatgtcggcctcactgatggtgccacctttgcttttgacccaaaggccgcgcatgagggtgtcgagatcgccgccttgttggcgcagcatgaggtcggtgcacagcgctattagcgcccctttggtgtagtagctaacggtggcgttgggcgtgttttcgccaatgcggtagtacttgacccacgcgtcatagctagactgggcaacgctttgcagatgccgccctggggtggccgcaacgtggttaatggatttggccagcagcgtgagataggtgggcgtatcaatgagtttggcgcgttgcagaaacaggtcatcgtagtagctggtaaagccttcaaagaaccacagcagctcggtgtagttctcttggttgaagtcgatgcttgcaaactcggatgggcgcagacgcttgacgttccatgtgtggaagtactcatggctaatgaggccaagtaattggttgtagccagcgccttgtgcatgggggggcgctgtctcgccagcaacggccgttaggggcaagtcggcacgctggcaaatgagtgcggtgctggcgatgtgctctagcccgccgtagccgttttcagtggcgtgaagcataaagacgtagcggtcaaagggtagttggcgttgcggttgtttgccgtgccaaaacgtgatctctgtttcgcaaattcggcgggtgtcggcaactaattttttgacatcaaacccgggcgcggtgtggttgccaatgcccgtgacaacgagttcatgcggtacgccagagaccttaaaccgactgacgtaaaaatcacccaaggtaaagggactgtcggcgagctcgccgtagttgcgggcggtgtagcgcccgaagccacgcgcgtcgatttgccgcgcgggcaatgcggtagacagccgccacgcattgaacgcgggcgcggtggggcgctcgacggagatggtttgtatctcgtcttcgcccccgaccacttgcaaacacaggctggtggggttgaagaagccgcgggtgttgtctaaaaaggcggttcgcaccgaggcgtcaaaggcgtagatttggtaattgagctccagcgggcgtttgccgtcggattcaactagccactcatttttactgcactgcgtgatttggcaaggcgtgcggccttgcttggctgtcagcgcttgcaggtgttgcgaaaactcacgcaccaaataactaccagcaatccaaacgggtagacgcaggcgctgttgcttttttgggcttgagatgcgcagatgcacaccgaacaggtgcgcttccgcgctgtcaacgcgaatgttgtgatcgatgcgcatggtgttacttgatggcggccagacgcttctcaacttcggcggcagaaatggcgccggggacacgtgtgccgtctgagaagaaaagggcaggcgtgcccgagatacggtgcttttgaccaaacgcgatgttgcggtcaagcgcgctggtgtcgcagctgatggcggcggcgctggtggttagagggacttcattcaccatccagtcttcaaaggctacgccggggtttttgtcgcaccaaatggccttggacttgagcgttgaatccgcgccgagtatggggtacaaaaagatatgcagggtgatgttgtcgacattcatcatgtcacgttcaaagcgcttgcagaagccacagttggggtcttcaaaaaccgcgagttgacgcttgccgttaccgcgtttgatggtgaaggcatctttaaagggcagggcctcaaagggtattgcgctcaatttatcgaggcgctcctgcgtcaggttgcgtttgcccttgaggtcaacgagtacgccttgcagcaaaaattcaccgttggcatcggtgtacaaaatttcggtttcaccaaagcgaacttcgtagaggccggccatgggggtcttggtgacgctgttgatagcgggtaagttgggtagttgcttgggtagcatctcgcgaatcttggcttcctgtgcccagcccatgcttgccatgagggtgaatgcgatgcccacggccaagccgcgcaataaagagcgtgtgggggtgggtgcgagaggtgacgtgtggtgaagcatggtgtggttcgctaggtaggcgttgtttgggggtaagagggtgggtgggttggttcgtgtgttcgcgggagggggcggttgggtagcagatgctcgctgttggagcaccatcgtggcaatcagttccccatgccaacacgctgtacccacgacttgagtgggcccatggcattaaagcccgacatgccggcattgcgtagccaactggcggcggggttgcggcccaaggggttgttgaacaagtgaaagagtccgtgcgtgacccattgcatgggttcggtggcggcgcgtcgacgccgttggtagcgctgaagcacgcgtgaggcacccggagactcacctcgggcgcgtgccgcaacgcagtcactgagcgtttgtacgtcggccaagccaaggttgagaccttgccctgcgagggggtggatggtgtgcgccgcatcgccggctaacgcggtctgctgggcaacccattgcgtggttaagccgacgctcaaggggaaggcaacaggcccgctggtaagggagaggtgccctagcgcgccctgactggcttgggtgagttggtcttctagggcggcggtttgggcggtggtctccatgtccagccacgtctggtgcgcagcgtctggtagcgaccagacaacggccaggtcgtgcccgtcagcgccgcccatgggcagcagggccaaaatatgtgtgccgttaaaccactggtgggcgacgccgccgtggctgtgctcggcgcgcatgcgcaacgccaaggcacggtgggggtagtgcttacttaccatgtcaatacccaaggcggtgcgcgcgataccgctcttgccttcgcaaatgatggtcaatgcgctaggcggtgtctgggctgatggtgacgcgtggtcgtcaaattgcacgcgtgcatggcgtgtgacggcttcggcaagatggtcctccaggacaggcacatcgaccatccacgccaagggttgcgcttgctgcgggggtgcgtcgaattgcagcgcgcctgacgcatcgccaaacacccgcatatgggtcatgggggtcagccacgcggcctgatcgtcttgaggccagacaccgcatgctttgagggtgtctctcgaggtgtggttgatggcgtaggcgcgaatgtcgcgggtgtgcggttgcgcttggggcgcgggcaggctgacggaaaagccttgctctgccaataacaatgccgccgcgtgcgcggtgatgccagcgcctaaaacggtgatgtgccctgattgagtcatggcgttattctattgggacacccacttggggggccagcgatgaccctgccccggaagtgccttaaactctgggtcttgctttttgaggattgtcatgagtttgaaatgcggcatcgttggtctgcccaacgtcggtaaatctaccctgtttaatgcgcttaccaaggctggtatcgccgctgagaactaccctttttgcaccatcgagcccaacgttggcgtggtggaggtgcccgacacccgcctagcgcagctcagcgatatcgtgacgcctgagcgcattgttcctgcgattgttgaatttgtggatattgccggcttggtggcaggtgccagtacgggcgagggcttgggtaacaagtttttggcccatatccgcgaaaccgatgccacggttaacgttgtgcgttgttttgaagatgacaacgtggtgcacgttgcgggcaaggtggatccgatttctgacattgaggtgattcaaacggagttgtgccttgccgacttaggcgcagtagagaaagccctgcaccgggtctccaagaccgcgcgttctggcgacaaagagtcggtgcgcttggtgtcgattttggagcgctgtcaggcggccttaaacgaaggcaagcctgttcgcacgctggatttcagcaaagaagaagcgccgctgcttaagcagtttttcttgattacggccaagccagcgatgttcgtcgcgaacgtgtctgaggatggctttgagaacaaccccctgcttgaccgcttaaccgcgtttgccaacgagcaaaacgcgcctgtggtggcgatctgcgccaagctagaggctgagatgagcgagatgagcgacgaggaccgcgatatgttcttggaagagctggggcagtccgagccgggcttaaaccgtctgatccgtgccgcctacagtttgttgggtttgcagacctacttc

SEQ ID NO: 72 - DNA, 16739 bp, Artificial Sequence; identical to SEQ ID NO: 71
  Synthetic Oligonucleotide
  misc_feature (1)..(9998): n is a, c, g, or t

SEQ ID NO: 73 - DNA, 16593 bp, Artificial Sequence
  Synthetic Oligonucleotide
  misc_feature (1)..(9997): n is a, c, g, or t
nnnnnnnnnnnnnnnnnnnnnnnnnnnnnnnnnnnnnnnnnnnnnnnnnnnnnnnnnnnnnnnnnnnnnnnnnnnnnnnnnnnnnnnnnnnnnnnnnnnnnnnnnnnnnnnnnnnnnnnnnnnnnnnnnnnnnnnnnnnnnnnnnnnnnnnnnnnnnnnnnnnnnnnnnnnnnnnnnnnnnnnnnnnnnnnnnnnnnnnnnnnnnnnnnnnnnnnnnnnnnnnnnnnnnnnnnnnnnnnnnnnnnnnnnnnnnnnnnnnnnnnnnnnnnnnnnnnnnnnnnnnnnnnnnnnnnnnnnnnnnnnnnnnnnnnnnnnnnnnnnnnnnnnnnnnnnnnnnnnnnnnnnnnnnnnnnnnnnnnnnnnnnnnnnnnnnnnnnnnnnnnnnnnnnnnnnnnnnnnnnnnnnnnnnnnnnnnnnnnnnnnnnnnnnnnnnnnnnnnnnnnnnnnnnnnnnnnnnnnnnnnnnnnnnnnnnnnnnnnnnnnnnnnnnnnnnnnnnnnnnnnnnnnnnnnnnnnnnnnnnnnnnnnnnnnnnnnnnnnnnnnnnnnnnnnnnnnnnnnnnnnnnnnnnnnnnnnnnnnnnnnnnnnnnnnnnnnnnnnnnnnnnnnnnnnnnnnnnnnnnnnnnnnnnnnnnnnnnnnnnnnnnnnnnnnnnnnnnnnnnnnnnnnnnnnnnnnnnnnnnnnnnnnnnnnnnnnnnnnnnnnnnnnnnnnnnnnnnnnnnnnnnnnnnnnnnnnnnnnnnnnnnnnnnnnnnnnnnnnnnnnnnnnnnnnnnnnnnnnnnnnnnnnnnnnnnnnnnnnnnnnnnnnnnnnnnnnnnnnnnnnnnnnnnnnnnnnnnnnnnnnnnnnnnnnnnnnnnnnnnnnnnnnnnnnnnnnnnnnnnnnnnnnnnnnnnnnnnnnnnnnnnnnnnnnnnnnnnnnnnnnnnnnnnnnnnnnnnnnnnnnnnnnnnnnnnnnnnnnnnnnnnnnnnnnnnnnnnnnnnnnnnnnnnnnnnnnnnnnnnnnnnnnnnnnnnnnnnnnnnnnnnnnnnnnnnnnnnnnnnnnnnnnnnnnnnnnnnnnnnnnnnnnnnnnnnnnnnnnnnnnnnnnnnnnnnnnnnnnnnnnnnnnnnnnnnnnnnnnnnnnnnnnnnnnnnnnnnnnnnnnnnnnnnnnnnnnnnnnnnnnnnnnnnnnnnnnnnnnnnnnnnnnnnnnnnnnnnnnnnnnnnnnnnnnnnnnnnnnnnnnnnnnnnnnnnnnnnnnnnnnnnnnnnnnnnnnnnnnnnnnnnnnnnnnnnnnnnnnnnnnnnnnnnnnnnnnnnnnnnnnnnnnnnnnnnnnnnnnnnnnnnnnnnnnnnnnnnnnnnnnnnnnnnnnnnnnnnnnnnnnnnnnnnnnnnnnnnnnnnnnnnnnnnnnnnnnnnnnnnnnnnnnnnnnnnnnnnnnnnnnnnnnnnnnnnnnnnnnnnnnnnnnnnnnnnnnnnnnnnnnnnnnnnnnnnnnnnnnnnnnnnnnnnnnnnnnnnnnnnnnnnnnnnnnnnnnnnnnnnnnnnnnnnnnnnnnnnnnnnnnnnnnnnnnnnnnnnnnnnnnnnnnnnnnnnnnnnnnnnnnnnnnnnnnnnnnnnnnnnnnnnnnnnnnnnnnnnnnnnnnnnnnnnnnnnnnnnnnnnnnnnnnnnnnnnnnnnnnnnnnnnnnnnnnnnnnnnnnnnnnnnnnnnnnnnnnnnnnnnnnnnnnnnnnnnnnnnnnnnnnnnnnnnnnnnnnnnnnnnnnnnnnnnnnnnnnnnnnnnnnnnnnnnnnnnnnnnnnnnnnnnnnnnnnnnnnnnnnnnnnnnnnnnnnnnnnnnnnnnnnnnnnnnnnnnnnnnnnnnnnnnnnnnnnnnnnnnnnnnnnnnnnnnnnnnnnnnnnnnnnnnnnnnnnnnnnnnnnnnnnnnnnnnnnnnnnnnnnnnnnnnnnnnnnnnnnnnnnnnnnnnnnnnnnnnnnnnnnnnnnnnnnnnnnnnnnnnnnnnnnnnnnnnnnnnnnnnnnnnnnnnnnnnnnnnnnnnnnnnnnnnnnnnnnnnnnnnnnnnnnnnnnnnnnnnnnnnnnnnnnnnnnnnnnnnnnnnnnnnnnnnnnnnnnnnnnnnnnnnnnnnnnnnnnnnnnnnnnnnnnnnnnnnnnnnnnnnnnnnnnnnnnnnnnnnnnnnnnnnnnnnnnnnnnnnnnnnnnnnnnnnnnnnnnnnnnnnnnnnnnnnnnnnnnnnnnnnnnnnnnnnnnnnnnnnnnnnnnnnnnnnnnnnnnnnnnnnnnnnnnnnnnnnnnnnnnnnnnnnnnnnnnnnnnnnnnnnnnnnnnnnnnnnnnnnnnnnnnnnnnnnnnnnnnnnnnnnnnnnnnnnnnnnnnnnnnnnnnnnnnnnnnnnnnnnnnnnnnnnnnnnnnnnnnnnnnnnnnnnnnnnnnnnnnnnnnnnnnnnnnnnnnnnnnnnnnnnnnnnnnnnnnnnnnnnnnnnnnnnnnnnnnnnnnnnnnnnnnnnnnnnnnnnnnnnnnnnnnnnnnnnnnnnnnnnnnnnnnnnnnnnnnnnnnnnnnnnnnnnnnnnnnnnnnnnnnnnnnnnnnnnnnnnnnnnnnnnnnnnnnnnnnnnnnnnnnnnnnnnnnnnnnnnnnnnnnnnnnnnnnnnnnnnnnnnnnnnnnnnnnnnnnnnnnnnnnnnnnnnnnnnnnnnnnnnnnnnnnnnnnnnnnnnnnnnnnnnnnnnnnnnnnnnnnnnnnnnnnnnnnnnnnnnnnnnnnnnnnnnnnnnnnnnnnnnnnnnnnnnnnnnnnnnnnnnnnnnnnnnnnnnnnnnnnnnnnnnnnnnnnnnnnnnnnnnnnnnnnnnnnnnnnnnnnnnnnnnnnnnnnnnnnnnnnnnnnnnnnnnnnnnnnnnnnnnnnnnnnnnnnnnnnnnnnnnnnnnnnnnnnnnnnnnnnnnnnnnnnnnnnnnnnnnnnnnnnnnnnnnnnnnnnnnnnnnnnnnnnnnnnnnnnnnnnnnnnnnnnnnnnnnnnnnnnnnnnnnnnnnnnnnnnnnnnnnnnnnnnnnnnnnnnnnnnnnnnnnnnnnnnnnnnnnnnnnnnnnnnnnnnnnnnnnnnnnnnnnnnnnnnnnnnnnnnnnnnnnnnnnnnnnnnnnnnnnnnnnnnnnnnnnnnnnnnnnnnnnnnnnnnnnnnnnnnnnnnnnnnnnnnnnnnnnnnnnnnnnnnnnnnnnnnnnnnnnnnnnnnnnnnnnnnnnnnnnnnnnnnnnnnnnnnnnnnnnnnnnnnnnnnnnnnnnnnnnnnnnnnnnnnnnnnnnnnnnnnnnnnnnnnnnnnnnnnnnnnnnnnnnnnnnnnnnnnnnnnnnnnnnnnnnnnnnnnnnnnnnnnnnnnnnnnnnnnnnnnnnnnnnnnnnnnnnnnnnnnnnnnnnnnnnnnnnnnnnnnnnnnnnnnnnnnnnnnnnnnnnnnnnnnnnnnnnnnnnnnnnnnnnnnnnnnnnnnnnnnnnnnnnnnnnnnnnnnnnnnnnnnnnnnnnnnnnnnnnnnnnnnnnnnnnnnnnnnnnnnnnnnnnnnnnnnnnnnnnnnnnnnnnnnnnnnnnnnnnnnnnnnnnnnnnnnnnnnnnnnnnnnnnnnnnnnnnnnnnnnnnnnnnnnnnnnnnnnnnnnnnnnnnnnnnnnnnnnnnnnnnnnnnnnnnnnnnnnnnnnnnnnnnnnnnnnnnnnnnnnnnnnnnnnnnnnnnnnnnnnnnnnnnnnnnnnnnnnnnnnnnnnnnnnnnnnnnnnnnnnnnnnnnnnnnnnnnnnnnnnnnnnnnnnnnnnnnnnnnnnnnnnnnnnnnnnnnnnnnnnnnnnnnnnnnnnnnnnnnnnnnnnnnnnnnnnnnnnnnnnnnnnnnnnnnnnnnnnnnnnnnnnnnnnnnnnnnnnnnnnnnnnnnnnnnnnnnnnnnnnnnnnnnnnnnnnnnnnnnnnnnnnnnnnnnnnnnnnnnnnnnnnnnnnnnnnnnnnnnnnnnnnnnnnnnnnnnnnnnnnnnnnnnnnnnnnnnnnnnnnnnnnnnnnnnnnnnnnnnnnnnnnnnnnnnnnnnnnnnnnnnnnnnnnnnnnnnnnnnnnnnnnnnnnnnnnnnnnnnnnnnnnnnnnnnnnnnnnnnnnnnnnnnnnnnnnnnnnnnnnnnnnnnnnnnnnnnnnnnnnnnnnnnnnnnnnnnnnnnnnnnnnnnnnnnnnnnnnnnnnnnnnnnnnnnnnnnnnnnnnnnnnnnnnnnnnnnnnnnnnnnnnnnnnnnnnnnnnnnnnnnnnnnnnnnnnnnnnnnnnnnnnnnnnnnnnnnnnnnnnnnnnnnnnnnnnnnnnnnnnnnnnnnnnnnnnnnnnnnnnnnnnnnnnnnnnnnnnnnnnnnnnnnnnnnnnnnnnnnnnnnnnnnnnnnnnnnnnnnnnnnnnnnnnnnnnnnnnnnnnnnnnnnnnnnnnnnnnnnnnnnnnnnnnnnnnnnnnnnnnnnnnnnnnnnnnnnnnnnnnnnnnnnnnnnnnnnnnnnnnnnnnnnnnnnnnnnnnnnnnnnnnnnnnnnnnnnnnnnnnnnnnnnnnnnnnnnnnnnnnnnnnnnnnnnnnnnnnnnnnnnnnnnnnnnnnnnnnnnnnnnnnnnnnnnnnnnnnnnnnnnnnnnnnnnnnnnnnnnnnnnnnnnnnnnnnnnnnnnnnnnnnnnnnnnnnnnnnnnnnnnnnnnnnnnnnnnnnnnnnnnnnnnnnnnnnnnnnnnnnnnnnnnnnnnnnnnnnnnnnnnnnnnnnnnnnnnnnnnnnnnnnnnnnnnnnnnnnnnnnnnnnnnnnnnnnnnnnnnnnnnnnnnnnnnnnnnnnnnnnnnnnnnnnnnnnnnnnnnnnnnnnnnnnnnnnnnnnnnnnnnnnnnnnnnnnnnnnnnnnnnnnnnnnnnnnnnnnnnnnnnnnnnnnnnnnnnnnnnnnnnnnnnnnnnnnnnnnnnnnnnnnnnnnnnnnnnnnnnnnnnnnnnnnnnnnnnnnnnnnnnnnnnnnnnnnnnnnnnnnnnnnnnnnnnnnnnnnnnnnnnnnnnnnnnnnnnnnnnnnnnnnnnnnnnnnnnnnnnnnnnnnnnnnnnnnnnnnnnnnnnnnnnnnnnnnnnnnnnnnnnnnnnnnnnnnnnnnnnnnnnnnnnnnnnnnnnnnnnnnnnnnnnnnnnnnnnnnnnnnnnnnnnnnnnnnnnnnnnnnnnnnnnnnnnnnnnnnnnnnnnnnnnnnnnnnnnnnnnnnnnnnnnnnnnnnnnnnnnnnnnnnnnnnnnnnnnnnnnnnnnnnnnnnnnnnnnnnnnnnnnnnnnnnnnnnnnnnnnnnnnnnnnnnnnnnnnnnnnnnnnnnnnnnnnnnnnnnnnnnnnnnnnnnnnnnnnnnnnnnnnnnnnnnnnnnnnnnnnnnnnnnnnnnnnnnnnnnnnnnnnnnnnnnnnnnnnnnnnnnnnnnnnnnnnnnnnnnnnnnnnnnnnnnnnnnnnnnnnnnnnnnnnnnnnnnnnnnnnnnnnnnnnnnnnnnnnnnnnnnnnnnnnnnnnnnnnnnnnnnnnnnnnnnnnnnnnnnnnnnnnnnnnnnnnnnnnnnnnnnnnnnnnnnnnnnnnnnnnnnnnnnnnnnnnnnnnnnnnnnnnnnnnnnnnnnnnnnnnnnnnnnnnnnnnnnnnnnnnnnnnnnnnnnnnnnnnnnnnnnnnnnnnnnnnnnnnnnnnnnnnnnnnnnnnnnnnnnnnnnnnnnnnnnnnnnnnnnnnnnnnnnnnnnnnnnnnnnnnnnnnnnnnnnnnnnnnnnnnnnnnnnnnnnnnnnnnnnnnnnnnnnnnnnnnnnnnnnnnnnnnnnnnnnnnnnnnnnnnnnnnnnnnnnnnnnnnnnnnnnnnnnnnnnnnnnnnnnnnnnnnnnnnnnnnnnnnnnnnnnnnnnnnnnnnnnnnnnnnnnnnnnnnnnnnnnnnnnnnnnnnnnnnnnnnnnnnnnnnnnnnnnnnnnnnnnnnnnnnnnnnnnnnnnnnnnnnnnnnnnnnnnnnnnnnnnnnnnnnnnnnnnnnnnnnnnnnnnnnnnnnnnnnnnnnnnnnnnnnnnnnnnnnnnnnnnnnnnnnnnnnnnnnnnnnnnnnnnnnnnnnnnnnnnnnnnnnnnnnnnnnnnnnnnnnnnnnnnnnnnnnnnnnnnnnnnnnnnnnnnnnnnnnnnnnnnnnnnnnnnnnnnnnnnnnnnnnnnnnnnnnnnnnnnnnnnnnnnnnnnnnnnnnnnnnnnnnnnnnnnnnnnnnnnnnnnnnnnnnnnnnnnnnnnnnnnnnnnnnnnnnnnnnnnnnnnnnnnnnnnnnnnnnnnnnnnnnnnnnnnnnnnnnnnnnnnnnnnnnnnnnnnnnnnnnnnnnnnnnnnnnnnnnnnnnnnnnnnnnnnnnnnnnnnnnnnnnnnnnnnnnnnnnnnnnnnnnnnnnnnnnnnnnnnnnnnnnnnnnnnnnnnnnnnnnnnnnnnnnnnnnnnnnnnnnnnnnnnnnnnnnnnnnnnnnnnnnnnnnnnnnnnnnnnnnnnnnnnnnnnnnnnnnnnnnnnnnnnnnnnnnnnnnnnnnnnnnnnnnnnnnnnnnnnnnnnnnnnnnnnnnnnnnnnnnnnnnnnnnnnnnnnnnnnnnnnnnnnnnnnnnnnnnnnnnnnnnnnnnnnnnnnnnnnnnnnnnnnnnnnnnnnnnnnnnnnnnnnnnnnnnnnnnnnnnnnnnnnnnnnnnnnnnnnnnnnnnnnnnnnnnnnnnnnnnnnnnnnnnnnnnnnnnnnnnnnnnnnnnnnnnnnnnnnnnnnnnnnnnnnnnnnnnnnnnnnnnnnnnnnnnnnnnnnnnnnnnnnnnnnnnnnnnnnnnnnnnnnnnnnnnnnnnnnnnnnnnnnnnnnnnnnnnnnnnnnnnnnnnnnnnnnnnnnnnnnnnnnnnnnnnnnnnnnnnnnnnnnnnnnnnnnnnnnnnnnnnnnnnnnnnnnnnnnnnnnnnnnnnnnnnnnnnnnnnnnnnnnnnnnnnnnnnnnnnnnnnnnnnnnnnnnnnnnnnnnnnnnnnnnnnnnnnnnnnnnnnnnnnnnnnnnnnnnnnnnnnnnnnnnnnnnnnnnnnnnnnnnnnnnnnnnnnnnnnnnnnnnnnnnnnnnnnnnnnnnnnnnnnnnnnnnnnnnnnnnnnnnnnnnnnnnnnnnnnnnnnnnnnnnnnnnnnnnnnnnnnnnnnnnnnnnnnnnnnnnnnnnnnnnnnnnnnnnnnnnnnnnnnnnnnnnnnnnnnnnnnnnnnnnnnnnnnnnnnnnnnnnnnnnnnnnnnnnnnnnnnnnnnnnnnnnnnnnnnnnnnnnnnnnnnnnnnnnnnnnnnnnnnnnnnnnnnnnnnnnnnnnnnnnnnnnnnnnnnnnnnnnnnnnnnnnnnnnnnnnnnnnnnnnnnnnnnnnnnnnnnnnnnnnnnnnnnnnnnnnnnnnnnnnnnnnnnnnnnnnnnnnnnnnnnnnnnnnnnnnnnnnnnnnnnnnnnnnnnnnnnnnnnnnnnnnnnnnnnnnnnnnnnnnnnnnnnnnnnnnnnnnnnnnnnnnnnnnnnnnnnnnnnnnnnnnnnnnnnnnnnnnnnnnnnnnnnnnnnnnnnnnnnnnnnnnnnnnnnnnnnnnnnnnnnnnnnnnnnnnnnnnnnnnnnnnnnnnnnnnnnnnnnnnnnnnnnnnnnnnnnnnnnnnnnnnnnnnnnnnnnnnnnnnnnnnnnnnnnnnnnnnnnnnnnnnnnnnnnnnnnnnnnnnnnnnnnnnnnnnnnnnnnnnnnnnnnnnnnnnnnnnnnnnnnnnnnnnnnnnnnnnnnnnnnnnnnnnnnnnnnnnnnnnnnnnnnnnnnnnnnnnnnnnnnnnnnnnnnnnnnnnnnnnnnnnnnnnnnnnnnnnnnnnnnnnnnnnnnnnnnnnnnnnnnnnnnnnnnnnnnnnnnnnnnnnnnnnnnnnnnnnnnnnnnnnnnnnnnnnnnnnnnnnnnnnnnnnnnnnnnnnnnnnnnnnnnnnnnnnnnnnnnnnnnnnnnnnnnnnnnnnnnnnnnnnnnnnnnnnnnnnnnnnnnnnnnnnnnnnnnnnnnnnnnnnnnnnnnnnnnnnnnnnnnnnnnnnnnnnnnnnnnnnnnnnnnnnnnnnnnnnnnnnnnnnnnnnnnnnnnnnnnnnnnnnnnnnnnnnnnnnnnnnnnnnnnnnnnnnnnnnnnnnnnnnnnnnnnnnnnnnnnnnnnnnnnnnnnnnnnnnnnnnnnnnnnnnnnnnnnnnnnnnnnnnnnnnnnnnnnnnnnnnnnnnnnnnnnnnnnnnnnnnnnnnnnnnnnnnnnnnnnnnnnnnnnnnnnnnnnnnnnnnnnnnnnnnnnnnnnnnnnnnnnnnnnnnnnnnnnnnnnnnnnnnnnnnnnnnnnnnnnnnnnnnnnnnnnnnnnnnnnnnnnnnnnnnnnnnnnnnnnnnnnnnnnnnnnnnnnnnnnnnnnnnnnnnnnnnnnnnnnnnnnnnnnnnnnnnnnnnnnnnnnnnnnnnnnnnnnnnnnnnnnnnnnnnnnnnnnnnnnnnnnnnnnnnnnnnnnnnnnnnnnnnnnnnnnnnnnnnnnnnnnnnnnnnnnnnnnnnnnnnnnnnnnnnnnnnnnnnnnnnnnnnnnnnnnnnnnnnnnnnnnnnnnnnnnnnnnnnnnnnnnnnnnnnnnnnnnnnnnnnnnnnnnnnnnnnnnnnnnnnnnnnnnnnnnnnnnnnnnnnnnnnnnnnnnnnnnnnnnnnnnnnnnnnnnnnnnnnnnnnnnnnnnnnnnnnnnnnnnnnnnnnnnnnnnnnnnnnnnnnnnnnnnnnnnnnnnnnnnnnnnnnnnnnnnnnnnnnnnnnnnnnnnnnnnnnnnnnnnnnnnnnnnnnnnnnnnnnnnnnnnnnnnnnnnnnnnnnnnnnnnnnnnnnnnnnnnnnnnnnnnnnnnnnnnnnnnnnnnnnnnnnnnnnnnnnnnnnnnnnnnnnnnnnnnnnnnnnnnnnnnnnnnnnnnnnnnnnnnnnnnnnnnnnnnnnnnnnnnnnnnnnnnnnnnnnnnnnnnnnnnnnnnnnnnnnnnnnnnnnnnnnnnnnnnnnnnnnnnnnnnnnnnnnnnnnnnnnnnnnnnnnnnnnnnnnnnnnnnnnnnnnnnnnnnnnnnnnnnnnnnnnnnnnnnnnnnnnnnnnnnnnnnnnnnnnnnnnnnnnnnnnnnnnnnnnnnnnnnnnnnnnnnnnnnnnnnnnnnnnnnnnnnnnnnnnnnnnnnnnnnnnnnnnnnnnnnnnnnnnnnnnnnnnnnnnnnnnnnnnnnnnnnnnnnnnnnnnnnnnnnnnnnnnnnnnnnnnnnnnnnnnnnnnnnnnnnnnnnnnnnnnnnnnnnnnnnnnnnnnnnnnnnnnnnnnnnnnnnnnnnnnnnnnnnnnnnnnnnnnnnnnnnnnnnnnnnnnnnnnnnnnnnnnnnnnnnnnnnnnnnnnnnnnnnnnnnnnnnnnnnnnnnnnnnnnnnnnnnnnnnnnnnnnnnnnnnnnnnnnnnnnnnnnnnnnnnnnnnnnnnnnnnnnnnnnnnnnnnnnnnnnnnnnnnnnnnnnnnnnnnnnnnnnnnnnnnnnnnnnnnnnnnnnnnnnnnnnnnnnnnnnnnnnnnnnnnnnnnnnnnnnnnnnnnnnnnnnnnnnnnnnnnnnnnnnnnnnnnnnnnnnnnnnnnnnnnnnnnnnnnnnnnnnnnnnnnnnnnnnnnnnnnnnnnnnnnnnnnnnnnnnnnnnnnnnnnnnnnnnnnnnnnnnnnnnnnnnnnnnnnnnnnnnnnnnnnnnnnnnnnnnnnnnnnnnnnnnnnnnnnnnnnnnnnnnnnnnnnnnnnnnnnnnnnnnnnnnnnnnnnnnnnnnnnnnnnnnnnnnnnnnnnnnnnnnnnnnnnnnnnnnnnnnnnnnnnnnnnnnnnnnnnnnnnnnnnnnnnnnnnnnnnnnnnnnnnnnnnnnnnnnnnnnnnnnnnnnnnnnnnnnnnnnnnnnnnnnnnnnnnnnnnnnnnnnnnnnnnnnnnnnnnnnnnnnnnnnnnnnnnnnnnnnnnnnnnnnnnnnnnnnnnnnnnnnnnnnnnnnnnnnnnnnnnnnnnnnnnnnnntacgaactccagatgccgaatgtgacatttatattattgatggtcgatatactaaactcgaagcttttgtgcctgaaaggtttcgccctgattgggctggacgtgagaaaaaaagttttacagagggtactaggcaggagattgtatacagcagagcagagcgtgacccgctgttgcgccagtctgcactcagacgatatggattggtttgtatggcttgcggactcgttccaagagtgtcgattcaacttgatgtgcatcataaagatcctattgcagagggtgaacgcacaactacgttaaatgatgtattggtgttgtgtgctaactgccatcgtctcgcgcattcagagtcaccgccactcagtttggatgccttaagggtttagatagcagcaggaccctcaactaatgggtgatagtacgagggtaatagtcagctactagtttgacccatgtgtcatactggatacgttgctataggcattaaaaatgagaacctctccaaatagtatctttatctcgatacttactatttcattctttgtaatcatgagccaagctcatgcggaagcagtgaatgccaaaggggagtacctctatggtcctgacacttccgaggcagacgcatgtcgacttgcaaaagaacgggctaaagcgaatgctctaagcaaagtattcggtgaaagtatctcgatggaagagcagatgtcctgccgtgaggtcaaaggtggcaagcctgattacgggtgcgagttgaaccgcgtatcttggtcttcaatagagggagacatcaggtcagttacagattatcgcaaggtgatcgagtcaagagtaggagagagagcttgtatcgtaacgctcaccgccgatgtcgttataccaaaccgaaagccagactcaagtttcgatctcaaggcaaccctcaatgagaaaatgtatcgtgcaggcgaggtactaaccattgcacttgagccgacggctcccatgcatatcgccatctttaactgggttccatatcaggatagggacgcagttattcagatgtttccaaatccgatggacccccagagccacatcactaaaaaaacaagcatccctacagagagcaagctttctgcttataacttcacgatgacttggctggaatcgctgccaaagaataaaaccttcgtagatgagtatctgattgtgattggaacaaagaagccaatcaaatggctatcaagctatgaattctctgactttaagtcaaagctatctgagattcctctcgatgagatgcgtgtcgttaaacgcggttaccaactcatacggggttctagtaaagtggggtcgattcaatgaggttagcattactcataatcgtttgtatcttcagtacaggttgtgtgacaacccggtatgtcgaacgtagctctgaccatacaaagcagaagccagattctgttgcaacaaatgattcaattgggaatgtctatcatggtgttgttgtctttgagtcctcagaggaattaaaagctaatcctctatcctgtcttgcagtattcccaattacagcaaaaggtggtgacaccgacagtgctgtatctattagaaatgcactacatgcaaacttagctccctccggcattcgtctgttgccactgcagaagatcgatgctgcaatcaaagcgactgataactctaatggagatctaaattcagctgtagccaaggtaattggttgtgacaccatcatgactggtgaagtgattgatgatccatcttccttctatggtatgtactccgtggttcgtgcgggcgccaatatccggatattgaaagtttcaacgggtgacactctgtggagaggtaaccacacagcagtcctcagagggggtggcgttcctcttggttttctagacatcgctatgaatgtgttttctgctgtgaggaacctcactaaagatcagagttcgcgagtaactaatgaccttgcaaggcgtctcatactgacgattccgggtctggcttatcaggctgaagtcttacctgctgaagaacaaccaatactgacagcggttgaagtccgccccccccagactgcatacggattactttccggactcgagtcagcgcctccagaggaagtaaggcaacggctgataggagaacttaaaagtaatcgctggaatagtcctaaagaccgagtcttaatcgcagaagcgcttattagagcagatgaccagcaaccccttggatactatgaagctgctctcgcaagactacgactctcagagcctatcatggctcttccccatgcagagcgtgcagcaactcttgagcctgaaaacgctgacagccagtttttactaggacgaatacagcttgctacaaacaagcctcaagattcgattgcgcccctaatcaaagcagtggctttagatgggaaggaaatccatctgaatgcattgggtactgcttataaccaagtaggggactatcccaaagcggcagcttcttttaccaaggttctgattaaagatactgataacagttatgcccttttacacggagccattgcacacgctggtacaggtgcaaatacggaagctgtcagaatgttgcgtcgcagcatgatcgtggggattgcgagatcagattcacctgcagcaaccagagcattgaatatattacgtgcaatggacttagctaaattattacctgatggtgaactagaggttctggagagcaagatcaagatgattaaggtttcttagtattctaattttttaaaaggagtagatcatgaacttcaataaatcagccttagccacatctgcagcaatcttaacggtattaactgcctgtgtaggtcctcagcccggaacgccaagttatgtagctatgcaagaagaggaccgccagaaggctgcaatcaaaacagctgaggagtcggtagcaaaggcgccctcttggtacgtacagcctccggttgatgctaactctatttatgctgcaggtacggagacttcgagcgacatgcagatgtctatggacatggcagtactgtctgctaaacgcacactagcggctcagatcggaaaccgactgtcatcaaagatgaaggagtttgccatgcaggtaggctctaatgatgacaatcaagtcaccaaagaaattgaacgggtaactacgaatgtgattaccgaggtcaatctcgctgggtttactcgtgagaagagtgaactcattccgcagggcaaaggctatagaacttacgttctgcttcgttacccactcggggactctaaccgtatgatcgtggatcagatgaaaaagagtgctgtacttgacgccaagctacgtgcatctgaagcatttaaagagttagaaaaagaaattgagtctgccaaaccagctcgctaaataggtctgaataacttagtgggggattgtcccctgctaaaataaatggttagtttctaaccatgtgaatagcaactgaaagttcagtgtaatgagattctcaatgcccattctcaagcgattattacttgctgccagcatgtgctgtttggtggttggttgcgctaagaattcactcaattacaactcgcagcctgtggacgactcccagttcatacgaccaaaagaattgtttctacctaataatattttggcatattccttgcctctgactgacaaagaacatcgagagaagacttgtagaaattatgaagataattctaggcacgtaaattttaagataagaaaaataaaaactgaatatgaagtccagtctgagaagatgaaattctactcgcagacaccactaaaaacccatatgggaataaagtctgctgaaattgatgaaggtacgcttgttattaatttgaccaataaggatgtgttcgaagaatttgaggctccggtcgtctacgttataaataaaacatactgggaagggcagccctacaatgccgttcttgataatttatttttatttggaatgcctatcttatttcagccggctacggaattctataaattgtttggttgcattgatgaagatattattaggaaggagattgatctaacaaaaggagtaaagacaggaaatactttatggatgaatggaacaaaaaaaaataaaatacaaataaaaggtttcgatcaagactatatttttgaagctccccaaagtactgataaacataattatggagaagttaggattaatttaggtcaggcattggtcgattcagtacttaacggagttacaaagttgacagttatttgtcaaacatgtgagctttcaaatacggatggtcagaatgaattcaaaactctcaaagctagcgttcaattaagttcagactttggagcggctagagtttctgaattggtaaaacttgagagggcagaaagtgagatgcttgctaatcaggaaaatcatcaacttcagcgtcccaactccaataatagagctaaaactcataggcgaattcaaccgccaaaactaaccttcacctcatctgcgccaaatgttgatgggtctgttgagttaagtggtcgtgtaataagcgatgctgttatttcagaagtgtccattaatgggcgcttgctagaggtccctctcactaaagataagtccttcaaagtaacgcgccgtcttccaatgggtgaaatgatttttcgtctgagtgtggttgatgagtttaatcgaagggtagatgccgagattaatgttgaacgtactgtcatccagcattcagaacaggtggcgccgctcaacccacgtaatataaaagggaaatctcatccaaatgcagtcgctctcattattggggttgagtcttatttaagtcttcctccagctcaatatgcagattcagatgcaaatcatttctacgattatgcgaatcaatctttgggtgtgccgcctaataagataaaactactgacagactcaaaggcgagtcgccttgaattattgaaagcaatgagaagctggatgaagactgaggttaatggcaagactgacgtctacatattcttcgcaggtcacggactagccagtcctgatgggagtaaaacctatctgctcccagcagatggagacagagatctactagatgagaccagtattctaagagatgacctcatagcttcagccaaaggagcgaagaccatcaccatgttcttggacacctgctactcaggtggcacacgaacaaatgaagtcttacttgccgatgctagaccaattgccattgtccctgacatgaaggcgttaccttcgaatgtcacagtattagcagcggcttcaggcgctcaattatcttcaacctatgaagctgcccagcaggggctattcagctattggctgatgaaaggacttgaaggagacgcagacactaacaaagataagaagatcaccacaggtgagcttcatgagtacgtggctagacaggtaggaccaatggctcagagacgtaaccgacagcagaatcctcagttgatgggtgacggcacgagggtgttggttagttactagaacaaactgtgtaatggaactttcaatgctcacactcaaccgattattacttgctgtcagtatgagctgcttggtggctactgctaatgcagcgccaattgatgaggcagttgatgcatactacagaggtgactatgcacaagcccttaagatacttagaccgctagcaacacaggggaatgctggagcgcaatacaacattggttttatgtatgccagcggtcagggggttactcaggattataaagaagcagttgagtggttcaggcttgctgcagagcaagggtatgcagcggcgcaatacaacctcggtgttatgtatgccaaaggtcgggggatagccaagaacgatcacgaggcagttaagtggttcaggcttgctgcagagcaagggtatgcagcggcgcaatacaacctcggtgttatgtatgccagcggtcagggggttactcaggattatccagaggttctgaagtggttcaggcttgctgcagagcaagggtatgcaggtgcgcaatacaacctcggtgttatgtatgccgaaggtcaaggagttctacaggattatccagaggctctgaaatggtacaggcttgctgcagcacagaggtatgcaatggcgcaatttaacattggtgtaatgtatcacaacggttatggtgtaaaacggaactatcaagaggctctgaaatggtacaggcttgctgcagcacagggggatgcatcagcgcaaaacaacattggtgtaatgtatcgcaacggttatggtgtaaaacggaactatcaagaggcattgaagtggttcaggcttgctgcagagcaagggattgcacaagcgcaaatcctcattggggtgatgcataactcaggtcagggagtagtcaagaacaatcaagaggcactgaagtggtacaggcttgctgcagatcaggggaaatgcgaaagtaatgtcgcacctgatgtttggggtgctagcgttgacggcagatcaacttctcagattgctgacgtaagtccgacagagggaagtaaaaagtcataaaccgaactagcc

SEQ ID NO: 74 - DNA, 16593 bp, Artificial Sequence; identical to SEQ ID NO: 73
  Synthetic Oligonucleotide
  misc_feature (1)..(9997): n is a, c, g, or t

SEQ ID NO: 75 - DNA, 16499 bp, Artificial Sequence
  Synthetic Oligonucleotide
  misc_feature (1)..(9999): n is a, c, g, or t
nnnnnnnnnnnnnnnnnnnnnnnnnnnnnnnnnnnnnnnnnnnnnnnnnnnnnnnnnnnnnnnnnnnnnnnnnnnnnnnnnnnnnnnnnnnnnnnnnnnnnnnnnnnnnnnnnnnnnnnnnnnnnnnnnnnnnnnnnnnnnnnnnnnnnnnnnnnnnnnnnnnnnnnnnnnnnnnnnnnnnnnnnnnnnnnnnnnnnnnnnnnnnnnnnnnnnnnnnnnnnnnnnnnnnnnnnnnnnnnnnnnnnnnnnnnnnnnnnnnnnnnnnnnnnnnnnnnnnnnnnnnnnnnnnnnnnnnnnnnnnnnnnnnnnnnnnnnnnnnnnnnnnnnnnnnnnnnnnnnnnnnnnnnnnnnnnnnnnnnnnnnnnnnnnnnnnnnnnnnnnnnnnnnnnnnnnnnnnnnnnnnnnnnnnnnnnnnnnnnnnnnnnnnnnnnnnnnnnnnnnnnnnnnnnnnnnnnnnnnnnnnnnnnnnnnnnnnnnnnnnnnnnnnnnnnnnnnnnnnnnnnnnnnnnnnnnnnnnnnnnnnnnnnnnnnnnnnnnnnnnnnnnnnnnnnnnnnnnnnnnnnnnnnnnnnnnnnnnnnnnnnnnnnnnnnnnnnnnnnnnnnnnnnnnnnnnnnnnnnnnnnnnnnnnnnnnnnnnnnnnnnnnnnnnnnnnnnnnnnnnnnnnnnnnnnnnnnnnnnnnnnnnnnnnnnnnnnnnnnnnnnnnnnnnnnnnnnnnnnnnnnnnnnnnnnnnnnnnnnnnnnnnnnnnnnnnnnnnnnnnnnnnnnnnnnnnnnnnnnnnnnnnnnnnnnnnnnnnnnnnnnnnnnnnnnnnnnnnnnnnnnnnnnnnnnnnnnnnnnnnnnnnnnnnnnnnnnnnnnnnnnnnnnnnnnnnnnnnnnnnnnnnnnnnnnnnnnnnnnnnnnnnnnnnnnnnnnnnnnnnnnnnnnnnnnnnnnnnnnnnnnnnnnnnnnnnnnnnnnnnnnnnnnnnnnnnnnnnnnnnnnnnnnnnnnnnnnnnnnnnnnnnnnnnnnnnnnnnnnnnnnnnnnnnnnnnnnnnnnnnnnnnnnnnnnnnnnnnnnnnnnnnnnnnnnnnnnnnnnnnnnnnnnnnnnnnnnnnnnnnnnnnnnnnnnnnnnnnnnnnnnnnnnnnnnnnnnnnnnnnnnnnnnnnnnnnnnnnnnnnnnnnnnnnnnnnnnnnnnnnnnnnnnnnnnnnnnnnnnnnnnnnnnnnnnnnnnnnnnnnnnnnnnnnnnnnnnnnnnnnnnnnnnnnnnnnnnnnnnnnnnnnnnnnnnnnnnnnnnnnnnnnnnnnnnnnnnnnnnnnnnnnnnnnnnnnnnnnnnnnnnnnnnnnnnnnnnnnnnnnnnnnnnnnnnnnnnnnnnnnnnnnnnnnnnnnnnnnnnnnnnnnnnnnnnnnnnnnnnnnnnnnnnnnnnnnnnnnnnnnnnnnnnnnnnnnnnnnnnnnnnnnnnnnnnnnnnnnnnnnnnnnnnnnnnnnnnnnnnnnnnnnnnnnnnnnnnnnnnnnnnnnnnnnnnnnnnnnnnnnnnnnnnnnnnnnnnnnnnnnnnnnnnnnnnnnnnnnnnnnnnnnnnnnnnnnnnnnnnnnnnnnnnnnnnnnnnnnnnnnnnnnnnnnnnnnnnnnnnnnnnnnnnnnnnnnnnnnnnnnnnnnnnnnnnnnnnnnnnnnnnnnnnnnnnnnnnnnnnnnnnnnnnnnnnnnnnnnnnnnnnnnnnnnnnnnnnnnnnnnnnnnnnnnnnnnnnnnnnnnnnnnnnnnnnnnnnnnnnnnnnnnnnnnnnnnnnnnnnnnnnnnnnnnnnnnnnnnnnnnnnnnnnnnnnnnnnnnnnnnnnnnnnnnnnnnnnnnnnnnnnnnnnnnnnnnnnnnnnnnnnnnnnnnnnnnnnnnnnnnnnnnnnnnnnnnnnnnnnnnnnnnnnnnnnnnnnnnnnnnnnnnnnnnnnnnnnnnnnnnnnnnnnnnnnnnnnnnnnnnnnnnnnnnnnnnnnnnnnnnnnnnnnnnnnnnnnnnnnnnnnnnnnnnnnnnnnnnnnnnnnnnnnnnnnnnnnnnnnnnnnnnnnnnnnnnnnnnnnnnnnnnnnnnnnnnnnnnnnnnnnnnnnnnnnnnnnnnnnnnnnnnnnnnnnnnnnnnnnnnnnnnnnnnnnnnnnnnnnnnnnnnnnnnnnnnnnnnnnnnnnnnnnnnnnnnnnnnnnnnnnnnnnnnnnnnnnnnnnnnnnnnnnnnnnnnnnnnnnnnnnnnnnnnnnnnnnnnnnnnnnnnnnnnnnnnnnnnnnnnnnnnnnnnnnnnnnnnnnnnnnnnnnnnnnnnnnnnnnnnnnnnnnnnnnnnnnnnnnnnnnnnnnnnnnnnnnnnnnnnnnnnnnnnnnnnnnnnnnnnnnnnnnnnnnnnnnnnnnnnnnnnnnnnnnnnnnnnnnnnnnnnnnnnnnnnnnnnnnnnnnnnnnnnnnnnnnnnnnnnnnnnnnnnnnnnnnnnnnnnnnnnnnnnnnnnnnnnnnnnnnnnnnnnnnnnnnnnnnnnnnnnnnnnnnnnnnnnnnnnnnnnnnnnnnnnnnnnnnnnnnnnnnnnnnnnnnnnnnnnnnnnnnnnnnnnnnnnnnnnnnnnnnnnnnnnnnnnnnnnnnnnnnnnnnnnnnnnnnnnnnnnnnnnnnnnnnnnnnnnnnnnnnnnnnnnnnnnnnnnnnnnnnnnnnnnnnnnnnnnnnnnnnnnnnnnnnnnnnnnnnnnnnnnnnnnnnnnnnnnnnnnnnnnnnnnnnnnnnnnnnnnnnnnnnnnnnnnnnnnnnnnnnnnnnnnnnnnnnnnnnnnnnnnnnnnnnnnnnnnnnnnnnnnnnnnnnnnnnnnnnnnnnnnnnnnnnnnnnnnnnnnnnnnnnnnnnnnnnnnnnnnnnnnnnnnnnnnnnnnnnnnnnnnnnnnnnnnnnnnnnnnnnnnnnnnnnnnnnnnnnnnnnnnnnnnnnnnnnnnnnnnnnnnnnnnnnnnnnnnnnnnnnnnnnnnnnnnnnnnnnnnnnnnnnnnnnnnnnnnnnnnnnnnnnnnnnnnnnnnnnnnnnnnnnnnnnnnnnnnnnnnnnnnnnnnnnnnnnnnnnnnnnnnnnnnnnnnnnnnnnnnnnnnnnnnnnnnnnnnnnnnnnnnnnnnnnnnnnnnnnnnnnnnnnnnnnnnnnnnnnnnnnnnnnnnnnnnnnnnnnnnnnnnnnnnnnnnnnnnnnnnnnnnnnnnnnnnnnnnnnnnnnnnnnnnnnnnnnnnnnnnnnnnnnnnnnnnnnnnnnnnnnnnnnnnnnnnnnnnnnnnnnnnnnnnnnnnnnnnnnnnnnnnnnnnnnnnnnnnnnnnnnnnnnnnnnnnnnnnnnnnnnnnnnnnnnnnnnnnnnnnnnnnnnnnnnnnnnnnnnnnnnnnnnnnnnnnnnnnnnnnnnnnnnnnnnnnnnnnnnnnnnnnnnnnnnnnnnnnnnnnnnnnnnnnnnnnnnnnnnnnnnnnnnnnnnnnnnnnnnnnnnnnnnnnnnnnnnnnnnnnnnnnnnnnnnnnnnnnnnnnnnnnnnnnnnnnnnnnnnnnnnnnnnnnnnnnnnnnnnnnnnnnnnnnnnnnnnnnnnnnnnnnnnnnnnnnnnnnnnnnnnnnnnnnnnnnnnnnnnnnnnnnnnnnnnnnnnnnnnnnnnnnnnnnnnnnnnnnnnnnnnnnnnnnnnnnnnnnnnnnnnnnnnnnnnnnnnnnnnnnnnnnnnnnnnnnnnnnnnnnnnnnnnnnnnnnnnnnnnnnnnnnnnnnnnnnnnnnnnnnnnnnnnnnnnnnnnnnnnnnnnnnnnnnnnnnnnnnnnnnnnnnnnnnnnnnnnnnnnnnnnnnnnnnnnnnnnnnnnnnnnnnnnnnnnnnnnnnnnnnnnnnnnnnnnnnnnnnnnnnnnnnnnnnnnnnnnnnnnnnnnnnnnnnnnnnnnnnnnnnnnnnnnnnnnnnnnnnnnnnnnnnnnnnnnnnnnnnnnnnnnnnnnnnnnnnnnnnnnnnnnnnnnnnnnnnnnnnnnnnnnnnnnnnnnnnnnnnnnnnnnnnnnnnnnnnnnnnnnnnnnnnnnnnnnnnnnnnnnnnnnnnnnnnnnnnnnnnnnnnnnnnnnnnnnnnnnnnnnnnnnnnnnnnnnnnnnnnnnnnnnnnnnnnnnnnnnnnnnnnnnnnnnnnnnnnnnnnnnnnnnnnnnnnnnnnnnnnnnnnnnnnnnnnnnnnnnnnnnnnnnnnnnnnnnnnnnnnnnnnnnnnnnnnnnnnnnnnnnnnnnnnnnnnnnnnnnnnnnnnnnnnnnnnnnnnnnnnnnnnnnnnnnnnnnnnnnnnnnnnnnnnnnnnnnnnnnnnnnnnnnnnnnnnnnnnnnnnnnnnnnnnnnnnnnnnnnnnnnnnnnnnnnnnnnnnnnnnnnnnnnnnnnnnnnnnnnnnnnnnnnnnnnnnnnnnnnnnnnnnnnnnnnnnnnnnnnnnnnnnnnnnnnnnnnnnnnnnnnnnnnnnnnnnnnnnnnnnnnnnnnnnnnnnnnnnnnnnnnnnnnnnnnnnnnnnnnnnnnnnnnnnnnnnnnnnnnnnnnnnnnnnnnnnnnnnnnnnnnnnnnnnnnnnnnnnnnnnnnnnnnnnnnnnnnnnnnnnnnnnnnnnnnnnnnnnnnnnnnnnnnnnnnnnnnnnnnnnnnnnnnnnnnnnnnnnnnnnnnnnnnnnnnnnnnnnnnnnnnnnnnnnnnnnnnnnnnnnnnnnnnnnnnnnnnnnnnnnnnnnnnnnnnnnnnnnnnnnnnnnnnnnnnnnnnnnnnnnnnnnnnnnnnnnnnnnnnnnnnnnnnnnnnnnnnnnnnnnnnnnnnnnnnnnnnnnnnnnnnnnnnnnnnnnnnnnnnnnnnnnnnnnnnnnnnnnnnnnnnnnnnnnnnnnnnnnnnnnnnnnnnnnnnnnnnnnnnnnnnnnnnnnnnnnnnnnnnnnnnnnnnnnnnnnnnnnnnnnnnnnnnnnnnnnnnnnnnnnnnnnnnnnnnnnnnnnnnnnnnnnnnnnnnnnnnnnnnnnnnnnnnnnnnnnnnnnnnnnnnnnnnnnnnnnnnnnnnnnnnnnnnnnnnnnnnnnnnnnnnnnnnnnnnnnnnnnnnnnnnnnnnnnnnnnnnnnnnnnnnnnnnnnnnnnnnnnnnnnnnnnnnnnnnnnnnnnnnnnnnnnnnnnnnnnnnnnnnnnnnnnnnnnnnnnnnnnnnnnnnnnnnnnnnnnnnnnnnnnnnnnnnnnnnnnnnnnnnnnnnnnnnnnnnnnnnnnnnnnnnnnnnnnnnnnnnnnnnnnnnnnnnnnnnnnnnnnnnnnnnnnnnnnnnnnnnnnnnnnnnnnnnnnnnnnnnnnnnnnnnnnnnnnnnnnnnnnnnnnnnnnnnnnnnnnnnnnnnnnnnnnnnnnnnnnnnnnnnnnnnnnnnnnnnnnnnnnnnnnnnnnnnnnnnnnnnnnnnnnnnnnnnnnnnnnnnnnnnnnnnnnnnnnnnnnnnnnnnnnnnnnnnnnnnnnnnnnnnnnnnnnnnnnnnnnnnnnnnnnnnnnnnnnnnnnnnnnnnnnnnnnnnnnnnnnnnnnnnnnnnnnnnnnnnnnnnnnnnnnnnnnnnnnnnnnnnnnnnnnnnnnnnnnnnnnnnnnnnnnnnnnnnnnnnnnnnnnnnnnnnnnnnnnnnnnnnnnnnnnnnnnnnnnnnnnnnnnnnnnnnnnnnnnnnnnnnnnnnnnnnnnnnnnnnnnnnnnnnnnnnnnnnnnnnnnnnnnnnnnnnnnnnnnnnnnnnnnnnnnnnnnnnnnnnnnnnnnnnnnnnnnnnnnnnnnnnnnnnnnnnnnnnnnnnnnnnnnnnnnnnnnnnnnnnnnnnnnnnnnnnnnnnnnnnnnnnnnnnnnnnnnnnnnnnnnnnnnnnnnnnnnnnnnnnnnnnnnnnnnnnnnnnnnnnnnnnnnnnnnnnnnnnnnnnnnnnnnnnnnnnnnnnnnnnnnnnnnnnnnnnnnnnnnnnnnnnnnnnnnnnnnnnnnnnnnnnnnnnnnnnnnnnnnnnnnnnnnnnnnnnnnnnnnnnnnnnnnnnnnnnnnnnnnnnnnnnnnnnnnnnnnnnnnnnnnnnnnnnnnnnnnnnnnnnnnnnnnnnnnnnnnnnnnnnnnnnnnnnnnnnnnnnnnnnnnnnnnnnnnnnnnnnnnnnnnnnnnnnnnnnnnnnnnnnnnnnnnnnnnnnnnnnnnnnnnnnnnnnnnnnnnnnnnnnnnnnnnnnnnnnnnnnnnnnnnnnnnnnnnnnnnnnnnnnnnnnnnnnnnnnnnnnnnnnnnnnnnnnnnnnnnnnnnnnnnnnnnnnnnnnnnnnnnnnnnnnnnnnnnnnnnnnnnnnnnnnnnnnnnnnnnnnnnnnnnnnnnnnnnnnnnnnnnnnnnnnnnnnnnnnnnnnnnnnnnnnnnnnnnnnnnnnnnnnnnnnnnnnnnnnnnnnnnnnnnnnnnnnnnnnnnnnnnnnnnnnnnnnnnnnnnnnnnnnnnnnnnnnnnnnnnnnnnnnnnnnnnnnnnnnnnnnnnnnnnnnnnnnnnnnnnnnnnnnnnnnnnnnnnnnnnnnnnnnnnnnnnnnnnnnnnnnnnnnnnnnnnnnnnnnnnnnnnnnnnnnnnnnnnnnnnnnnnnnnnnnnnnnnnnnnnnnnnnnnnnnnnnnnnnnnnnnnnnnnnnnnnnnnnnnnnnnnnnnnnnnnnnnnnnnnnnnnnnnnnnnnnnnnnnnnnnnnnnnnnnnnnnnnnnnnnnnnnnnnnnnnnnnnnnnnnnnnnnnnnnnnnnnnnnnnnnnnnnnnnnnnnnnnnnnnnnnnnnnnnnnnnnnnnnnnnnnnnnnnnnnnnnnnnnnnnnnnnnnnnnnnnnnnnnnnnnnnnnnnnnnnnnnnnnnnnnnnnnnnnnnnnnnnnnnnnnnnnnnnnnnnnnnnnnnnnnnnnnnnnnnnnnnnnnnnnnnnnnnnnnnnnnnnnnnnnnnnnnnnnnnnnnnnnnnnnnnnnnnnnnnnnnnnnnnnnnnnnnnnnnnnnnnnnnnnnnnnnnnnnnnnnnnnnnnnnnnnnnnnnnnnnnnnnnnnnnnnnnnnnnnnnnnnnnnnnnnnnnnnnnnnnnnnnnnnnnnnnnnnnnnnnnnnnnnnnnnnnnnnnnnnnnnnnnnnnnnnnnnnnnnnnnnnnnnnnnnnnnnnnnnnnnnnnnnnnnnnnnnnnnnnnnnnnnnnnnnnnnnnnnnnnnnnnnnnnnnnnnnnnnnnnnnnnnnnnnnnnnnnnnnnnnnnnnnnnnnnnnnnnnnnnnnnnnnnnnnnnnnnnnnnnnnnnnnnnnnnnnnnnnnnnnnnnnnnnnnnnnnnnnnnnnnnnnnnnnnnnnnnnnnnnnnnnnnnnnnnnnnnnnnnnnnnnnnnnnnnnnnnnnnnnnnnnnnnnnnnnnnnnnnnnnnnnnnnnnnnnnnnnnnnnnnnnnnnnnnnnnnnnnnnnnnnnnnnnnnnnnnnnnnnnnnnnnnnnnnnnnnnnnnnnnnnnnnnnnnnnnnnnnnnnnnnnnnnnnnnnnnnnnnnnnnnnnnnnnnnnnnnnnnnnnnnnnnnnnnnnnnnnnnnnnnnnnnnnnnnnnnnnnnnnnnnnnnnnnnnnnnnnnnnnnnnnnnnnnnnnnnnnnnnnnnnnnnnnnnnnnnnnnnnnnnnnnnnnnnnnnnnnnnnnnnnnnnnnnnnnnnnnnnnnnnnnnnnnnnnnnnnnnnnnnnnnnnnnnnnnnnnnnnnnnnnnnnnnnnnnnnnnnnnnnnnnnnnnnnnnnnnnnnnnnnnnnnnnnnnnnnnnnnnnnnnnnnnnnnnnnnnnnnnnnnnnnnnnnnnnnnnnnnnnnnnnnnnnnnnnnnnnnnnnnnnnnnnnnnnnnnnnnnnnnnnnnnnnnnnnnnnnnnnnnnnnnnnnnnnnnnnnnnnnnnnnnnnnnnnnnnnnnnnnnnnnnnnnnnnnnnnnnnnnnnnnnnnnnnnnnnnnnnnnnnnnnnnnnnnnnnnnnnnnnnnnnnnnnnnnnnnnnnnnnnnnnnnnnnnnnnnnnnnnnnnnnnnnnnnnnnnnnnnnnnnnnnnnnnnnnnnnnnnnnnnnnnnnnnnnnnnnnnnnnnnnnnnnnnnnnnnnnnnnnnnnnnnnnnnnnnnnnnnnnnnnnnnnnnnnnnnnnnnnnnnnnnnnnnnnnnnnnnnnnnnnnnnnnnnnnnnnnnnnnnnnnnnnnnnnnnnnnnnnnnnnnnnnnnnnnnnnnnnnnnnnnnnnnnnnnnnnnnnnnnnnnnnnnnnnnnnnnnnnnnnnnnnnnnnnnnnnnnnnnnnnnnnnnnnnnnnnnnnnnnnnnnnnnnnnnnnnnnnnnnnnnnnnnnnnnnnnnnnnnnnnnnnnnnnnnnnnnnnnnnnnnnnnnnnnnnnnnnnnnnnnnnnnnnnnnnnnnnnnnnnnnnnnnnnnnnnnnnnnnnnnnnnnnnnnnnnnnnnnnnnnnnnnnnnnnnnnnnnnnnnnnnnnnnnnnnnnnnnnnnnnnnnnnnnnnnnnnnnnnnnnnnnnnnnnnnnnnnnnnnnnnnnnnnnnnnnnnnnnnnnnnnnnnnnnnnnnnnnnnnnnnnnnnnnnnnnnnnnnnnnnnnnnnnnnnnnnnnnnnnnnnnnnnnnnnnnnnnnnnnnnnnnnnnnnnnnnnnnnnnnnnnnnnnnnnnnnnnnnnnnnnnnnnnnnnnnnnnnnnnnnnnnnnnnnnnnnnnnnnnnnnnnnnnnnnnnnnnnnnnnnnnnnnnnnnnnnnnnnnnnnnnnnnnnnnnnnnnnnnnnnnnnnnnnnnnnnnnnnnnnnnnnnnnnnnnnnnnnnnnnnnnnnnnnnnnnnnnnnnnnnnnnnnnnnnnnnnnnnnnnnnnnnnnnnnnnnnnnnnnnnnnnnnnnnnnnnnnnnnnnnnnnnnnnnnnnnnnnnnnnnnnnnnnnnnnnnnnnnnnnnnnnnnnnnnnnnnnnnnnnnnnnnnnnnnnnnnnnnnnnnnnnnnnnnnnnnnnnnnnnnnnnnnnnnnnnnnnnnnnnnnnnnnnnnnnnnnnnnnnnnnnnnnnnnnnnnnnnnnnnnnnnnnnnnnnnnnnnnnnnnnnnnnnnnnnnnnnnnnnnnnnnnnnnnnnnnnnnnnnnnnnnnnnnnnnnnnnnnnnnnnnnnnnnnnnnnnnnnnnnnnnnnnnnnnnnnnnnnnnnnnnnnnnnnnnnnnnnnnnnnnnnnnnnnnnnnnnnnnnnnnnnnnnnnnnnnnnnnnnnnnnnnnnnnnnnnnnnnnnnnnnnnnnnnnnnnnnnnnnnnnnnnnnnnnnnnnnnnnnnnnnnnnnnnnnnnnnnnnnnnnnnnnnnnnnnnnnnnnnnnnnnnnnnnnnnnnnnnnnnnnnnnnnnnnnnnnnnnnnnnnnnnnnnnnnnnnnnnnnnnnnnnnnnnnnnnnnnnnnnnnnnnnnnnnnnnnnnnnnnnnnnnnnnnnnnnnnnnnnnnnnnnnnnnnnnnnnnnnnnnnnnnnnnnnnnnnnnnnnnnnnnnnnnnnnnnnnnnnnnnnnnnnnnnnnnnnnnnnnnnnnnnnnnnnnnnnnnnnnnnnnnnnnnnnnnnnnnnnnnnnnnnnnnnnnnnnnnnnnnnnnnnnnnnnnnnnnnnnnnnnnnnnnnnnnnnnnnnnnnnnnnnnnnnnnnnnnnnnnnnnnnnnnnnnnnnnnnnnnnnnnnnnnnnnnnnnnnnnnnnnnnnnnnnnnnnnnnnnnnnnnnnnnnnnnnnnnnnnnnnnnnnnnnnnnnnnnnnnnnnnnnnnnnnnnnnnnnnnnnnnnnnnnnnnnnnnnnnnnnnnnnnnnnnnnnnnnnnnnnnnnnnnnnnnnnnnnnnnnnnnnnnnnnnnnnnnnnnnnnnnnnnnnnnnnnnnnnnnnnnnnnnnnnnnnnnnnnnnnnnnnnnnnnnnnnnnnnnnnnnnnnnnnnnnnnnnnnnnnnnnnnnnnnnnnnnnnnnnnnnnnnnnnnnnnnnnnnnnnnnnnnnnnnnnnnnnnnnnnnnnnnnnnnnnnnnnnnnnnnnnnnnnnnnnnnnnnnnnnnnnnnnnnnnnnnnnnnnnncgcgtgaaaggcccttaccgcagcccacagcaggcgcaatacgccaagctcatcgagcgcgctgtcagcaaacccggtgcgccgctgttggcgggtgctgcgcccgggctgggtaagacacacggctacgccatccccttgttatgcagtggcaaaaaagttgccatcgccatgagtacgcgccaactgatctatcaattcatggcgagcgatgcactcgccgctgcgcaagctgcactagaggccgaggggcggcccgccgtcaccgttgtcgccttgcaaccccgccgtcaatttgaaacggcggtggcccaccgcgcgcacaaaactgcgccgcttgatgccgacgtcttggtgctcacacacatgggcgtgctcatcgatacccacatcccagcctacgcccagttgcgtcagcgcgctgtcttgttgtttgacgaagccgatcttttggccgatgccgccgacttgcgcagcacctatcgcattgaggctgaggccttagcccgcgcaggcgtcgaaaacgccacaccgacaaaggcggttgaaaccatcattaaaaaatccgatgaccccgaggaaaaagcagtcgccacagccatccaacgcgctttggcagagccggcttggtacaaagtgatcggtaaagaagacaacggcgatttggtgctgacccaccgcatgccggggcgcatgttgcgcaccctcatcaatgacatgccgcggtgcattttcaccagtggcaccctcacggtatcggggcgttttgaccactttgtcaaagccatcggcctgaccgcagtggcacccgaaagccagcacattgaccccgtgcaacacggccaactgcgcgttgaggtggccagtgaggccctcaccccagaagcacaagccgaacgcatcatgcacgcggcgacaccggtattggtgctgaccaccagccacgcgactacggcggcgttgggctctttgtgccccggtgccatctgccgcgcacccggtgaagccctcatggatgcggtggcgcgatgccctgatgatggcatcttgatcgccgctggcgcctggtctggcctcgatgcgccgcgcctgcggtggcaaaccgtggtcatccccaaaacaccgtacggcaaaccactcatccttgacgcccagcagataagcgcttacgtggacagcaaggttgttgccatcaggcgcaccaaccaagggttacaccgtgggctgcgcaccaccgatgccacctgcaccttgctgttactcgatccggatagccgtcgtgccgatttacgtcaagccattccccgtcgtttcttggtggattgggacagcgtggccgagggctcgttggttttgcgcacgcacttcgcccgtgaacgaaaaaaaggtctgcgtgaaaaaaccctgagccggcgcgggcagcactgcgaacaccccggctgtacggccacccaagagcatttgctggaggtgcaccacctcaacccgattgccaacggcccccgcgacacagttactgatgacctgcgggtgctttgtaaaaatcaccacgcggatgcccaccaagccatgcgaaaagctgattttttaaaagtgaaaacaactgaaaagcgtgcagaggcagacacttaggccacagctggtcaagctacgccgtaaatgcgtagttactggaacttcgcgcgagtgcttagataggcttccatcggtcaagctacgccgtaaatgcgtagttactggaacttgcgtgtggtatcagttcagcgtggatcgggtcaagctacgccgtaaatgcgtagttactggaacgaagttcacgttgacactgccttggatacgggtcaagctacgccgtaaatgcgtagttactggaactggtagcggctgcttgttaagtaaggccgaggtcgtctggggtcaagctacgccgtaaaggcgtagttacttttagcagccagttttgctggttttaagcggtccaatggcccgacttgccgcccatcttttcaagcaggcgcacgcccgtcatggtcatgccgcggtcggcggctttgcacatgtcgtagatggtcagcaagccgacttgtacggcggtgagggcttccatttcaacacccgtggggccggtggtttcggcggtgacggtgcaatgaacgtgggggggctggtcaccggtggtgaaggctacgcgcacatggctgagcgccaagggatggcacaggggaatgaggtcagcggtgcgcttggaggcttgtatagccgccacgcgcgcaatgcccaacacatcaccctttttggcgttgccatcgcgaatcagagccaaggtgtcggcgtgcatttcaatgcgcccttctgctgtggcgctgcgcttggtgttggctttgtcacccacgtcgaccatgtgggcttggccttgtgcatcaaagtgggtcaggggtgaagggggctggctggacacggtgcaatctccgaaactttgcaaaacttagggcatcatacccatatgccttcccccttgtttgttgctcgccgtcgccctcgtttggcgtgggcgttgccgtgggctttgggtgccgccctgctgctggggccaaccacactcaccgttgcgcaaccccgcgcggccttgcccaacttgggtggtggggtgtcgttaacgctgggggatgagcgccggctgggccaacaaatcatgcccagcttgcacaacagtggcttggtggtggaagacccgctgctcaaccaatacctcaccgatctgtggcgccctgtgtttgcaacggcgcgcgcacgcggtgatgtgcccgatgacatgttgcagcagtttgcttggcagttgtggttgctcagccccaaagccatcaacgcgtttgcattacccgggggttactttggttttcacttaggtttgttggcatcggccacggatgacgctgcactggcgtcggtgttggcgcacgagttgagccatgtgacacagcgccatattgcccgcatcatccaagcccaagagagccaagcgccttggctgattggcgccatgattttgggtgctgccaccatcgccgccagccccgatgcaggcgccgcactgattgtgggtgggcaggcagcgtccattcaaaaccagctcaacttctcgcgggacatggagcaagaggcggaccgccaaggcttggtggtgttgtcggaggcggggtttgatccgaaggggtttgtgcgcttatttgaaaccctgcaaaacgccaaccgcttgaatgacgatggtgcctttccctacctgcgcagccacccgctcacgaccgagcgtgtggcggatatgcaaggccgcttgttcagcgtaccggccgagcccaacccggtgggcgatggtgcggtgcagatgcgcgaccccgatgcctctgctttgttgcgcgtgcgtgccgccgtcatcgcctcggctgatgaggtggatgtgttgcaaggttggggtgcggcgcccgccgccactgggtcagtgggcagcgccacccgcccggcagaacaatgggcgagcgactaccggcgcgcactggccgcgtgggcactgaagcgccccgatgtggcatggacgcgcctgcgccaattgatgaccgaggcggctacgcaacccgccgtgtcgcaggtgctgcgcgagacggcgttggcttggctggccagccccgctaagtttgagccgatacccgctgcaacggtgcaggcttgggttgaggcggccttggctgatgcccaagccgggcggcgttcggcgctgctgctgttggcgggttatgcggccagcgccaattcagccgtgccggatgcgcggcgcgcgcaggtgatcggggccttgcgtacctggttggcgacccaccccaatgatgcgttgggctggcagttgttggcccgtttgagtgcgcaacaaggccaagccttggtggcgttgagggccgaggccgaggcctttgtggcgcgcgagctgtggcaaggggcgcttgaccgtttgtctgccgccaagcgcctgattgcggaggctaaaacccgtttcagtgaagccgacattgcgattatttacgcccgcgaaaaggcagttaatcaagccatggcatttgcacggtctgagcgccgttgagcgcgcaccggtacactaagtcccccatggcagtcatccacatctctgacatcgagtcggccatcaactattggcggacacaaaaaccttcacccgacggtgtgacgctgtgcgccgaggtgcgcgccttggccgaggtttatgcgctgctggtgtactaccacgagaccgaggccgatgaggccagtatgccgtttgatgcctatgcggcctgggaggcttggttcgacacgacacccgatacgccgtgtatcgcgatctgctcaaccagccagggcgatgacctgtgtaaaggttgtggccgtacctttgaagaggtgcagtactggaccgaaatgcagcccgccgaaaagcgcgcggtttggcgtcgcatcaccctgcatggcgatgcgtggcgctttaaccgctaccgcgaacgggcgatcgagaacgcggcgtaaccgcgtgccgtcagcctttggcggcgcgcaacgccaattcggcggctttaccgacgtaggtggcaggcgtcatggccaacaaacgcgctttgtcggcgtctggaatagccagtgactgaatgaggccgtgcaaggcttcacgcgtgacggttttgccccgtgtgacggctttgagttgctcgtacgcgccatcgataccgtagcgccgcatgacggtttgaatcggctctgccaacacttcccacgcgttgtcgaggtcgtccgccaaggcgtccgcgttgagttcgagtttgcgcagacccaccgccatcgattgatacgccaacaccgagtagccaaacgcgacgcccatgttgcgcaacaccgtgctgtcggttaggtcacgttgccagcgcgagatgggtagcttttcactgaggtggcgcagcaaggcattggccagccccaagttaccttcggcgttttcaaagtcgatcggattgactttgtgcggcatggtggatgagccgatctcaccgtctttgaggcgttgcttgaagtaacccaagctgatgtaaccccacacgtcacgcgcaaggtcgatcaagatggtgttgacacgggccatggcgtcgaacagctcggccatgtaatcgtgtggctcaatttgaatgctgtagtcctggaacgttaagcccaagccgttgggcacgggtgaggccaccacgcctttggcaaaggcctcccaatcgacgtcgggccaggcgctcatgtgggcgttatagttaccaaccgcgccgttcattttggccatgatggcgacttgctcaatgcgcaaggtggcgcgttgcaggcgcacggcgacgttggccatctctttaccgacggtggtcgggctggcggtttggccgtgggtccggctgagcatgggcacgtgggcgtactgctcggccatgcccagcagcagattcacgacgtcgcccaacatgggcaacagcacttcgcgtagcgcggcttgcaattgcagtgcgtggctggtgttgttgatgtcctcgctggtgcaggcaaagtgcacaaattcgcctgcacgctcaagctcttcgcggaccgctgggctaagacggtcatttcggaaagcgcgtttgatccaatactcaactgctttgacatcgtggttggtctcgcgctcgatggccttgatgtcggcggtgtcggcttcgctgaattgctgaaccaagccccgcaggtaggcggtcgcctcggccgataaggcgggacactccaccagaccggcttgcgtgagggcgataaaccacgtgatctcgacttgcacccgcttgtgcatgtagccatgctcgctcatgatgggtcgcaaggcagccagtttgccgctgtagcggccgtcaagcggggatagggcggagatggtgtagaggtcttgagtcattgggggcggggcgcgatgtgcaccaaaatagatagccaatattgtaggcgcccagccaaattaaacctttggctgtatacaggtttgatgagcttaaaagcgaccaggattccttttggcgcccgtgttttggggctttctgtggctagaatcattgctcgatcaaccattattgaaacccatgaaactcatcggctctccaaccagtccatatgtgcgcaaggttcgcgtcgtcttggttgaaaagcgtctcgagtacgagttcgcaaccgaagatgtgtggtcggcggataccctgatcgcagcggctaatccactcgggaagatcccctgtttgatcatggacgggggtgaggccatgtttgattcgcgcgtgatcgtagagtacctcgatggcttgtcgccggtgagtcgtttgattcccgcaagcggccgcgagcgtgcggaagttaaaacctgggaggccttggctgacggtgtcatggatgccgccatcttggctcgc

SEQ ID NO: 76 - DNA, 16499 bp, Artificial Sequence; identical to SEQ ID NO: 75
  Synthetic Oligonucleotide
  misc_feature (1)..(9999): n is a, c, g, or t

SEQ ID NO: 77 - DNA, 16465 bp, Artificial Sequence
  Synthetic Oligonucleotide
  misc_feature (1)..(9998): n is a, c, g, or t
nnnnnnnnnnnnnnnnnnnnnnnnnnnnnnnnnnnnnnnnnnnnnnnnnnnnnnnnnnnnnnnnnnnnnnnnnnnnnnnnnnnnnnnnnnnnnnnnnnnnnnnnnnnnnnnnnnnnnnnnnnnnnnnnnnnnnnnnnnnnnnnnnnnnnnnnnnnnnnnnnnnnnnnnnnnnnnnnnnnnnnnnnnnnnnnnnnnnnnnnnnnnnnnnnnnnnnnnnnnnnnnnnnnnnnnnnnnnnnnnnnnnnnnnnnnnnnnnnnnnnnnnnnnnnnnnnnnnnnnnnnnnnnnnnnnnnnnnnnnnnnnnnnnnnnnnnnnnnnnnnnnnnnnnnnnnnnnnnnnnnnnnnnnnnnnnnnnnnnnnnnnnnnnnnnnnnnnnnnnnnnnnnnnnnnnnnnnnnnnnnnnnnnnnnnnnnnnnnnnnnnnnnnnnnnnnnnnnnnnnnnnnnnnnnnnnnnnnnnnnnnnnnnnnnnnnnnnnnnnnnnnnnnnnnnnnnnnnnnnnnnnnnnnnnnnnnnnnnnnnnnnnnnnnnnnnnnnnnnnnnnnnnnnnnnnnnnnnnnnnnnnnnnnnnnnnnnnnnnnnnnnnnnnnnnnnnnnnnnnnnnnnnnnnnnnnnnnnnnnnnnnnnnnnnnnnnnnnnnnnnnnnnnnnnnnnnnnnnnnnnnnnnnnnnnnnnnnnnnnnnnnnnnnnnnnnnnnnnnnnnnnnnnnnnnnnnnnnnnnnnnnnnnnnnnnnnnnnnnnnnnnnnnnnnnnnnnnnnnnnnnnnnnnnnnnnnnnnnnnnnnnnnnnnnnnnnnnnnnnnnnnnnnnnnnnnnnnnnnnnnnnnnnnnnnnnnnnnnnnnnnnnnnnnnnnnnnnnnnnnnnnnnnnnnnnnnnnnnnnnnnnnnnnnnnnnnnnnnnnnnnnnnnnnnnnnnnnnnnnnnnnnnnnnnnnnnnnnnnnnnnnnnnnnnnnnnnnnnnnnnnnnnnnnnnnnnnnnnnnnnnnnnnnnnnnnnnnnnnnnnnnnnnnnnnnnnnnnnnnnnnnnnnnnnnnnnnnnnnnnnnnnnnnnnnnnnnnnnnnnnnnnnnnnnnnnnnnnnnnnnnnnnnnnnnnnnnnnnnnnnnnnnnnnnnnnnnnnnnnnnnnnnnnnnnnnnnnnnnnnnnnnnnnnnnnnnnnnnnnnnnnnnnnnnnnnnnnnnnnnnnnnnnnnnnnnnnnnnnnnnnnnnnnnnnnnnnnnnnnnnnnnnnnnnnnnnnnnnnnnnnnnnnnnnnnnnnnnnnnnnnnnnnnnnnnnnnnnnnnnnnnnnnnnnnnnnnnnnnnnnnnnnnnnnnnnnnnnnnnnnnnnnnnnnnnnnnnnnnnnnnnnnnnnnnnnnnnnnnnnnnnnnnnnnnnnnnnnnnnnnnnnnnnnnnnnnnnnnnnnnnnnnnnnnnnnnnnnnnnnnnnnnnnnnnnnnnnnnnnnnnnnnnnnnnnnnnnnnnnnnnnnnnnnnnnnnnnnnnnnnnnnnnnnnnnnnnnnnnnnnnnnnnnnnnnnnnnnnnnnnnnnnnnnnnnnnnnnnnnnnnnnnnnnnnnnnnnnnnnnnnnnnnnnnnnnnnnnnnnnnnnnnnnnnnnnnnnnnnnnnnnnnnnnnnnnnnnnnnnnnnnnnnnnnnnnnnnnnnnnnnnnnnnnnnnnnnnnnnnnnnnnnnnnnnnnnnnnnnnnnnnnnnnnnnnnnnnnnnnnnnnnnnnnnnnnnnnnnnnnnnnnnnnnnnnnnnnnnnnnnnnnnnnnnnnnnnnnnnnnnnnnnnnnnnnnnnnnnnnnnnnnnnnnnnnnnnnnnnnnnnnnnnnnnnnnnnnnnnnnnnnnnnnnnnnnnnnnnnnnnnnnnnnnnnnnnnnnnnnnnnnnnnnnnnnnnnnnnnnnnnnnnnnnnnnnnnnnnnnnnnnnnnnnnnnnnnnnnnnnnnnnnnnnnnnnnnnnnnnnnnnnnnnnnnnnnnnnnnnnnnnnnnnnnnnnnnnnnnnnnnnnnnnnnnnnnnnnnnnnnnnnnnnnnnnnnnnnnnnnnnnnnnnnnnnnnnnnnnnnnnnnnnnnnnnnnnnnnnnnnnnnnnnnnnnnnnnnnnnnnnnnnnnnnnnnnnnnnnnnnnnnnnnnnnnnnnnnnnnnnnnnnnnnnnnnnnnnnnnnnnnnnnnnnnnnnnnnnnnnnnnnnnnnnnnnnnnnnnnnnnnnnnnnnnnnnnnnnnnnnnnnnnnnnnnnnnnnnnnnnnnnnnnnnnnnnnnnnnnnnnnnnnnnnnnnnnnnnnnnnnnnnnnnnnnnnnnnnnnnnnnnnnnnnnnnnnnnnnnnnnnnnnnnnnnnnnnnnnnnnnnnnnnnnnnnnnnnnnnnnnnnnnnnnnnnnnnnnnnnnnnnnnnnnnnnnnnnnnnnnnnnnnnnnnnnnnnnnnnnnnnnnnnnnnnnnnnnnnnnnnnnnnnnnnnnnnnnnnnnnnnnnnnnnnnnnnnnnnnnnnnnnnnnnnnnnnnnnnnnnnnnnnnnnnnnnnnnnnnnnnnnnnnnnnnnnnnnnnnnnnnnnnnnnnnnnnnnnnnnnnnnnnnnnnnnnnnnnnnnnnnnnnnnnnnnnnnnnnnnnnnnnnnnnnnnnnnnnnnnnnnnnnnnnnnnnnnnnnnnnnnnnnnnnnnnnnnnnnnnnnnnnnnnnnnnnnnnnnnnnnnnnnnnnnnnnnnnnnnnnnnnnnnnnnnnnnnnnnnnnnnnnnnnnnnnnnnnnnnnnnnnnnnnnnnnnnnnnnnnnnnnnnnnnnnnnnnnnnnnnnnnnnnnnnnnnnnnnnnnnnnnnnnnnnnnnnnnnnnnnnnnnnnnnnnnnnnnnnnnnnnnnnnnnnnnnnnnnnnnnnnnnnnnnnnnnnnnnnnnnnnnnnnnnnnnnnnnnnnnnnnnnnnnnnnnnnnnnnnnnnnnnnnnnnnnnnnnnnnnnnnnnnnnnnnnnnnnnnnnnnnnnnnnnnnnnnnnnnnnnnnnnnnnnnnnnnnnnnnnnnnnnnnnnnnnnnnnnnnnnnnnnnnnnnnnnnnnnnnnnnnnnnnnnnnnnnnnnnnnnnnnnnnnnnnnnnnnnnnnnnnnnnnnnnnnnnnnnnnnnnnnnnnnnnnnnnnnnnnnnnnnnnnnnnnnnnnnnnnnnnnnnnnnnnnnnnnnnnnnnnnnnnnnnnnnnnnnnnnnnnnnnnnnnnnnnnnnnnnnnnnnnnnnnnnnnnnnnnnnnnnnnnnnnnnnnnnnnnnnnnnnnnnnnnnnnnnnnnnnnnnnnnnnnnnnnnnnnnnnnnnnnnnnnnnnnnnnnnnnnnnnnnnnnnnnnnnnnnnnnnnnnnnnnnnnnnnnnnnnnnnnnnnnnnnnnnnnnnnnnnnnnnnnnnnnnnnnnnnnnnnnnnnnnnnnnnnnnnnnnnnnnnnnnnnnnnnnnnnnnnnnnnnnnnnnnnnnnnnnnnnnnnnnnnnnnnnnnnnnnnnnnnnnnnnnnnnnnnnnnnnnnnnnnnnnnnnnnnnnnnnnnnnnnnnnnnnnnnnnnnnnnnnnnnnnnnnnnnnnnnnnnnnnnnnnnnnnnnnnnnnnnnnnnnnnnnnnnnnnnnnnnnnnnnnnnnnnnnnnnnnnnnnnnnnnnnnnnnnnnnnnnnnnnnnnnnnnnnnnnnnnnnnnnnnnnnnnnnnnnnnnnnnnnnnnnnnnnnnnnnnnnnnnnnnnnnnnnnnnnnnnnnnnnnnnnnnnnnnnnnnnnnnnnnnnnnnnnnnnnnnnnnnnnnnnnnnnnnnnnnnnnnnnnnnnnnnnnnnnnnnnnnnnnnnnnnnnnnnnnnnnnnnnnnnnnnnnnnnnnnnnnnnnnnnnnnnnnnnnnnnnnnnnnnnnnnnnnnnnnnnnnnnnnnnnnnnnnnnnnnnnnnnnnnnnnnnnnnnnnnnnnnnnnnnnnnnnnnnnnnnnnnnnnnnnnnnnnnnnnnnnnnnnnnnnnnnnnnnnnnnnnnnnnnnnnnnnnnnnnnnnnnnnnnnnnnnnnnnnnnnnnnnnnnnnnnnnnnnnnnnnnnnnnnnnnnnnnnnnnnnnnnnnnnnnnnnnnnnnnnnnnnnnnnnnnnnnnnnnnnnnnnnnnnnnnnnnnnnnnnnnnnnnnnnnnnnnnnnnnnnnnnnnnnnnnnnnnnnnnnnnnnnnnnnnnnnnnnnnnnnnnnnnnnnnnnnnnnnnnnnnnnnnnnnnnnnnnnnnnnnnnnnnnnnnnnnnnnnnnnnnnnnnnnnnnnnnnnnnnnnnnnnnnnnnnnnnnnnnnnnnnnnnnnnnnnnnnnnnnnnnnnnnnnnnnnnnnnnnnnnnnnnnnnnnnnnnnnnnnnnnnnnnnnnnnnnnnnnnnnnnnnnnnnnnnnnnnnnnnnnnnnnnnnnnnnnnnnnnnnnnnnnnnnnnnnnnnnnnnnnnnnnnnnnnnnnnnnnnnnnnnnnnnnnnnnnnnnnnnnnnnnnnnnnnnnnnnnnnnnnnnnnnnnnnnnnnnnnnnnnnnnnnnnnnnnnnnnnnnnnnnnnnnnnnnnnnnnnnnnnnnnnnnnnnnnnnnnnnnnnnnnnnnnnnnnnnnnnnnnnnnnnnnnnnnnnnnnnnnnnnnnnnnnnnnnnnnnnnnnnnnnnnnnnnnnnnnnnnnnnnnnnnnnnnnnnnnnnnnnnnnnnnnnnnnnnnnnnnnnnnnnnnnnnnnnnnnnnnnnnnnnnnnnnnnnnnnnnnnnnnnnnnnnnnnnnnnnnnnnnnnnnnnnnnnnnnnnnnnnnnnnnnnnnnnnnnnnnnnnnnnnnnnnnnnnnnnnnnnnnnnnnnnnnnnnnnnnnnnnnnnnnnnnnnnnnnnnnnnnnnnnnnnnnnnnnnnnnnnnnnnnnnnnnnnnnnnnnnnnnnnnnnnnnnnnnnnnnnnnnnnnnnnnnnnnnnnnnnnnnnnnnnnnnnnnnnnnnnnnnnnnnnnnnnnnnnnnnnnnnnnnnnnnnnnnnnnnnnnnnnnnnnnnnnnnnnnnnnnnnnnnnnnnnnnnnnnnnnnnnnnnnnnnnnnnnnnnnnnnnnnnnnnnnnnnnnnnnnnnnnnnnnnnnnnnnnnnnnnnnnnnnnnnnnnnnnnnnnnnnnnnnnnnnnnnnnnnnnnnnnnnnnnnnnnnnnnnnnnnnnnnnnnnnnnnnnnnnnnnnnnnnnnnnnnnnnnnnnnnnnnnnnnnnnnnnnnnnnnnnnnnnnnnnnnnnnnnnnnnnnnnnnnnnnnnnnnnnnnnnnnnnnnnnnnnnnnnnnnnnnnnnnnnnnnnnnnnnnnnnnnnnnnnnnnnnnnnnnnnnnnnnnnnnnnnnnnnnnnnnnnnnnnnnnnnnnnnnnnnnnnnnnnnnnnnnnnnnnnnnnnnnnnnnnnnnnnnnnnnnnnnnnnnnnnnnnnnnnnnnnnnnnnnnnnnnnnnnnnnnnnnnnnnnnnnnnnnnnnnnnnnnnnnnnnnnnnnnnnnnnnnnnnnnnnnnnnnnnnnnnnnnnnnnnnnnnnnnnnnnnnnnnnnnnnnnnnnnnnnnnnnnnnnnnnnnnnnnnnnnnnnnnnnnnnnnnnnnnnnnnnnnnnnnnnnnnnnnnnnnnnnnnnnnnnnnnnnnnnnnnnnnnnnnnnnnnnnnnnnnnnnnnnnnnnnnnnnnnnnnnnnnnnnnnnnnnnnnnnnnnnnnnnnnnnnnnnnnnnnnnnnnnnnnnnnnnnnnnnnnnnnnnnnnnnnnnnnnnnnnnnnnnnnnnnnnnnnnnnnnnnnnnnnnnnnnnnnnnnnnnnnnnnnnnnnnnnnnnnnnnnnnnnnnnnnnnnnnnnnnnnnnnnnnnnnnnnnnnnnnnnnnnnnnnnnnnnnnnnnnnnnnnnnnnnnnnnnnnnnnnnnnnnnnnnnnnnnnnnnnnnnnnnnnnnnnnnnnnnnnnnnnnnnnnnnnnnnnnnnnnnnnnnnnnnnnnnnnnnnnnnnnnnnnnnnnnnnnnnnnnnnnnnnnnnnnnnnnnnnnnnnnnnnnnnnnnnnnnnnnnnnnnnnnnnnnnnnnnnnnnnnnnnnnnnnnnnnnnnnnnnnnnnnnnnnnnnnnnnnnnnnnnnnnnnnnnnnnnnnnnnnnnnnnnnnnnnnnnnnnnnnnnnnnnnnnnnnnnnnnnnnnnnnnnnnnnnnnnnnnnnnnnnnnnnnnnnnnnnnnnnnnnnnnnnnnnnnnnnnnnnnnnnnnnnnnnnnnnnnnnnnnnnnnnnnnnnnnnnnnnnnnnnnnnnnnnnnnnnnnnnnnnnnnnnnnnnnnnnnnnnnnnnnnnnnnnnnnnnnnnnnnnnnnnnnnnnnnnnnnnnnnnnnnnnnnnnnnnnnnnnnnnnnnnnnnnnnnnnnnnnnnnnnnnnnnnnnnnnnnnnnnnnnnnnnnnnnnnnnnnnnnnnnnnnnnnnnnnnnnnnnnnnnnnnnnnnnnnnnnnnnnnnnnnnnnnnnnnnnnnnnnnnnnnnnnnnnnnnnnnnnnnnnnnnnnnnnnnnnnnnnnnnnnnnnnnnnnnnnnnnnnnnnnnnnnnnnnnnnnnnnnnnnnnnnnnnnnnnnnnnnnnnnnnnnnnnnnnnnnnnnnnnnnnnnnnnnnnnnnnnnnnnnnnnnnnnnnnnnnnnnnnnnnnnnnnnnnnnnnnnnnnnnnnnnnnnnnnnnnnnnnnnnnnnnnnnnnnnnnnnnnnnnnnnnnnnnnnnnnnnnnnnnnnnnnnnnnnnnnnnnnnnnnnnnnnnnnnnnnnnnnnnnnnnnnnnnnnnnnnnnnnnnnnnnnnnnnnnnnnnnnnnnnnnnnnnnnnnnnnnnnnnnnnnnnnnnnnnnnnnnnnnnnnnnnnnnnnnnnnnnnnnnnnnnnnnnnnnnnnnnnnnnnnnnnnnnnnnnnnnnnnnnnnnnnnnnnnnnnnnnnnnnnnnnnnnnnnnnnnnnnnnnnnnnnnnnnnnnnnnnnnnnnnnnnnnnnnnnnnnnnnnnnnnnnnnnnnnnnnnnnnnnnnnnnnnnnnnnnnnnnnnnnnnnnnnnnnnnnnnnnnnnnnnnnnnnnnnnnnnnnnnnnnnnnnnnnnnnnnnnnnnnnnnnnnnnnnnnnnnnnnnnnnnnnnnnnnnnnnnnnnnnnnnnnnnnnnnnnnnnnnnnnnnnnnnnnnnnnnnnnnnnnnnnnnnnnnnnnnnnnnnnnnnnnnnnnnnnnnnnnnnnnnnnnnnnnnnnnnnnnnnnnnnnnnnnnnnnnnnnnnnnnnnnnnnnnnnnnnnnnnnnnnnnnnnnnnnnnnnnnnnnnnnnnnnnnnnnnnnnnnnnnnnnnnnnnnnnnnnnnnnnnnnnnnnnnnnnnnnnnnnnnnnnnnnnnnnnnnnnnnnnnnnnnnnnnnnnnnnnnnnnnnnnnnnnnnnnnnnnnnnnnnnnnnnnnnnnnnnnnnnnnnnnnnnnnnnnnnnnnnnnnnnnnnnnnnnnnnnnnnnnnnnnnnnnnnnnnnnnnnnnnnnnnnnnnnnnnnnnnnnnnnnnnnnnnnnnnnnnnnnnnnnnnnnnnnnnnnnnnnnnnnnnnnnnnnnnnnnnnnnnnnnnnnnnnnnnnnnnnnnnnnnnnnnnnnnnnnnnnnnnnnnnnnnnnnnnnnnnnnnnnnnnnnnnnnnnnnnnnnnnnnnnnnnnnnnnnnnnnnnnnnnnnnnnnnnnnnnnnnnnnnnnnnnnnnnnnnnnnnnnnnnnnnnnnnnnnnnnnnnnnnnnnnnnnnnnnnnnnnnnnnnnnnnnnnnnnnnnnnnnnnnnnnnnnnnnnnnnnnnnnnnnnnnnnnnnnnnnnnnnnnnnnnnnnnnnnnnnnnnnnnnnnnnnnnnnnnnnnnnnnnnnnnnnnnnnnnnnnnnnnnnnnnnnnnnnnnnnnnnnnnnnnnnnnnnnnnnnnnnnnnnnnnnnnnnnnnnnnnnnnnnnnnnnnnnnnnnnnnnnnnnnnnnnnnnnnnnnnnnnnnnnnnnnnnnnnnnnnnnnnnnnnnnnnnnnnnnnnnnnnnnnnnnnnnnnnnnnnnnnnnnnnnnnnnnnnnnnnnnnnnnnnnnnnnnnnnnnnnnnnnnnnnnnnnnnnnnnnnnnnnnnnnnnnnnnnnnnnnnnnnnnnnnnnnnnnnnnnnnnnnnnnnnnnnnnnnnnnnnnnnnnnnnnnnnnnnnnnnnnnnnnnnnnnnnnnnnnnnnnnnnnnnnnnnnnnnnnnnnnnnnnnnnnnnnnnnnnnnnnnnnnnnnnnnnnnnnnnnnnnnnnnnnnnnnnnnnnnnnnnnnnnnnnnnnnnnnnnnnnnnnnnnnnnnnnnnnnnnnnnnnnnnnnnnnnnnnnnnnnnnnnnnnnnnnnnnnnnnnnnnnnnnnnnnnnnnnnnnnnnnnnnnnnnnnnnnnnnnnnnnnnnnnnnnnnnnnnnnnnnnnnnnnnnnnnnnnnnnnnnnnnnnnnnnnnnnnnnnnnnnnnnnnnnnnnnnnnnnnnnnnnnnnnnnnnnnnnnnnnnnnnnnnnnnnnnnnnnnnnnnnnnnnnnnnnnnnnnnnnnnnnnnnnnnnnnnnnnnnnnnnnnnnnnnnnnnnnnnnnnnnnnnnnnnnnnnnnnnnnnnnnnnnnnnnnnnnnnnnnnnnnnnnnnnnnnnnnnnnnnnnnnnnnnnnnnnnnnnnnnnnnnnnnnnnnnnnnnnnnnnnnnnnnnnnnnnnnnnnnnnnnnnnnnnnnnnnnnnnnnnnnnnnnnnnnnnnnnnnnnnnnnnnnnnnnnnnnnnnnnnnnnnnnnnnnnnnnnnnnnnnnnnnnnnnnnnnnnnnnnnnnnnnnnnnnnnnnnnnnnnnnnnnnnnnnnnnnnnnnnnnnnnnnnnnnnnnnnnnnnnnnnnnnnnnnnnnnnnnnnnnnnnnnnnnnnnnnnnnnnnnnnnnnnnnnnnnnnnnnnnnnnnnnnnnnnnnnnnnnnnnnnnnnnnnnnnnnnnnnnnnnnnnnnnnnnnnnnnnnnnnnnnnnnnnnnnnnnnnnnnnnnnnnnnnnnnnnnnnnnnnnnnnnnnnnnnnnnnnnnnnnnnnnnnnnnnnnnnnnnnnnnnnnnnnnnnnnnnnnnnnnnnnnnnnnnnnnnnnnnnnnnnnnnnnnnnnnnnnnnnnnnnnnnnnnnnnnnnnnnnnnnnnnnnnnnnnnnnnnnnnnnnnnnnnnnnnnnnnnnnnnnnnnnnnnnnnnnnnnnnnnnnnnnnnnnnnnnnnnnnnnnnnnnnnnnnnnnnnnnnnnnnnnnnnnnnnnnnnnnnnnnnnnnnnnnnnnnnnnnnnnnnnnnnnnnnnnnnnnnnnnnnnnnnnnnnnnnnnnnnnnnnnnnnnnnnnnnnnnnnnnnnnnnnnnnnnnnnnnnnnnnnnnnnnnnnnnnnnnnnnnnnnnnnnnnnnnnnnnnnnnnnnnnnnnnnnnnnnnnnnnnnnnnnnnnnnnnnnnnnnnnnnnnnnnnnnnnnnnnnnnnnnnnnnnnnnnnnnnnnnnnnnnnnnnnnnnnnnnnnnnnnnnnnnnnnnnnnnnnnnnnnnnnnnnnnnnnnnnnnnnnnnnnnnnnnnnnnnnnnnnnnnnnnnnnnnnnnnnnnnnnnnnnnnnnnnnnnnnnnnnnnnnnnnnnnnnnnnnnnnnnnnnnnnnnnnnnnnnnnnnnnnnnnnnnnnnnnnnnnnnnnnnnnnnnnnnnnnnnnnnnnnnnnnnnnnnnnnnnnnnnnnnnnnnnnnnnnnnnnnnnnnnnnnnnnnnnnnnnnnnnnnnnnnnnnnnnnnnnnnnnnnnnnnnnnnnnnnnnnnnnnnnnnnnnnnnnnnnnnnnnnnnnnnnnnnnnnnnnnnnnnnnnnnnnnnnnnnnnnnnnnnnnnnnnnnnnnnnnnnnnnnnnnnnnnnnnnnnnnnnnnnnnnnnnnnnnnnnnnnnnnnnnnnnnnnnnnnnnnnnnnnnnnnnnnnnnnnnnnnnnnnnnnnnnnnnnnnnnnnnnnnnnnnnnnnnnnnnnnnnnnnnnnnnnnnnnnnnnnnnnnnnnnnnnnnnnnnnnnnnnnnnnnnnnnnnnnnnnnnnnnnnnnnnnnnnnnnnnnnnnnnnnnnnnnnnnnnnnnnnnnnngatggagagcccctatgtttgtggggttatttttaggattgtcggcatgtacagaagcaaagaacaagcgcaatacgcgaagctgatcaccgatgcaatcggtgtcggtgcgcctctgctcgcgggtgccgccgccggtctgggtaagacacacgggtacacgatcccgctggtgaccagtggcaagcgtgtggcgatcagcatgtcaacacggcagttgatcgagcagtacatgcagtccgatgcgctcaagtcagcgctggaactattaccaaccacggtcgctgtcctgcgttcgcgccgcgagttcgacagcagcaaggactaccgcgaacacaaggaacaggcacttgcggcacaggtgctggtggtgacgcacgccgccgcgctgatcgacagcttcaatcctgactatgccgatctgcggagccgtgatgtcgtcctgttcgatgaggccgatctgctcgccgacgccgccgacctgcgctcgactttcgccatcgacgggcaaggcgataccgaccgcgatgccgtgctgcgtcgggcagagcggtctgatgatccagaggaacgtgcggcagcaagcgccatccgctacgccattgagcatccagcgttctacaaggtggttgggtttgacgatgatggcacgctgatgctcaagcaccggatgcccgggcggatgctcaaaccattggtgcaggactgcaaacggatcatcttcaccagcggcacgctgcaagtgagtggtcgattcgactacttcattcgcgccattggactgaccgcaattgatccgtccagccgacacattgaaccagttcagcatggcaatctgaccgtggagatcacgtctgccgacctgaccgccgagcagaaggcgcaatcgatcatggcggcagaacgtccctgtcttgtgctgaccaccagtcatgctgagacagcggcgttaggcgcgctggtatccggcgcggtggtgcgcggaaaaggtgagccgctggcagatgcagtggcacgatgcccagcagatgccatcctgattgctgcaggcgcatggagcggtctggacgagccgaggttgcgttggaagactgtggtgatacccaaggctccgtatggcgctccgaccgagatcgacggccagcagatcacgcactacatcgacagcaaggtgacggcgactaggcgtatcaaccaaggtctgcaccgtggtctgcggacacagggggcggtctgcaaattgatgctgctcgatccgcgttgcaaccgtccagagttactcgcggcgataccggcgcggtttagcgtgcagtcattcagcgagggtcagcgcgttgagttggtactgagcaaggccgagcgcgatccgctgctgagaaaggcggcattaaaggcacatggcgcggtgtgtgccgactgcggcgacatcgccctgcatcgccttgacgtccatcacctgaatcctgtcagcgagggtcagcgcaggacgacggtcaaggatgttgtggtggtctgcaagaactgccacgcagatcggcatcatgcgatgcgtgccaaccttggcgaactcgccacggtatctctgttgaattgaacagacatatggcagagcggagcgggtgaatcgcggccctggtgcgactggcgtgacacggtcgagcagggctgcgctcacgtactcaggcctgtttgccaggcttttcccactcaaaatctagtttttctggtttttctttatgtgaacgcatatcaatcaaagcaatcaaaggggccaggttcggaataaaactggctgcacccaagcattctagcgccagaaaccagatgcccccatttcaaggatgaccgctatctgccggttaacagactttcgacgaacatctctccaccgtctgttcccggccggtaacagtcaaatagattccatccttctgagctaatctgtcgtctgcccagtctgtttcccccgtgatttttgcccgatccctgcgcaccccctagaatgggcagacgactggtttccgcgtggattgtcttgcctgctttcattttcaaaacgcttctgttccttgccgcgctgtgcgcggggcaggcgcacgcgctgacggtggaggtggtggcgcccgatgagatcaaggcgctgctgatgcagcatctggaaacggcgcgggcggcacggttgggcgaacggctggacgcggaggaaatggcgcggctgcagcggcagagcgaactgacggcgcgcgatctgctggccaccgaggggtatttttcgccgcaggtggaaagcgcggtggagtgggtgggcgacgattggcgggtggattaccggatcatccccggcgtccgaaccctggtgcgcagcgtgaagctggccttcgacggcgcattgaaatcgcgggccgacgaggacgcgctgcggcaacgcatcgtgcgcgattttttgctgaggcaggggatgccgtttcgccaggcggactgggaaaccgccaagctgggggtgttgcggctcttgctggtcgacacctatccgacggcgcggattgcggcgagcgaggcgcgcatcgaccccgccacccatacggcggatctgacgctgacggtcgacagcggcccggccttttattacggcccgcctgtggtcagcgggcatcggcgctatcccgaggcgatcgttcgcaatctcaatccggtgaaacccggccagccctatcgtcagcaggatttgctggattatcaggcggcgctggagacaagcggctattacgcgcaggccacggtgcgcatcgatcccgatccggcacaggcggccgcggtgccgattcaggttgacgtggcggagcggccggaaaaacgctttagcgtgggcgctggcatcagcaccgacactggcgcgcgggtgcaggcgtcgtggctgcaccggaacattctggatcgcgggatgcgactcaagttcgatgcgcgcatcgaaaccacgcggaaaatcggggtggcggaactggcctggccgcgcaatgcccatggctacgaaaacagcgtgggactgcaacacaagcaggaagacatcgagggtcaggaaacgcgctccaccgtgctggctgccaaacgcagccgcacgcgcgggaagatcgagacgacgctgtcgctgcaataccagacggaagaacaacgcattgccaacacgctcgacgcgagcaaccaggccttgaccgtcaattacgcctggacccagcgtaatgcgggacgcgggttttatccgcagcgtggttacgtgctcagtttgcagggcggcggcgcgcttgagtccttgctgtccgacaccagttttgtgcgtctctatgggcgccacactcagtatttcccggtaggcaagaatggacggctgatcctgcgcggtgaattgggcagtgtgctggccgacagccgcgatggcattcccaccgattttctgttccgcaccggcggcgacaattcggtgcgcggctacgcctaccagagcctgggacgcacgctggcaggcggggtggcatcggtgcgctatctcgccaccggcagcgtcgaatacaactatttcttcgacggcaactggggcatggcgctgttcctcgatgcgggcgatgcggccgacagtccggccagcctgtcgccggtgttcggctatggggtgggcgcgcgctaccgttcgccggtggggccggtgaatctcgatctggcgtatggcgaagccaccgacaaatttcggctgcatttctcgctcggggtgtcgttttgaggcgcgcagttttgaaacgtgttgcctgggggatcgcatcgataccccttgccttggcagtcctggttgcggcggtgatgtggctgacgaccacggccacgggctttctgtggctggccaaacaggccacccctttaagcaatggccgtttgatgctcgaaggggtggaaggtcatttgggcgcgtcggttcatatcgaaaaactgatttacaagtcggacctgcagcgcatcactctgcaacaggtgcgactggattgggagccccgttcgctatggaatcgactggtcgagatcaacctgttggctgcgcagcatgggcgggtggaaatcctcaagaaggatccgacgcctccggcctaccccgacaccttgcgcttgccgctggatatccgggttgacgcgtgggacgtggggcagctcgaggtggtcgacagcggccagacgctcaacttcaccgcgctgcatggcaaggtggatggccgcggcgaccgcttcgatctgatcgctgcggcgaggacgccatgggctgatgtggaagggcagttgggtatccgaaaagatgccccgttcaacgtgcagggtgcgttcagcgcgctccgcggcacgcccgttccggtgcaggccaaacttggactgtcgggcgaactggctgcgattgatttcaagctggacgcattggccgaaggcatgagcatgatggctgcgggcaagctggcgttttttgcaccgattcgcttgccgcgtctggtgatgtctggacagggcatcgacccgagcaaatttgcagcggatgcgccgcacgccgatctggcattttcgggtgtgtttgaaggccagtcgggcgagcgactgctcggcaccttcagtcttgccaaccggcaagccggccggctcgaccaggatcgcctgccgttggccaacctgaccggcgcggtggtgggcgatagcgtgaacgccgacttcagcgcgctggaaatcgatctgggtgcggccgggcgatttaccggcgatggccaatggcgcgacgggcgctttgcggtgaacttgaccagtccgcgcttgaacctggcgggtgtccaccgcgagctccatcccacccgcatccgcgcagcattgcagctggcgggcgatgcggcgcgccagacgctgaccgccgatgtcgccgaaagctgggggcagggcaggtttacgctgagcctggcggatgcggtgttgcgtctgcaggatgcggtctttagcgggcaggccggacggctgaccgccaagggcagcgtgaagctcgatgccagccgcgcattcgaagccacgttcgacgcctcccggatcaaccccgcccgttttggaaaatatccgcgcgccaaactcaatgcgcgcggcgaggtgagcggtgcgttgctgcccacgctgcgtctgcaaacgcaatttagcttgccgccgggcgaactcgaaggccgcccgatcaaagggcaaggtaagctgcgttatgcaaacggccatttgaccgacgccgacatcgatctcgacctggccggcaaccgggctttgttaaaaggcgcatttggccgcacaggcgaccggatggtgtgggacatcaacgcgcctgcactggctcgactgaatctgggcctggcggggcggttgacgagcaccggcagcatcattggcgagccgcgccaaccgcaaatcgacgtccagctcaatgccagcggcttgcgcttgccgggtggcattgcggccgattccgtggacctgaaactcaagctgcaagccgcactgaacggcgtgttcaacggccagctggatgcacgcgggattcgggtggcgggacaacgcatcagcgctgcgcgcgccagcgttcaggggcgccgcgatgcgcacatcctgtcgctcgacgcgcgcctggcggactggcatggcgtcgcatcgctggcgggcgggctggatatgaatcaggtttggcgcggccaattgaatcaggccacagtgcaaggtgcgtggccgatgcaattgagtgtgcccgccggtttggtgttgagtcgcgaccagcagcaggtgagcaatctgtcgttcacgctggcgggcggaaaagtgagcaacgtgcagttcacccggcagggcttgcagatgcgcacgcgcggtgcaatgagcaatctgccgctggcgcctttgcttggcctgctggaggctccaccgcccttgagtactgacctgcgaatgaatggcgactggaaccttcgcctgggtgacagcctggagggcgaggcccatcttgtgcggcaagcgggtgatgttcggctcaaagacccggccatgaacctgggtctgctcacgctcggtctcgatctcaaggccgatgccagtcgggtaacagcacgcctcgacgccaccacccgcgaggcaggaaaagtacgcgccgaagcgagcgcgaaactggtccgcgatggcgcgggcttgacgctgccgcgcacggccccgttgacgtggactgccgcactcgatgtgcccgatctgcgtctgctcaagccgtttattccgataggagtccgcctggatgcgcggctggccgcgcaactcaccggcagcggcagcctggctgcgccgcgcatcgacggtcagatcgatgccagccggattcggtttaccctgcctgaagaaggagtgtcgattaccgatggcacgctcagactgctgtt

SEQ ID NO: 78 - DNA, 16465 bp, Artificial Sequence; identical to SEQ ID NO: 77
  Synthetic Oligonucleotide
  misc_feature (1)..(9998): n is a, c, g, or t

SEQ ID NO: 79 - DNA, 16457 bp, Artificial Sequence
  Synthetic Oligonucleotide
  misc_feature (1)..(9999): n is a, c, g, or t
nnnnnnnnnnnnnnnnnnnnnnnnnnnnnnnnnnnnnnnnnnnnnnnnnnnnnnnnnnnnnnnnnnnnnnnnnnnnnnnnnnnnnnnnnnnnnnnnnnnnnnnnnnnnnnnnnnnnnnnnnnnnnnnnnnnnnnnnnnnnnnnnnnnnnnnnnnnnnnnnnnnnnnnnnnnnnnnnnnnnnnnnnnnnnnnnnnnnnnnnnnnnnnnnnnnnnnnnnnnnnnnnnnnnnnnnnnnnnnnnnnnnnnnnnnnnnnnnnnnnnnnnnnnnnnnnnnnnnnnnnnnnnnnnnnnnnnnnnnnnnnnnnnnnnnnnnnnnnnnnnnnnnnnnnnnnnnnnnnnnnnnnnnnnnnnnnnnnnnnnnnnnnnnnnnnnnnnnnnnnnnnnnnnnnnnnnnnnnnnnnnnnnnnnnnnnnnnnnnnnnnnnnnnnnnnnnnnnnnnnnnnnnnnnnnnnnnnnnnnnnnnnnnnnnnnnnnnnnnnnnnnnnnnnnnnnnnnnnnnnnnnnnnnnnnnnnnnnnnnnnnnnnnnnnnnnnnnnnnnnnnnnnnnnnnnnnnnnnnnnnnnnnnnnnnnnnnnnnnnnnnnnnnnnnnnnnnnnnnnnnnnnnnnnnnnnnnnnnnnnnnnnnnnnnnnnnnnnnnnnnnnnnnnnnnnnnnnnnnnnnnnnnnnnnnnnnnnnnnnnnnnnnnnnnnnnnnnnnnnnnnnnnnnnnnnnnnnnnnnnnnnnnnnnnnnnnnnnnnnnnnnnnnnnnnnnnnnnnnnnnnnnnnnnnnnnnnnnnnnnnnnnnnnnnnnnnnnnnnnnnnnnnnnnnnnnnnnnnnnnnnnnnnnnnnnnnnnnnnnnnnnnnnnnnnnnnnnnnnnnnnnnnnnnnnnnnnnnnnnnnnnnnnnnnnnnnnnnnnnnnnnnnnnnnnnnnnnnnnnnnnnnnnnnnnnnnnnnnnnnnnnnnnnnnnnnnnnnnnnnnnnnnnnnnnnnnnnnnnnnnnnnnnnnnnnnnnnnnnnnnnnnnnnnnnnnnnnnnnnnnnnnnnnnnnnnnnnnnnnnnnnnnnnnnnnnnnnnnnnnnnnnnnnnnnnnnnnnnnnnnnnnnnnnnnnnnnnnnnnnnnnnnnnnnnnnnnnnnnnnnnnnnnnnnnnnnnnnnnnnnnnnnnnnnnnnnnnnnnnnnnnnnnnnnnnnnnnnnnnnnnnnnnnnnnnnnnnnnnnnnnnnnnnnnnnnnnnnnnnnnnnnnnnnnnnnnnnnnnnnnnnnnnnnnnnnnnnnnnnnnnnnnnnnnnnnnnnnnnnnnnnnnnnnnnnnnnnnnnnnnnnnnnnnnnnnnnnnnnnnnnnnnnnnnnnnnnnnnnnnnnnnnnnnnnnnnnnnnnnnnnnnnnnnnnnnnnnnnnnnnnnnnnnnnnnnnnnnnnnnnnnnnnnnnnnnnnnnnnnnnnnnnnnnnnnnnnnnnnnnnnnnnnnnnnnnnnnnnnnnnnnnnnnnnnnnnnnnnnnnnnnnnnnnnnnnnnnnnnnnnnnnnnnnnnnnnnnnnnnnnnnnnnnnnnnnnnnnnnnnnnnnnnnnnnnnnnnnnnnnnnnnnnnnnnnnnnnnnnnnnnnnnnnnnnnnnnnnnnnnnnnnnnnnnnnnnnnnnnnnnnnnnnnnnnnnnnnnnnnnnnnnnnnnnnnnnnnnnnnnnnnnnnnnnnnnnnnnnnnnnnnnnnnnnnnnnnnnnnnnnnnnnnnnnnnnnnnnnnnnnnnnnnnnnnnnnnnnnnnnnnnnnnnnnnnnnnnnnnnnnnnnnnnnnnnnnnnnnnnnnnnnnnnnnnnnnnnnnnnnnnnnnnnnnnnnnnnnnnnnnnnnnnnnnnnnnnnnnnnnnnnnnnnnnnnnnnnnnnnnnnnnnnnnnnnnnnnnnnnnnnnnnnnnnnnnnnnnnnnnnnnnnnnnnnnnnnnnnnnnnnnnnnnnnnnnnnnnnnnnnnnnnnnnnnnnnnnnnnnnnnnnnnnnnnnnnnnnnnnnnnnnnnnnnnnnnnnnnnnnnnnnnnnnnnnnnnnnnnnnnnnnnnnnnnnnnnnnnnnnnnnnnnnnnnnnnnnnnnnnnnnnnnnnnnnnnnnnnnnnnnnnnnnnnnnnnnnnnnnnnnnnnnnnnnnnnnnnnnnnnnnnnnnnnnnnnnnnnnnnnnnnnnnnnnnnnnnnnnnnnnnnnnnnnnnnnnnnnnnnnnnnnnnnnnnnnnnnnnnnnnnnnnnnnnnnnnnnnnnnnnnnnnnnnnnnnnnnnnnnnnnnnnnnnnnnnnnnnnnnnnnnnnnnnnnnnnnnnnnnnnnnnnnnnnnnnnnnnnnnnnnnnnnnnnnnnnnnnnnnnnnnnnnnnnnnnnnnnnnnnnnnnnnnnnnnnnnnnnnnnnnnnnnnnnnnnnnnnnnnnnnnnnnnnnnnnnnnnnnnnnnnnnnnnnnnnnnnnnnnnnnnnnnnnnnnnnnnnnnnnnnnnnnnnnnnnnnnnnnnnnnnnnnnnnnnnnnnnnnnnnnnnnnnnnnnnnnnnnnnnnnnnnnnnnnnnnnnnnnnnnnnnnnnnnnnnnnnnnnnnnnnnnnnnnnnnnnnnnnnnnnnnnnnnnnnnnnnnnnnnnnnnnnnnnnnnnnnnnnnnnnnnnnnnnnnnnnnnnnnnnnnnnnnnnnnnnnnnnnnnnnnnnnnnnnnnnnnnnnnnnnnnnnnnnnnnnnnnnnnnnnnnnnnnnnnnnnnnnnnnnnnnnnnnnnnnnnnnnnnnnnnnnnnnnnnnnnnnnnnnnnnnnnnnnnnnnnnnnnnnnnnnnnnnnnnnnnnnnnnnnnnnnnnnnnnnnnnnnnnnnnnnnnnnnnnnnnnnnnnnnnnnnnnnnnnnnnnnnnnnnnnnnnnnnnnnnnnnnnnnnnnnnnnnnnnnnnnnnnnnnnnnnnnnnnnnnnnnnnnnnnnnnnnnnnnnnnnnnnnnnnnnnnnnnnnnnnnnnnnnnnnnnnnnnnnnnnnnnnnnnnnnnnnnnnnnnnnnnnnnnnnnnnnnnnnnnnnnnnnnnnnnnnnnnnnnnnnnnnnnnnnnnnnnnnnnnnnnnnnnnnnnnnnnnnnnnnnnnnnnnnnnnnnnnnnnnnnnnnnnnnnnnnnnnnnnnnnnnnnnnnnnnnnnnnnnnnnnnnnnnnnnnnnnnnnnnnnnnnnnnnnnnnnnnnnnnnnnnnnnnnnnnnnnnnnnnnnnnnnnnnnnnnnnnnnnnnnnnnnnnnnnnnnnnnnnnnnnnnnnnnnnnnnnnnnnnnnnnnnnnnnnnnnnnnnnnnnnnnnnnnnnnnnnnnnnnnnnnnnnnnnnnnnnnnnnnnnnnnnnnnnnnnnnnnnnnnnnnnnnnnnnnnnnnnnnnnnnnnnnnnnnnnnnnnnnnnnnnnnnnnnnnnnnnnnnnnnnnnnnnnnnnnnnnnnnnnnnnnnnnnnnnnnnnnnnnnnnnnnnnnnnnnnnnnnnnnnnnnnnnnnnnnnnnnnnnnnnnnnnnnnnnnnnnnnnnnnnnnnnnnnnnnnnnnnnnnnnnnnnnnnnnnnnnnnnnnnnnnnnnnnnnnnnnnnnnnnnnnnnnnnnnnnnnnnnnnnnnnnnnnnnnnnnnnnnnnnnnnnnnnnnnnnnnnnnnnnnnnnnnnnnnnnnnnnnnnnnnnnnnnnnnnnnnnnnnnnnnnnnnnnnnnnnnnnnnnnnnnnnnnnnnnnnnnnnnnnnnnnnnnnnnnnnnnnnnnnnnnnnnnnnnnnnnnnnnnnnnnnnnnnnnnnnnnnnnnnnnnnnnnnnnnnnnnnnnnnnnnnnnnnnnnnnnnnnnnnnnnnnnnnnnnnnnnnnnnnnnnnnnnnnnnnnnnnnnnnnnnnnnnnnnnnnnnnnnnnnnnnnnnnnnnnnnnnnnnnnnnnnnnnnnnnnnnnnnnnnnnnnnnnnnnnnnnnnnnnnnnnnnnnnnnnnnnnnnnnnnnnnnnnnnnnnnnnnnnnnnnnnnnnnnnnnnnnnnnnnnnnnnnnnnnnnnnnnnnnnnnnnnnnnnnnnnnnnnnnnnnnnnnnnnnnnnnnnnnnnnnnnnnnnnnnnnnnnnnnnnnnnnnnnnnnnnnnnnnnnnnnnnnnnnnnnnnnnnnnnnnnnnnnnnnnnnnnnnnnnnnnnnnnnnnnnnnnnnnnnnnnnnnnnnnnnnnnnnnnnnnnnnnnnnnnnnnnnnnnnnnnnnnnnnnnnnnnnnnnnnnnnnnnnnnnnnnnnnnnnnnnnnnnnnnnnnnnnnnnnnnnnnnnnnnnnnnnnnnnnnnnnnnnnnnnnnnnnnnnnnnnnnnnnnnnnnnnnnnnnnnnnnnnnnnnnnnnnnnnnnnnnnnnnnnnnnnnnnnnnnnnnnnnnnnnnnnnnnnnnnnnnnnnnnnnnnnnnnnnnnnnnnnnnnnnnnnnnnnnnnnnnnnnnnnnnnnnnnnnnnnnnnnnnnnnnnnnnnnnnnnnnnnnnnnnnnnnnnnnnnnnnnnnnnnnnnnnnnnnnnnnnnnnnnnnnnnnnnnnnnnnnnnnnnnnnnnnnnnnnnnnnnnnnnnnnnnnnnnnnnnnnnnnnnnnnnnnnnnnnnnnnnnnnnnnnnnnnnnnnnnnnnnnnnnnnnnnnnnnnnnnnnnnnnnnnnnnnnnnnnnnnnnnnnnnnnnnnnnnnnnnnnnnnnnnnnnnnnnnnnnnnnnnnnnnnnnnnnnnnnnnnnnnnnnnnnnnnnnnnnnnnnnnnnnnnnnnnnnnnnnnnnnnnnnnnnnnnnnnnnnnnnnnnnnnnnnnnnnnnnnnnnnnnnnnnnnnnnnnnnnnnnnnnnnnnnnnnnnnnnnnnnnnnnnnnnnnnnnnnnnnnnnnnnnnnnnnnnnnnnnnnnnnnnnnnnnnnnnnnnnnnnnnnnnnnnnnnnnnnnnnnnnnnnnnnnnnnnnnnnnnnnnnnnnnnnnnnnnnnnnnnnnnnnnnnnnnnnnnnnnnnnnnnnnnnnnnnnnnnnnnnnnnnnnnnnnnnnnnnnnnnnnnnnnnnnnnnnnnnnnnnnnnnnnnnnnnnnnnnnnnnnnnnnnnnnnnnnnnnnnnnnnnnnnnnnnnnnnnnnnnnnnnnnnnnnnnnnnnnnnnnnnnnnnnnnnnnnnnnnnnnnnnnnnnnnnnnnnnnnnnnnnnnnnnnnnnnnnnnnnnnnnnnnnnnnnnnnnnnnnnnnnnnnnnnnnnnnnnnnnnnnnnnnnnnnnnnnnnnnnnnnnnnnnnnnnnnnnnnnnnnnnnnnnnnnnnnnnnnnnnnnnnnnnnnnnnnnnnnnnnnnnnnnnnnnnnnnnnnnnnnnnnnnnnnnnnnnnnnnnnnnnnnnnnnnnnnnnnnnnnnnnnnnnnnnnnnnnnnnnnnnnnnnnnnnnnnnnnnnnnnnnnnnnnnnnnnnnnnnnnnnnnnnnnnnnnnnnnnnnnnnnnnnnnnnnnnnnnnnnnnnnnnnnnnnnnnnnnnnnnnnnnnnnnnnnnnnnnnnnnnnnnnnnnnnnnnnnnnnnnnnnnnnnnnnnnnnnnnnnnnnnnnnnnnnnnnnnnnnnnnnnnnnnnnnnnnnnnnnnnnnnnnnnnnnnnnnnnnnnnnnnnnnnnnnnnnnnnnnnnnnnnnnnnnnnnnnnnnnnnnnnnnnnnnnnnnnnnnnnnnnnnnnnnnnnnnnnnnnnnnnnnnnnnnnnnnnnnnnnnnnnnnnnnnnnnnnnnnnnnnnnnnnnnnnnnnnnnnnnnnnnnnnnnnnnnnnnnnnnnnnnnnnnnnnnnnnnnnnnnnnnnnnnnnnnnnnnnnnnnnnnnnnnnnnnnnnnnnnnnnnnnnnnnnnnnnnnnnnnnnnnnnnnnnnnnnnnnnnnnnnnnnnnnnnnnnnnnnnnnnnnnnnnnnnnnnnnnnnnnnnnnnnnnnnnnnnnnnnnnnnnnnnnnnnnnnnnnnnnnnnnnnnnnnnnnnnnnnnnnnnnnnnnnnnnnnnnnnnnnnnnnnnnnnnnnnnnnnnnnnnnnnnnnnnnnnnnnnnnnnnnnnnnnnnnnnnnnnnnnnnnnnnnnnnnnnnnnnnnnnnnnnnnnnnnnnnnnnnnnnnnnnnnnnnnnnnnnnnnnnnnnnnnnnnnnnnnnnnnnnnnnnnnnnnnnnnnnnnnnnnnnnnnnnnnnnnnnnnnnnnnnnnnnnnnnnnnnnnnnnnnnnnnnnnnnnnnnnnnnnnnnnnnnnnnnnnnnnnnnnnnnnnnnnnnnnnnnnnnnnnnnnnnnnnnnnnnnnnnnnnnnnnnnnnnnnnnnnnnnnnnnnnnnnnnnnnnnnnnnnnnnnnnnnnnnnnnnnnnnnnnnnnnnnnnnnnnnnnnnnnnnnnnnnnnnnnnnnnnnnnnnnnnnnnnnnnnnnnnnnnnnnnnnnnnnnnnnnnnnnnnnnnnnnnnnnnnnnnnnnnnnnnnnnnnnnnnnnnnnnnnnnnnnnnnnnnnnnnnnnnnnnnnnnnnnnnnnnnnnnnnnnnnnnnnnnnnnnnnnnnnnnnnnnnnnnnnnnnnnnnnnnnnnnnnnnnnnnnnnnnnnnnnnnnnnnnnnnnnnnnnnnnnnnnnnnnnnnnnnnnnnnnnnnnnnnnnnnnnnnnnnnnnnnnnnnnnnnnnnnnnnnnnnnnnnnnnnnnnnnnnnnnnnnnnnnnnnnnnnnnnnnnnnnnnnnnnnnnnnnnnnnnnnnnnnnnnnnnnnnnnnnnnnnnnnnnnnnnnnnnnnnnnnnnnnnnnnnnnnnnnnnnnnnnnnnnnnnnnnnnnnnnnnnnnnnnnnnnnnnnnnnnnnnnnnnnnnnnnnnnnnnnnnnnnnnnnnnnnnnnnnnnnnnnnnnnnnnnnnnnnnnnnnnnnnnnnnnnnnnnnnnnnnnnnnnnnnnnnnnnnnnnnnnnnnnnnnnnnnnnnnnnnnnnnnnnnnnnnnnnnnnnnnnnnnnnnnnnnnnnnnnnnnnnnnnnnnnnnnnnnnnnnnnnnnnnnnnnnnnnnnnnnnnnnnnnnnnnnnnnnnnnnnnnnnnnnnnnnnnnnnnnnnnnnnnnnnnnnnnnnnnnnnnnnnnnnnnnnnnnnnnnnnnnnnnnnnnnnnnnnnnnnnnnnnnnnnnnnnnnnnnnnnnnnnnnnnnnnnnnnnnnnnnnnnnnnnnnnnnnnnnnnnnnnnnnnnnnnnnnnnnnnnnnnnnnnnnnnnnnnnnnnnnnnnnnnnnnnnnnnnnnnnnnnnnnnnnnnnnnnnnnnnnnnnnnnnnnnnnnnnnnnnnnnnnnnnnnnnnnnnnnnnnnnnnnnnnnnnnnnnnnnnnnnnnnnnnnnnnnnnnnnnnnnnnnnnnnnnnnnnnnnnnnnnnnnnnnnnnnnnnnnnnnnnnnnnnnnnnnnnnnnnnnnnnnnnnnnnnnnnnnnnnnnnnnnnnnnnnnnnnnnnnnnnnnnnnnnnnnnnnnnnnnnnnnnnnnnnnnnnnnnnnnnnnnnnnnnnnnnnnnnnnnnnnnnnnnnnnnnnnnnnnnnnnnnnnnnnnnnnnnnnnnnnnnnnnnnnnnnnnnnnnnnnnnnnnnnnnnnnnnnnnnnnnnnnnnnnnnnnnnnnnnnnnnnnnnnnnnnnnnnnnnnnnnnnnnnnnnnnnnnnnnnnnnnnnnnnnnnnnnnnnnnnnnnnnnnnnnnnnnnnnnnnnnnnnnnnnnnnnnnnnnnnnnnnnnnnnnnnnnnnnnnnnnnnnnnnnnnnnnnnnnnnnnnnnnnnnnnnnnnnnnnnnnnnnnnnnnnnnnnnnnnnnnnnnnnnnnnnnnnnnnnnnnnnnnnnnnnnnnnnnnnnnnnnnnnnnnnnnnnnnnnnnnnnnnnnnnnnnnnnnnnnnnnnnnnnnnnnnnnnnnnnnnnnnnnnnnnnnnnnnnnnnnnnnnnnnnnnnnnnnnnnnnnnnnnnnnnnnnnnnnnnnnnnnnnnnnnnnnnnnnnnnnnnnnnnnnnnnnnnnnnnnnnnnnnnnnnnnnnnnnnnnnnnnnnnnnnnnnnnnnnnnnnnnnnnnnnnnnnnnnnnnnnnnnnnnnnnnnnnnnnnnnnnnnnnnnnnnnnnnnnnnnnnnnnnnnnnnnnnnnnnnnnnnnnnnnnnnnnnnnnnnnnnnnnnnnnnnnnnnnnnnnnnnnnnnnnnnnnnnnnnnnnnnnnnnnnnnnnnnnnnnnnnnnnnnnnnnnnnnnnnnnnnnnnnnnnnnnnnnnnnnnnnnnnnnnnnnnnnnnnnnnnnnnnnnnnnnnnnnnnnnnnnnnnnnnnnnnnnnnnnnnnnnnnnnnnnnnnnnnnnnnnnnnnnnnnnnnnnnnnnnnnnnnnnnnnnnnnnnnnnnnnnnnnnnnnnnnnnnnnnnnnnnnnnnnnnnnnnnnnnnnnnnnnnnnnnnnnnnnnnnnnnnnnnnnnnnnnnnnnnnnnnnnnnnnnnnnnnnnnnnnnnnnnnnnnnnnnnnnnnnnnnnnnnnnnnnnnnnnnnnnnnnnnnnnnnnnnnnnnnnnnnnnnnnnnnnnnnnnnnnnnnnnnnnnnnnnnnnnnnnnnnnnnnnnnnnnnnnnnnnnnnnnnnnnnnnnnnnnnnnnnnnnnnnnnnnnnnnnnnnnnnnnnnnnnnnnnnnnnnnnnnnnnnnnnnnnnnnnnnnnnnnnnnnnnnnnnnnnnnnnnnnnnnnnnnnnnnnnnnnnnnnnnnnnnnnnnnnnnnnnnnnnnnnnnnnnnnnnnnnnnnnnnnnnnnnnnnnnnnnnnnnnnnnnnnnnnnnnnnnnnnnnnnnnnnnnnnnnnnnnnnnnnnnnnnnnnnnnnnnnnnnnnnnnnnnnnnnnnnnnnnnnnnnnnnnnnnnnnnnnnnnnnnnnnnnnnnnnnnnnnnnnnnnnnnnnnnnnnnnnnnnnnnnnnnnnnnnnnnnnnnnnnnnnnnnnnnnnnnnnnnnnnnnnnnnnnnnnnnnnnnnnnnnnnnnnnnnnnnnnnnnnnnnnnnnnnnnnnnnnnnnnnnnnnnnnnnnnnnnnnnnnnnnnnnnnnnnnnnnnnnnnnnnnnnnnnnnnnnnnnnnnnnnnnnnnnnnnnnnnnnnnnnnnnnnnnnnnnnnnnnnnnnnnnnnnnnnnnnnnnnnnnnnnnnnnnnnnnnnnnnnnnnnnnnnnnnnnnnnnnnnnnnnnnnnnnnnnnnnnnnnnnnnnnnnnnnnnnnnnnnnnnnnnnnnnnnnnnnnnnnnnnnnnnnnnnnnnnnnnnnnnnnnnnnnnnnnnnnnnnnnnnnnnnnnnnnnnnnnnnnnnnnnnnnnnnnnnnnnnnnnnnnnnnnnnnnnnnnnnnnnnnnnnnnnnnnnnnnnnnnnnnnnnnnnnnnnnnnnnnnnnnnnnnnnnnnnnnnnnnnnnnnnnnnnnnnnnnnnnnnnnnnnnnnnnnnnnnnnnnnnnnnnnnnnnnnnnnnnnnnnnnnnnnnnnnnnnnnnnnnnnnnnnnnnnnnnnnnnnnnnnnnnnnnnnnnnnnnnnnnnnnnnnnnnnnnnnnnnnnnnnnnnnnnnnnnnnnnnnnnnnnnnnnnnnnnnnnnnnnnnnnnnnnnnnnnnnnnnnnnnnnnnnnnnnnnnnnnnnnnnnnnnnnnnnnnnnnnnnnnnnnnnnnnnnnnnnnnnnnnnnnnnnnnnnnnnnnnnnnnnnnnnnnnnnnnnnnnnnnnnnnnnnnnnnnnnnnnnnnnnnnnnnnnnnnnnnnnnnnnnnnnnnnnnnnnnnnnnnnnnnnnnnnnnnnnnnnnnnnnnnnnnnnnnnnnnnnnnnnnnnnnnnnnnnnnnnnnnnnnnnnnnnnnnnnnnnnnnnnnnnnnnnnnnnnnnnnnnnnnnnnnnnnnnnnnnnnnnnnnnnnnnnnnnnnnnnnnnnnnnnnnnnnnnnnnnnnnnnnnnnnnnnnnnnnnnnnnnnnnnnnnnnnnnnnnnnnnnnnnnnnnnnnnnnnnnnnnnnnnnnnnnnnnnnnnnnnnnnnnnnnnnnnnnnnnnnnnnnnnnnnnnnnnnnnnnnnnnnnnnnnnnnnnnnnnnnnnnnnnnnnnnnnnnnnnnnnnnnnnnnnnnnnnnnnnnnnnnnnnnnnnnnnnnnnnnnnnnnnnnnngttctagatggcaggtataaaaacatagaggcctttgtacccaagcgattccgtagtgggtggacaagcaaacagttcttagagggcagtagacgtgaactggtcttgtccaaaatagaacgtgatccatcagtccgtaaagaagcactaaaacgctttggtcatgaatgcatgtgttgtggctttcatccaaaggtgatctctcagttagatgtgcatcacctatcccccttgagtgaaggcggcgaaagactcacagcaattagcgatcttgcagttctctgcgctaactgtcaccgactcgcccactcaacttcaccaccgttaagtattgatgctatgaaggcgttgagatgaggtagtggccttttttcgggtcacgttaccaagttgctactggcaaacacagcgccactcgtatcgtccggttgcctgattgaagacttgcttttgagtgcactggctcgtacctaggggtggcagttgtaacgacggcattggttggattgatggcggagtcattgggcacatcccgatgcatatagcttggtcgaacttattttaattggggggttgactttttaccgcccacgagtaaaagcattactggaagtccaagtgcaacgccacttcgggctagatgtctggcgctaaagatgaagacccccatcctacttacagaaacatagtgacatacaaaataagagtaaataaatgacaaatcgtcctaagggttggttggctgcgctgctttcgctaggttttccgcctatcggctttttatacgtgggccggtggaggtgggcgatattgagtttgctgcctattggcgtatttgccggcactacttacgcgtttcctaaagtgcatttggaggaaatgtggtgggttgttgacatattttcttgggtcttttctggcatatgcgcatggattgcctataaggaggcggcccgatttggtgcagaccggatccgtcctggctatagcaaatggtatggattgcttgcaacagcaatcgtgatacctagttcagtcattggtgttcgcgcttttttattcgagccgttcagaattcccgctcgaagcatgttgccaacactagacataggggccagaataatagttaaaaaatggggatatgggaactacgcaactttcggatttcagctatttcatgctaaacccagtgttgctttgaatcgaggtgatctcattgtctttgaatacccgcccaatcgggatataaactacatcaaacggctagttggcctacctggtgatacggtggcttacctcaataagcgccttacgataaacggtcagtctgtttctataactgacttaccggattactacgatgaacaaagtatgagatatttcaaacagtttgaagaagcattaggtgatacgagatatagattgctaaatgaggtcgatcgacctgcttttgtgcctggtgctgaacaatttttggggcgcgaatggtgtcgctatacgattgatggtttcatctgcaaagtgcccttaggcaactatttcatgcttggtgacaatcgggacaattcgttggactctcgctactggggttttgtaccttcagaccacatcgttgggaaagttgtctatattattcaatagcgtagcaaacataggttttgaaaccactgaaggaaatctctaggcgtcttgtatttagaagggcaaggggtggtgcaccgcgacattgttgccaagcgcatgaccccgcagcaaatcgctgacgcgcaaaaactggcgcgggattgtttggctcggaatttcaagggctgcgactagtgtcggttgccaaggttcaaacaatgggggggtgttcatgcgaaagtccattttggtattcgcggtttacttagcagttagtgtggacgctgcacgctagttgtagctggatgatataacctctgtgagtactgacggcaaagtacacaaataaataattaatattttcactaaagattacacatgaaaaatatcaaaaaatctataattactgctggatttttattactgattaccggctgtggaacaacatcaaatgtcggttacgtttggtttggcactggtatcaatgacgattggggtactggaggtaatatttggagccatttttcctcctactctcagcaaagtgtcaatcaggttgctactgaatactgttcaagaaaaaatttaccacccccaactgtaactaccatctcaagtccatcatttgtggtctccgagtattacatgttcagatttcagtgtgataaaaatgctatgccacgcactacagttccacaatccatacaacaaggtaaattatcattgaacgaagcaaaaaataagtgcattgatttggggtttaaagcaaatactgaggaattgggaaaatgcgtattacaactatcaaaataggactggcactcagtctttgttcattaaatgggtttgctgttgacttaactctttttgaaaaccaatgcgctgagattggttttacaaggaatacgcctgcatttgggagttgtgttttagatttgcattcacgtgaattcaattcaaatccaagtcaaaaactgtatcaacaaccagcttcggagttttctaggcaaaatgaattgtctagggaagcgttagacgaagctaggaaagctcggcaagaggccgcaacagcgcggcgagaggctgatgagtaccgaaaaaggatagaagcacaaaaacgacaagaccaatttgatgaacagagaagacttctctgggatagcaatgaaaaggcaatgcgtgaaagttggcgacgtccctgaaagaattaaaagagggacagtttttacgcctcattaaaaaaaacttcgctattaaggtgcttagtgaattgggtgagtttaaaaatagggtttagtctgtctataaattgagaattaaatgaataaattttcgacgctcctcattcctctgataattgtatcagtcagtacatttgccacaccgttaacggctcaggaaaagctagaatttcaaaaaagcagtgtgccttcttgcatagcaaaaaataatgcttccagagatttaactaccttacaaaaagaaggacttaacaattactgcatatgtcatagtgttgtaatgacaagtcttgttactagagaagaaatgatgagtttaggcaaaggtaagctaccgacaacattccaaggtaaggtctcggaggcacagaagcaatgtatcaaagcattgtctaattaatcaacatgcaatatttaactttatctgttggcgcagttttattgttgcctcttagcgtgtttgctcaaatgggcgctagaatgccaccaattgattatgatgagggagcatttaggaatccctctgattggtggtggactgtcctaattattgcaaactttattattgctccgtatttaataacaagaaaagaccttgactttggtggtgttgcatactttaaatggttcattgcgcttttcattacttttgttatttctcttcttttaattccattgttcgtaaataaaaatgattatatgttctggactattgctattcagttgggagttactagctatggatttataactaacaaaaaatagtttggtaaaattatattccgccagtagtgtgcatgcacaaaatgaacgagtagggcctaatcaagtcccaccctcatcgcgatctagttcatttatcaagcaactccacgacattgctttgcaaaaactgcggcttgaagctctgggtaaacctcagacatcctagtcggcttcggaccacgagtccgtgcgccgctcataaagcccaactgatgtcctactgcctcaagtacagcaaggcgggcactgactagactacgctccgttcgcgcttggcgtgtttcattgccgagtatggttcgcgcgtcggcacagcgctgccgaccggcttgggtctggggcccggttgacttgccgccatgggtcttgcagacccgcttaccttttatcgcgggggcacggcactgctgcttggtgcgcttggacatggcttggcactgctggcaggtgatgcggccaccgagggtctggaaggtttgttctatatgtaaagtgttcgacattgttttgcaccttgtgtgggggtcgaggggacggaggatttttaatgtgccaaggacctcatgtgtggggaagccagggttgccggacttgccggggtttttcggaaaactttctacattttcttttttttaatactttttcaaaaagcatggcaagactggctaaatagggcttcctcctcgggaattcagacaagttgggtggcaagcgatatggcaagcggtggctagtctggcaagcaatcattacgcctcctcccactcaagctgaaccgaaaacgctgtctcaaactgtgaacgcgcgacgtccagtggtggcagcttgaacccacgaagctgcttgccatttaagttagctctatccttcttcaaactcgggcaaagccgcttcagcgcattggtaacttgtgctacttgaagggtctcatagcgttctgagttcctatcgtaggccttgaagccctgcatcaagctattactcgaaacaaagtccccatgtatccaatccgtgtcaaatagggagggcgagtaagtgtgaagttgcatgaattttccgaggcaaaggacttcgtaccagtaccgatcgaatccagttagggagagcaatttttgcttgtcgtgctctcgggttagaggcctactccgaacgttaaaactacttaaatctatatgcatcaggtcatccagcatcgccccaatgaccgccgcatcattcagcgccacgttaagttgtgcaaagtagtcgtggtcattttggcgtgaagccgacacgcgaatgaagagcgaacggcggtcatccccttctatgcgggagaagtgctcatggttactggcggcaaaaattcgatgtactgaatcgatagttcgcgacggttggtacttctgttcaacccgtaatgtcttttctgtcaccagtgacttcagtcggtcctgcgattttttatctccgctaaaaatcgcctcatccatacaaatggcgaaattgcgctcaagcgcagcgttgaattgaccgaccacttgagcgatatctgacaccactagcgtggttctaggccatagcttcgagagcaattgaaagaacatgcctttgcccgtaccctggcggccaaggaaaataatcaccacgcccggcttttcctcggggcgttggaccatgtgagccaagaaacgaattaggtactgatagagggccttattgccgtcgcagatgacgttctgtaaatattcttggatcaaatcccatggcccgttttgtggcttaacaagcgggcctatccagtaattcagcgttgtgcctggcgtgtttaaaggagaaaacgcaatttggtcgagcacgtgtgtatgtggatttgtccagaaatctcttagggtctctttgacgtgattcgatgggatgggctggccttctaggaacctacgcatcaacatctcagcgtctaccttcttccaaaatgagatgtcaccgtttttgttaccgtttaggatttcatcgacttcggctcgttcgacaaccctaatttccccgctcagcttcagcagatggaaatgaagctgtaagacgctaagtgcggcgtttcccgactgaggtgatgcattagtcattccaccctcccagtcgagcgtgatgccagacggtgcctaacgtgatttggtttgggtgatccggaatgtaagagttagcgaggacccaaaacgcgtcgaaatcaaatcgctcgggggcggtctcgctccactcaagcgcaaggtcttccgcacaaagccagcctgtgctcaggattgcccagactatgttccgccaagtgtcccgcccacagtcagcgctaataaagccaagcgcgtctttcaagatggctatctgacgaggtgtctctggtcgtaggtgatgttctacagaacaagtctttcgccgaagtgccacgcgactaccgttggaaattagttctagccagaccttaagcagatacgctggaatttcaggcatgtgcgctgggtctccgtcacccacccacctgtactgatggccgtccgggtgaatgcttggcggcagcacatcctgcacagtcttcccatctttggtggcacagcggaactcaagtgccgaggctccgtcaggcccgactattttcttggactccaatgggctgatgtctgcgggtagcctgtacagaagcttcatgctgttcttcttgcccgacaagatgacaaccgcatcttgcgccgaccaaaggctatcgaggtcgatgtcgtgcgaggctagccaatccttggcatgagggtaatggtcaacgtccaaagcgcatgtaggcgagggcgtgcagtacgcgtg

SEQ ID NO: 80 - DNA, 16457 bp, Artificial Sequence; identical to SEQ ID NO: 79
  Synthetic Oligonucleotide
  misc_feature (1)..(9999): n is a, c, g, or t

SEQ ID NO: 81 - DNA, 16388 bp, Artificial Sequence
  Synthetic Oligonucleotide
  misc_feature (1)..(9362): n is a, c, g, or t
  misc_feature (9988)..(9997): n is a, c, g, or t
nnnnnnnnnnnnnnnnnnnnnnnnnnnnnnnnnnnnnnnnnnnnnnnnnnnnnnnnnnnnnnnnnnnnnnnnnnnnnnnnnnnnnnnnnnnnnnnnnnnnnnnnnnnnnnnnnnnnnnnnnnnnnnnnnnnnnnnnnnnnnnnnnnnnnnnnnnnnnnnnnnnnnnnnnnnnnnnnnnnnnnnnnnnnnnnnnnnnnnnnnnnnnnnnnnnnnnnnnnnnnnnnnnnnnnnnnnnnnnnnnnnnnnnnnnnnnnnnnnnnnnnnnnnnnnnnnnnnnnnnnnnnnnnnnnnnnnnnnnnnnnnnnnnnnnnnnnnnnnnnnnnnnnnnnnnnnnnnnnnnnnnnnnnnnnnnnnnnnnnnnnnnnnnnnnnnnnnnnnnnnnnnnnnnnnnnnnnnnnnnnnnnnnnnnnnnnnnnnnnnnnnnnnnnnnnnnnnnnnnnnnnnnnnnnnnnnnnnnnnnnnnnnnnnnnnnnnnnnnnnnnnnnnnnnnnnnnnnnnnnnnnnnnnnnnnnnnnnnnnnnnnnnnnnnnnnnnnnnnnnnnnnnnnnnnnnnnnnnnnnnnnnnnnnnnnnnnnnnnnnnnnnnnnnnnnnnnnnnnnnnnnnnnnnnnnnnnnnnnnnnnnnnnnnnnnnnnnnnnnnnnnnnnnnnnnnnnnnnnnnnnnnnnnnnnnnnnnnnnnnnnnnnnnnnnnnnnnnnnnnnnnnnnnnnnnnnnnnnnnnnnnnnnnnnnnnnnnnnnnnnnnnnnnnnnnnnnnnnnnnnnnnnnnnnnnnnnnnnnnnnnnnnnnnnnnnnnnnnnnnnnnnnnnnnnnnnnnnnnnnnnnnnnnnnnnnnnnnnnnnnnnnnnnnnnnnnnnnnnnnnnnnnnnnnnnnnnnnnnnnnnnnnnnnnnnnnnnnnnnnnnnnnnnnnnnnnnnnnnnnnnnnnnnnnnnnnnnnnnnnnnnnnnnnnnnnnnnnnnnnnnnnnnnnnnnnnnnnnnnnnnnnnnnnnnnnnnnnnnnnnnnnnnnnnnnnnnnnnnnnnnnnnnnnnnnnnnnnnnnnnnnnnnnnnnnnnnnnnnnnnnnnnnnnnnnnnnnnnnnnnnnnnnnnnnnnnnnnnnnnnnnnnnnnnnnnnnnnnnnnnnnnnnnnnnnnnnnnnnnnnnnnnnnnnnnnnnnnnnnnnnnnnnnnnnnnnnnnnnnnnnnnnnnnnnnnnnnnnnnnnnnnnnnnnnnnnnnnnnnnnnnnnnnnnnnnnnnnnnnnnnnnnnnnnnnnnnnnnnnnnnnnnnnnnnnnnnnnnnnnnnnnnnnnnnnnnnnnnnnnnnnnnnnnnnnnnnnnnnnnnnnnnnnnnnnnnnnnnnnnnnnnnnnnnnnnnnnnnnnnnnnnnnnnnnnnnnnnnnnnnnnnnnnnnnnnnnnnnnnnnnnnnnnnnnnnnnnnnnnnnnnnnnnnnnnnnnnnnnnnnnnnnnnnnnnnnnnnnnnnnnnnnnnnnnnnnnnnnnnnnnnnnnnnnnnnnnnnnnnnnnnnnnnnnnnnnnnnnnnnnnnnnnnnnnnnnnnnnnnnnnnnnnnnnnnnnnnnnnnnnnnnnnnnnnnnnnnnnnnnnnnnnnnnnnnnnnnnnnnnnnnnnnnnnnnnnnnnnnnnnnnnnnnnnnnnnnnnnnnnnnnnnnnnnnnnnnnnnnnnnnnnnnnnnnnnnnnnnnnnnnnnnnnnnnnnnnnnnnnnnnnnnnnnnnnnnnnnnnnnnnnnnnnnnnnnnnnnnnnnnnnnnnnnnnnnnnnnnnnnnnnnnnnnnnnnnnnnnnnnnnnnnnnnnnnnnnnnnnnnnnnnnnnnnnnnnnnnnnnnnnnnnnnnnnnnnnnnnnnnnnnnnnnnnnnnnnnnnnnnnnnnnnnnnnnnnnnnnnnnnnnnnnnnnnnnnnnnnnnnnnnnnnnnnnnnnnnnnnnnnnnnnnnnnnnnnnnnnnnnnnnnnnnnnnnnnnnnnnnnnnnnnnnnnnnnnnnnnnnnnnnnnnnnnnnnnnnnnnnnnnnnnnnnnnnnnnnnnnnnnnnnnnnnnnnnnnnnnnnnnnnnnnnnnnnnnnnnnnnnnnnnnnnnnnnnnnnnnnnnnnnnnnnnnnnnnnnnnnnnnnnnnnnnnnnnnnnnnnnnnnnnnnnnnnnnnnnnnnnnnnnnnnnnnnnnnnnnnnnnnnnnnnnnnnnnnnnnnnnnnnnnnnnnnnnnnnnnnnnnnnnnnnnnnnnnnnnnnnnnnnnnnnnnnnnnnnnnnnnnnnnnnnnnnnnnnnnnnnnnnnnnnnnnnnnnnnnnnnnnnnnnnnnnnnnnnnnnnnnnnnnnnnnnnnnnnnnnnnnnnnnnnnnnnnnnnnnnnnnnnnnnnnnnnnnnnnnnnnnnnnnnnnnnnnnnnnnnnnnnnnnnnnnnnnnnnnnnnnnnnnnnnnnnnnnnnnnnnnnnnnnnnnnnnnnnnnnnnnnnnnnnnnnnnnnnnnnnnnnnnnnnnnnnnnnnnnnnnnnnnnnnnnnnnnnnnnnnnnnnnnnnnnnnnnnnnnnnnnnnnnnnnnnnnnnnnnnnnnnnnnnnnnnnnnnnnnnnnnnnnnnnnnnnnnnnnnnnnnnnnnnnnnnnnnnnnnnnnnnnnnnnnnnnnnnnnnnnnnnnnnnnnnnnnnnnnnnnnnnnnnnnnnnnnnnnnnnnnnnnnnnnnnnnnnnnnnnnnnnnnnnnnnnnnnnnnnnnnnnnnnnnnnnnnnnnnnnnnnnnnnnnnnnnnnnnnnnnnnnnnnnnnnnnnnnnnnnnnnnnnnnnnnnnnnnnnnnnnnnnnnnnnnnnnnnnnnnnnnnnnnnnnnnnnnnnnnnnnnnnnnnnnnnnnnnnnnnnnnnnnnnnnnnnnnnnnnnnnnnnnnnnnnnnnnnnnnnnnnnnnnnnnnnnnnnnnnnnnnnnnnnnnnnnnnnnnnnnnnnnnnnnnnnnnnnnnnnnnnnnnnnnnnnnnnnnnnnnnnnnnnnnnnnnnnnnnnnnnnnnnnnnnnnnnnnnnnnnnnnnnnnnnnnnnnnnnnnnnnnnnnnnnnnnnnnnnnnnnnnnnnnnnnnnnnnnnnnnnnnnnnnnnnnnnnnnnnnnnnnnnnnnnnnnnnnnnnnnnnnnnnnnnnnnnnnnnnnnnnnnnnnnnnnnnnnnnnnnnnnnnnnnnnnnnnnnnnnnnnnnnnnnnnnnnnnnnnnnnnnnnnnnnnnnnnnnnnnnnnnnnnnnnnnnnnnnnnnnnnnnnnnnnnnnnnnnnnnnnnnnnnnnnnnnnnnnnnnnnnnnnnnnnnnnnnnnnnnnnnnnnnnnnnnnnnnnnnnnnnnnnnnnnnnnnnnnnnnnnnnnnnnnnnnnnnnnnnnnnnnnnnnnnnnnnnnnnnnnnnnnnnnnnnnnnnnnnnnnnnnnnnnnnnnnnnnnnnnnnnnnnnnnnnnnnnnnnnnnnnnnnnnnnnnnnnnnnnnnnnnnnnnnnnnnnnnnnnnnnnnnnnnnnnnnnnnnnnnnnnnnnnnnnnnnnnnnnnnnnnnnnnnnnnnnnnnnnnnnnnnnnnnnnnnnnnnnnnnnnnnnnnnnnnnnnnnnnnnnnnnnnnnnnnnnnnnnnnnnnnnnnnnnnnnnnnnnnnnnnnnnnnnnnnnnnnnnnnnnnnnnnnnnnnnnnnnnnnnnnnnnnnnnnnnnnnnnnnnnnnnnnnnnnnnnnnnnnnnnnnnnnnnnnnnnnnnnnnnnnnnnnnnnnnnnnnnnnnnnnnnnnnnnnnnnnnnnnnnnnnnnnnnnnnnnnnnnnnnnnnnnnnnnnnnnnnnnnnnnnnnnnnnnnnnnnnnnnnnnnnnnnnnnnnnnnnnnnnnnnnnnnnnnnnnnnnnnnnnnnnnnnnnnnnnnnnnnnnnnnnnnnnnnnnnnnnnnnnnnnnnnnnnnnnnnnnnnnnnnnnnnnnnnnnnnnnnnnnnnnnnnnnnnnnnnnnnnnnnnnnnnnnnnnnnnnnnnnnnnnnnnnnnnnnnnnnnnnnnnnnnnnnnnnnnnnnnnnnnnnnnnnnnnnnnnnnnnnnnnnnnnnnnnnnnnnnnnnnnnnnnnnnnnnnnnnnnnnnnnnnnnnnnnnnnnnnnnnnnnnnnnnnnnnnnnnnnnnnnnnnnnnnnnnnnnnnnnnnnnnnnnnnnnnnnnnnnnnnnnnnnnnnnnnnnnnnnnnnnnnnnnnnnnnnnnnnnnnnnnnnnnnnnnnnnnnnnnnnnnnnnnnnnnnnnnnnnnnnnnnnnnnnnnnnnnnnnnnnnnnnnnnnnnnnnnnnnnnnnnnnnnnnnnnnnnnnnnnnnnnnnnnnnnnnnnnnnnnnnnnnnnnnnnnnnnnnnnnnnnnnnnnnnnnnnnnnnnnnnnnnnnnnnnnnnnnnnnnnnnnnnnnnnnnnnnnnnnnnnnnnnnnnnnnnnnnnnnnnnnnnnnnnnnnnnnnnnnnnnnnnnnnnnnnnnnnnnnnnnnnnnnnnnnnnnnnnnnnnnnnnnnnnnnnnnnnnnnnnnnnnnnnnnnnnnnnnnnnnnnnnnnnnnnnnnnnnnnnnnnnnnnnnnnnnnnnnnnnnnnnnnnnnnnnnnnnnnnnnnnnnnnnnnnnnnnnnnnnnnnnnnnnnnnnnnnnnnnnnnnnnnnnnnnnnnnnnnnnnnnnnnnnnnnnnnnnnnnnnnnnnnnnnnnnnnnnnnnnnnnnnnnnnnnnnnnnnnnnnnnnnnnnnnnnnnnnnnnnnnnnnnnnnnnnnnnnnnnnnnnnnnnnnnnnnnnnnnnnnnnnnnnnnnnnnnnnnnnnnnnnnnnnnnnnnnnnnnnnnnnnnnnnnnnnnnnnnnnnnnnnnnnnnnnnnnnnnnnnnnnnnnnnnnnnnnnnnnnnnnnnnnnnnnnnnnnnnnnnnnnnnnnnnnnnnnnnnnnnnnnnnnnnnnnnnnnnnnnnnnnnnnnnnnnnnnnnnnnnnnnnnnnnnnnnnnnnnnnnnnnnnnnnnnnnnnnnnnnnnnnnnnnnnnnnnnnnnnnnnnnnnnnnnnnnnnnnnnnnnnnnnnnnnnnnnnnnnnnnnnnnnnnnnnnnnnnnnnnnnnnnnnnnnnnnnnnnnnnnnnnnnnnnnnnnnnnnnnnnnnnnnnnnnnnnnnnnnnnnnnnnnnnnnnnnnnnnnnnnnnnnnnnnnnnnnnnnnnnnnnnnnnnnnnnnnnnnnnnnnnnnnnnnnnnnnnnnnnnnnnnnnnnnnnnnnnnnnnnnnnnnnnnnnnnnnnnnnnnnnnnnnnnnnnnnnnnnnnnnnnnnnnnnnnnnnnnnnnnnnnnnnnnnnnnnnnnnnnnnnnnnnnnnnnnnnnnnnnnnnnnnnnnnnnnnnnnnnnnnnnnnnnnnnnnnnnnnnnnnnnnnnnnnnnnnnnnnnnnnnnnnnnnnnnnnnnnnnnnnnnnnnnnnnnnnnnnnnnnnnnnnnnnnnnnnnnnnnnnnnnnnnnnnnnnnnnnnnnnnnnnnnnnnnnnnnnnnnnnnnnnnnnnnnnnnnnnnnnnnnnnnnnnnnnnnnnnnnnnnnnnnnnnnnnnnnnnnnnnnnnnnnnnnnnnnnnnnnnnnnnnnnnnnnnnnnnnnnnnnnnnnnnnnnnnnnnnnnnnnnnnnnnnnnnnnnnnnnnnnnnnnnnnnnnnnnnnnnnnnnnnnnnnnnnnnnnnnnnnnnnnnnnnnnnnnnnnnnnnnnnnnnnnnnnnnnnnnnnnnnnnnnnnnnnnnnnnnnnnnnnnnnnnnnnnnnnnnnnnnnnnnnnnnnnnnnnnnnnnnnnnnnnnnnnnnnnnnnnnnnnnnnnnnnnnnnnnnnnnnnnnnnnnnnnnnnnnnnnnnnnnnnnnnnnnnnnnnnnnnnnnnnnnnnnnnnnnnnnnnnnnnnnnnnnnnnnnnnnnnnnnnnnnnnnnnnnnnnnnnnnnnnnnnnnnnnnnnnnnnnnnnnnnnnnnnnnnnnnnnnnnnnnnnnnnnnnnnnnnnnnnnnnnnnnnnnnnnnnnnnnnnnnnnnnnnnnnnnnnnnnnnnnnnnnnnnnnnnnnnnnnnnnnnnnnnnnnnnnnnnnnnnnnnnnnnnnnnnnnnnnnnnnnnnnnnnnnnnnnnnnnnnnnnnnnnnnnnnnnnnnnnnnnnnnnnnnnnnnnnnnnnnnnnnnnnnnnnnnnnnnnnnnnnnnnnnnnnnnnnnnnnnnnnnnnnnnnnnnnnnnnnnnnnnnnnnnnnnnnnnnnnnnnnnnnnnnnnnnnnnnnnnnnnnnnnnnnnnnnnnnnnnnnnnnnnnnnnnnnnnnnnnnnnnnnnnnnnnnnnnnnnnnnnnnnnnnnnnnnnnnnnnnnnnnnnnnnnnnnnnnnnnnnnnnnnnnnnnnnnnnnnnnnnnnnnnnnnnnnnnnnnnnnnnnnnnnnnnnnnnnnnnnnnnnnnnnnnnnnnnnnnnnnnnnnnnnnnnnnnnnnnnnnnnnnnnnnnnnnnnnnnnnnnnnnnnnnnnnnnnnnnnnnnnnnnnnnnnnnnnnnnnnnnnnnnnnnnnnnnnnnnnnnnnnnnnnnnnnnnnnnnnnnnnnnnnnnnnnnnnnnnnnnnnnnnnnnnnnnnnnnnnnnnnnnnnnnnnnnnnnnnnnnnnnnnnnnnnnnnnnnnnnnnnnnnnnnnnnnnnnnnnnnnnnnnnnnnnnnnnnnnnnnnnnnnnnnnnnnnnnnnnnnnnnnnnnnnnnnnnnnnnnnnnnnnnnnnnnnnnnnnnnnnnnnnnnnnnnnnnnnnnnnnnnnnnnnnnnnnnnnnnnnnnnnnnnnnnnnnnnnnnnnnnnnnnnnnnnnnnnnnnnnnnnnnnnnnnnnnnnnnnnnnnnnnnnnnnnnnnnnnnnnnnnnnnnnnnnnnnnnnnnnnnnnnnnnnnnnnnnnnnnnnnnnnnnnnnnnnnnnnnnnnnnnnnnnnnnnnnnnnnnnnnnnnnnnnnnnnnnnnnnnnnnnnnnnnnnnnnnnnnnnnnnnnnnnnnnnnnnnnnnnnnnnnnnnnnnnnnnnnnnnnnnnnnnnnnnnnnnnnnnnnnnnnnnnnnnnnnnnnnnnnnnnnnnnnnnnnnnnnnnnnnnnnnnnnnnnnnnnnnnnnnnnnnnnnnnnnnnnnnnnnnnnnnnnnnnnnnnnnnnnnnnnnnnnnnnnnnnnnnnnnnnnnnnnnnnnnnnnnnnnnnnnnnnnnnnnnnnnnnnnnnnnnnnnnnnnnnnnnnnnnnnnnnnnnnnnnnnnnnnnnnnnnnnnnnnnnnnnnnnnnnnnnnnnnnnnnnnnnnnnnnnnnnnnnnnnnnnnnnnnnnnnnnnnnnnnnnnnnnnnnnnnnnnnnnnnnnnnnnnnnnnnnnnnnnnnnnnnnnnnnnnnnnnnnnnnnnnnnnnnnnnnnnnnnnnnnnnnnnnnnnnnnnnnnnnnnnnnnnnnnnnnnnnnnnnnnnnnnnnnnnnnnnnnnnnnnnnnnnnnnnnnnnnnnnnnnnnnnnnnnnnnnnnnnnnnnnnnnnnnnnnnnnnnnnnnnnnnnnnnnnnnnnnnnnnnnnnnnnnnnnnnnnnnnnnnnnnnnnnnnnnnnnnnnnnnnnnnnnnnnnnnnnnnnnnnnnnnnnnnnnnnnnnnnnnnnnnnnnnnnnnnnnnnnnnnnnnnnnnnnnnnnnnnnnnnnnnnnnnnnnnnnnnnnnnnnnnnnnnnnnnnnnnnnnnnnnnnnnnnnnnnnnnnnnnnnnnnnnnnnnnnnnnnnnnnnnnnnnnnnnnnnnnnnnnnnnnnnnnnnnnnnnnnnnnnnnnnnnnnnnnnnnnnnnnnnnnnnnnnnnnnnnnnnnnnnnnnnnnnnnnnnnnnnnnnnnnnnnnnnnnnnnnnnnnnnnnnnnnnnnnnnnnnnnnnnnnnnnnnnnnnnnnnnnnnnnnnnnnnnnnnnnnnnnnnnnnnnnnnnnnnnnnnnnnnnnnnnnnnnnnnnnnnnnnnnnnnnnnnnnnnnnnnnnnnnnnnnnnnnnnnnnnnnnnnnnnnnnnnnnnnnnnnnnnnnnnnnnnnnnnnnnnnnnnnnnnnnnnnnnnnnnnnnnnnnnnnnnnnnnnnnnnnnnnnnnnnnnnnnnnnnnnnnnnnnnnnnnnnnnnnnnnnnnnnnnnnnnnnnnnnnnnnnnnnnnnnnnnnnnnnnnnnnnnnnnnnnnnnnnnnnnnnnnnnnnnnnnnnnnnnnnnnnnnnnnnnnnnnnnnnnnnnnnnnnnnnnnnnnnnnnnnnnnnnnnnnnnnnnnnnnnnnnnnnnnnnnnnnnnnnnnnnnnnnnnnnnnnnnnnnnnnnnnnnnnnnnnnnnnnnnnnnnnnnnnnnnnnnnnnnnnnnnnnnnnnnnnnnnnnnnnnnnnnnnnnnnnnnnnnnnnnnnnnnnnnnnnnnnnnnnnnnnnnnnnnnnnnnnnnnnnnnnnnnnnnnnnnnnnnnnnnnnnnnnnnnnnnnnnnnnnnnnnnnnnnnnnnnnnnnnnnnnnnnnnnnnnnnnnnnnnnnnnnnnnnnnnnnnnnnnnnnnnnnnnnnnnnnnnnnnnnnnnnnnnnnnnnnnnnnnnnnnnnnnnnnnnnnnnnnnnnnnnnnnnnnnnnnnnnnnnnnnnnnnnnnnnnnnnnnnnnnnnnnnnnnnnnnnnnnnnnnnnnnnnnnnnnnnnnnnnnnnnnnnnnnnnnnnnnnnnnnnnnnnnnnnnnnnnnnnnnnnnnnnnnnnnnnnnnnnnnnnnnnnnnnnnnnnnnnnnnnnnnnnnnnnnnnnnnnnnnnnnnnnnnnnnnnnnnnnnnnnnnnnnnnnnnnnnnnnnnnnnnnnnnnnnnnnnnnnnnnnnnnnnnnnnnnnnnnnnnnnnnnnnnnnnnnnnnnnnnnnnnnnnnnnnnnnnnnnnnnnnnnnnnnnnnnnnnnnnnnnnnnnnnnnnnnnnnnnnnnnnnnnnnnnnnnnnnnnnnnnnnnnnnnnnnnnnnnnnnnnnnnnnnnnnnnnnnnnnnnnnnnnnnnnnnnnnnnnnnnnnnnnnnnnnnnnnnnnnnnnnnnnnnnnnnnnnnnnnnnnnnnnnnnnnnnnnnnnnnnnnnnnnnnnnnnnnnnnnnnnnnnnnnnnnnnnnnnnnnnnnnnnnnnnnnnnnnnnnnnnnnnnnnnnnnnnnnnnnnnnnnnnnnnnnnnnnnnnnnnnnnnnnnnnnnnnnnnnnnnnnnnnnnnnnnnnnnnnnnnnnnnnnnnnnnnnnnnnnnnnnnnnnnnnnnnnnnnnnnnnnnnnnnnnnnnnnnnnnnnnnnnnnnnnnnnnnnnnnnnnnnnnnnnnnnnnnnnnnnnnnnnnnnnnnnnnnnnnnnnnnnnnnnnnnnnnnnnnnnnnnnnnnnnnnnnnnnnnnnnnnnnnnnnnnnnnnnnnnnnnnnnnnnnnnnnnnnnnnnnnnnnnnnnnnnnnnnnnnnnnnnnnnnnnnnnnnggacaaatgtgtcaatagcagccttcctagcaggagcctcagcaggagtcttaactaactcccttgaataccttgctgttaataaacaaacccaacaggaccttaaaaatgtttcgctcaaaagaacagcagaatttctcaaatatcatcgcggctcacatagccgacggcgatgctcctttgctgttggaggggggaacggggattggtaaaacccgcgcgtatctacactcgctaattcaatctggactgcgtgtcgccattgtatttccaacacaccaactgattgagcaaatgttaaattcggcagacctgattgcgacgcgtgggtcagcgactgtagccgcctttaagcccgcgcggatgtttgaatcgcgatccgattacgagatcaatcgacggttagcgatcgacgcgcaggttatgttttgcacggcggcaagcgtgattattgatcaacgggccggcggtgaatacaacggatcgacaggacgtgcatatttgctgtttgatgaggctgatcagctgccggacatggcagcgctgcaaagtgattttttgatcaagaaatctgacttgatggatattggcgtgaagatcaccaacgagcgagatgccttgatggnnnnnnnnnntgatggcaatattggcgctgaagatacccatcgacccagaaatcaaggcttcagcgcgaattattcttgaagcgattgaaaaccccgcttggtataaaacaaccggcataaacgatcatggtgatatcgagctgaagcataaactgcccgggcgacttttgaagaagatcagtaatcgaggtaatactgcctttgtgtcggcaacgctcacaatcggtgggcggtttaaagactttcaggtgtcgatgggtattgaaaacacgagccacttgtcaggcgttattgatcctgaaaaacatggcgacctaaaattttccattgtaaattgcaagatcgatactgatgaatgggttgatgagatcgttaaggcggcggctggcgcaccaaagccagtgcttatcgcaacaacatcatacgcccttaccgagttgctgggcgagcgtatccccggcgctattatgcgctttgaagaagaaacgacatctcaagctgccgcgagagtaggtccggaaggtttgcttatttctgccggcgcctgggccgggctggatacgccgatacgatggaggtctgtcatcatccctcgcgtgccgtacaaacgtcttgatgtaatcaacgaagaggtcacgacaagttattttgattcgcgtaatacagcaataaggcgtcttcgccaggtttttgggcgcggactgagatcgccggatgcagtttgcgacgtctatatattggacgagaggatcaatgcattaaatggatttgttccatcacggttcgatcggcgatggagtgaccgatcaataactggcgatgcaaagacgttcttggaaggagggcgcagagagattgttctgtcaaaatcagagcggtgcccatcaatacgcaaaagcgcactaaagcactatggaaagaagtgcatgggaggatgtggtctggtcttaaaaagcgactcgcagcttgacgtccatcacacaaatccgatttctgatggtgttcgccagacaaggatggaagacctttctgttttgtgtgccaactgtcatcgattggctcactcagaagatccgccgttgtcgattgatacgctggtcgctattaatgcgtaattgcattggatgaataataggcgatatattgcctattgcagacttagccgtcaacagaaccaacctacacacaccccacacaacaacccgcttccacacaccatcaataaattcaacgcaatagaccacctaaaacttgaattttataaattcaatccgtataataaaaactccaaaaacacacaggagttgatcatgaaatattggtttgaaaacaagttcgaaaacaaaaaagccgctttgaccttcatcgccgaccgcgtcaataaggcgcttgcagatacgattctcgacttttgcgaaaagacgcatgagtctgcaatttcttgcaagaaagcagaagaagttgccggtgtctatctggctccgtttaacaaggataaaacgcattggatggctggcgttgagctcaaagcgcttgacgcctcttttatgcagcgaagcaagctgagccaaaaggggttgagggtcgatttcagtgacgccggggctgcggaagctaaaacgcgtgcggtctggcgtgctgaggtggagggcgcgaagaaggccaaacacttcgctgagaagatttataccgggatgagcatctcgcgcgggcaagagcttgctgtcgagcactgttaatcctttgttctagtgccggggcgcggatttaattggcgcccggcacttattcattgcaggagggaaatatcttgagtacagatcaaaaggaattgccgtccaccatgtgggttgtgacaagagcctatgttcgcgctggcaagccgccggtcaaaatagcgccttatgcctgggcttgccataacggaaagataacgggtgtaaagtcggcaagcggccatggctgcaaagaaatgctttacctgccgagcgattgctacgaaacccttggtggggctatagacgcaatgaatgcaatcatcaagaatgaaattgagtatgaacagctcaggctcaacaagattcgagggaggctgctctcggcccgaaagttgtctgccatgctggtcgcttaacgcattggagaaataatatggaatcatccacgcgagtcgaaataaccggcggcgctttgtctgatgcagaagacgacctcgcgaagcttaaagacaagctccatcgcgatgaggttgcgattgaggcggcccaggggcgtgttgataagttcaaggcgaggctgatgctgctagatcctttcggtgttgggtctgtgtacgtcggggatgcaaagatcgctgcgattgctagccggcttgtttgatggtcgtcatccggttgaatcgttactgggattgttaaggcgggttttggcgtagccggatatccgtgatgatattgacgcttacatcaaggcgagggcccgtaaagatgggtggactgactcgcaggtaaaggcgatgaagcaatctgcaaggtcaattcagggaatgatctcttttaaaggccggaaagtagatgctgtagtcgccgcaaaatacttggataaagccttgtcatgtatggatagccagtttggtaaaaatagcactccagagtattaccggataaagccgctaatgctgaacactaaagagcggattcttgcctacgaccgatttaatgcggctatggatggtagtgtgatgacgcttccagagggtgataattgtgttccctaatttctttaaaaaaacgatgttgtggatttttgttctaatgcttttaagctctatcccggcgattctttttggcggacataagtcgcgaatttctgacgctcagccaattactgaagagagaaacaagccatattttagccattggtcgaagccgggcggcaagaggtccgatgggtctaagtctcaaattacaccggagaataaagtaaaaacaacggagctgcttggtgctagtgcacgttgtcatagcgatgtaaataacgtctcatcgtgttggaatgtgacttttgtgcgtaaaggatggcgaccttaggtttgttgcttggtattgtttttagaaagccgccacccagcggctttttcttcgccagaaatatcaaaacccacgagattctgcgcacgaaaactacttttaataccatttgatatattgaaaatgcaaatcgaatatttgcatctctcagtcacactaatggagttttaccatgggcattacaaagctacaaatcaaccttcagagtcttttggctgacgcggacgtgtctgcagcaatcaacgagtttgtaaaggaggtcatcgatcaagttcacgaatgggatcgcgagatcgaagaggagcgtaaaacctgcccaattcacctgtcgcttgagagattgaaaaaacgattcgaggagagtcttatggacccctctgtagcgctatacgaaccgcatttttttggtcgtattgcggttgctttcgctgaggagacggcaggaatgagccgggctgaaatagacgacgcaatcacaaagtctgacggtctgcgtctgcttgatcaagcgcgaagcattgaggctgcacttttttaccaggagaaattgaaggagattcaggatatcgaaatggattgggcaagcccggaagaatccactttcggacagtacctgtctgccgcagaacactgcagcaacttcttttcaaatcaaatggctttcgaggcgatgtgggagttgagccaggagtttcgcgatgtcggcgccctggcgggcttttgggaaaaatagtcggtactgaagtttggcgcgaaaagattccctgatttggtttagcgcgcctcttgaaaaaataatcccgggcaaaggaaaagacctcgcaattatctgcgaggtcttttggtttaaatactttctggaatgacgatttttcgtcgtttcttaacgatcacgatggtttttgacttttgatcatcgcggataatactctggatggctttgtcgctgagatcagctgagcaatcttgatgggcgtctttttcgtaacagccattacttccaatggagtgccaggctgtaaccaaacacacggaaggaatactgaagcagcctggattttgttttctcagtagagcaatttcctcccgctgtatttctggcgaaaagatgttttgggttttaatgtcagcaagaagtcgtccattttttcccgtaatccatgttcgcaataaaacaattttgatcagcaattccaacgaatttactcgctgatggtctggcttgtcgctgatcaaagttaaataattgtcgttcatggacttcttggttttacccttcagataacattcaattgtaaacaaaaaacattcagcctcttcatactccaggcaaaagttgtatttgtcagacatgtgcttgcagattataaaaagcacgcgtttttctgcagcaatttgtttcttcgtttttttcacttaacgcctcacggttattgtcattgtgaataggtgtgccaaccacggaataagaattttcattgtttagcctacggcgtctaatccacattggctaacttgaataaaatcaatacagtctgtatgattaacggatacaaataaccggcgtgccgctatgtcaaacacgatcttttcaagcaagttgccacccctctttactcaccagcacgaagcgacctcttcagcccttactgagcttgaaagccacgcaagaacaaaagtccttatggcatgcggaacaggcaagacgcgcgtcggtcctgagttggcaatcaagcgaaacgcaaagacgatcattgtctacttgccgtcattggccctgattcgccaaacgcttcccgtgtggcgtgaagcgatggatatggagtttctgtgcgtttgttcagaccggtcggttgcgaataaatcagatgaaatcgactttacccgggacgatctggtcgccgagcttggtatcgcaagagcatcggtctcaagtgacccatctgacgttcattcctttttgagcgctaaaacaacaaagcccaaggttgttttctctacttaccagtccgcggatgctgtcggtgatggtcagcctgaagttcatgagtttgaccttgggatttacgatgaggctcaccgcacggccggcaaggctggtttattttcatcctcgcttgtggatacacacaccaggatagctaagcgagtgtttatgacggccaccccaaaacatgtcacttatcggaagaagaataaggcgggtgagggcgctgtcgtctattcaatggacgatgaggtgatttatgggcgcaccgcgtatcacctgtcgatccgcaaggctatcaatctcaatatcattgcagactataaagtgctggtgtctatcgttgatgacaaaatgatcgcgtccgagctctcggctcaaaacgcacaggccggacgagctggtcttgaatcaattgcgcatgcgatcgctatccggaacgcgatgaatcaatatggtgtaaaaaaatgtgtgacgttccatgactctgtggccgatgcaaaacaattcgcaggaagctcggttattcatggtgagcttgatgcggccacctttcacgtaaacggatcaatgaaggcgcgcgatcgaaatgacgtgatggatcggttcgcggcagctgtgtctggcgtgatcaccaatgctaaatgcttaaccgaaggcgtggacgtgccggaaatcgacttaattgcttttttgcaccctaagcgcggacagattgacatcatccaggcaataggtcgggcactgcgtatgccaagcggatcatcaaaaacgacggcgtatatcctgttgccgctctatgtgagcgaaattgaaaatggcggcatggaacgtgccttggatgagcacggttacgacacaatttttcaggtattacaggcattgcgtgagcaagatgaggcggtcaaccagtatcttcgcaaaacagtgatcgcaaaaacgcatggaaatatgccgacacttggatttgttgaaatctttgggccagaaaatcatctggaagtgatgcgccaggcaatttctacaaaatgtgttgaagcgctgtgtggcgcatgggatgaaaagttcgctgtcctatataactatttttgtcaaaatgggcacacaaacgtccccgacggtttttattttgagggcgtaaatcttggcgattggtgcgcttatcagcgctatcaaaataagaaaggcttgctttttgacgatagagtagccgcgcttgaatcattgaatttcaagtttatgatcactgatcatgacgccgtgtttaaaaccggtttcaaagcttatgttgattacattgggagccacaaaagaaagcatgtcc

SEQ ID NO: 82 - DNA, 16146 bp, Artificial Sequence
  Synthetic Oligonucleotide
cttttggtgccccacagcgcaaagccgccacctttattgcttggccgatactgccgatgcgccacgtaccacgaccaagaaaaccgctgatgtctgcgagatgaaagtcatagacatcagcgaccagccggcgatgcatacccccttcgaaaaaatcgcttattccagcgatatttaccccatcgaatacatccccaacttccatgagctcgaatacgcagtgccggtacaacacggtaaagatgcggtgcgggcggtgcgcgacttgatgttgaacaagcacactaactgcctgtttcccattgaataccgatttacagccggtgaccctgcttggatcagcccgttttaccaacaagacagtattaccttatcggtatcgggccagcctggtgtggactattgggactacttgcgtgacgtggacgcgatattgcggcgctataaggctcgcccacactgggggaaaatgcattttttagatacggacgacgttacggccctgtatccgcgcgccgaggattttcgcgccttgcgtagaaagctggacccgaaagggcggtttttgaacgatcacgtgcgcatgttgctgggttaacacatcctttcttcgctttcaaagccccggctataaccttaggcaaaaacagtcgttggcttttgcccaaaaaatcctaagatcaccccagatcgcttcgttagcgaaccggggcaccgatttagccttatctccccggtttgtattcaattgcgaggtgtctacagcctaatttgtccaacccaaggagaccccatgaaaatcgaaactctggccgtacacgccggctacaagcctgatcccgtgaccaaagcggtggttcccccgatttaccagaccgtagcctacgcatttgacagtgcccagcacggcgcagacttgtttgacctgaaagtggcgggcaacatctacacccgcatcatgaaccccacgcaatcggtgctggaagagcgggtcgcagcgctggaagggggtctggccgcactggcagtggcctcgggccaatcggccattacctacgcgatccagacaattgccgaggcgggcgacaacatcgtgtcctccagcgctttgtatggcggcacctacaacttgtttgcccacacctttccgcagttcggtatcaccacacgttttggcgactaccgcgacccctcgagttttgccgccttgattgacgaaaaaaccaaggcgatttttgtggagtccttgggtaacccgcagggcaatatcactgatattgccgctatggccgccattgcacacgcgcacggcatcccgctgattgttgacaacaccgtacccagcccttatctgtgccgcccgattgagcacggcgccgatatcgtggtgcagtcgcttaccaaatacctgggtggccatggcaatagccttggcggcgccatcatcgactcgggcaaatttccctgggccgaacacaaggcccgtttcaaacgccttaacgaacctgacgtgagctaccacggcgtggtgtacaccgaagccctgggtgctgcagcctacattggtcgcgctcgcgtcgtacccctgcgcaatacgggagcggccatctcaccctttaattcttttttaattctgcaaggcatcgaaaccctggcgttgcgcatggaccgcatctgcgacaacgccttggccgtggcccatcacctcaagcaaaacgccaaagtcaagtgggtcaactacgccggcctgagcgagcacccagaccatgccttggcccagaaatacatggacggtagggcctcaggactgctcaccttcggtgtgcaaggtggccgtgagggtggggcgcgctttctcgatgcgctccaactctttactcgcctggtcaatattggtgacgtgcgctcgctggctacccatcctgcctcgaccacgcaccgccagttatcacccgaggagttggcccagtctggcgtcagtgaagacacggtgcgcttgtgcgtaggtatcgagcatattgacgacctgaaagatgacctgaatcaggcgctggctgcggtgtagtctcgggccacttggcgctatattccaaccccttacaggagacgaatatgaaatcacgcgccgcagtggcttttggggcgaatcagcctttgcaagtggtagagatcgatgtcgcgccgcctcgcgcgggtgaggtgctggtgcgcatcacccataccggcgtgtgccataccgatgcctacaccttgtctggcgaggaccccgagggcttattcccggcagtgctgggccacgagggcgcgggcatcgtggtggaagtgggcgagggcgtgaccagcgtcgcgcccggcgaccatgtgattccgctctacaccgccgaatgccgcatgtgcaaattttgtttatcgggcaaaaccaatttgtgccaagcggtgcgcgccacgcaggggcggggtgtgatgcccgacggcacttcccgcctgagctaccagggccagccgctcttccattacatgggcaccagcacctttagcgaatacaccgtggtggccgaggtgtcgctcgccaaaatcaaccctgccgccgatccgcaaaaagtttgtttactgggctgcggcgtcaccaccggcctgggcgcggtcagcaacacggccaaagtcaaagccggtgacacggtagccgtttttggtctgggcggcatcggcctggctgtcgtgcagggtgcgcgcttggccggggcagggcgcatcattggcatcgacaccaaccccggcaagtttgatctggcctgcaccatgggcgctaccgaatgcatcaacccgcgcgactttgacaagccgattcaagaggtcatcgtcggcatgaccgacggcggtgtcgatttcagctttgagtgcattggcaatgtacaagtcatgcgcgcggcgctggagtgctgccataaaggctggggcgagagcatcatcatcggcgtggctggggcgggccaagaaatcagtacccgcccgtttcagctcgttacgggccgcgtctggcgcggcagtgcttttggcggcgtcaaaggccgcacccaattgcccggcatggtggagcaagccatgcgcggcgagatcgcgctagacccttttgttacccacaccatgccgctagagcggataaatgaggcctttgatttgatgcatgaaggcaagtccattcgcacggtgattcatttttaatcgctgtactgcgcggcacacccatccagtcaagcaagttcagtagaaggtccaattcgtcattgcgagcggagcgaagcaatctaggtttgcttttgaatcacgcgcccatgtatcgcggaggcaatggatgaaaccgtttggcaacccatgcccactactttcatgcagctttcctacctgcacataaaccccgccacccgccgcgtatcgctcaacgcgcgcgacccggcgttttaccgcgatcccaacgccgcctatgccgccctgcacgcgcagtgcccgctgttttactggcaagagcaggcgcagtggttttgctgtggctatgcgcaggtcaacagcctgctgcgcgacaagcgctttggcaggcaaatattgcatgtggccacgcgccaggaactgggcctgcccgcacccgcacccgcaccacacttgcgcgactttgatcgggccgaacactggtcgctgctgtcgctagagccgccagagcacacgcgcttgcgcaccatggtcaaccgcgcatttgtgtccgggcagatagcgcgctttcgcccgcaaatcgccacgctggcgcatacgctgatcgacggctttgccgcccaaggccaggctgaattacttagcgcttttgcggacatcattcctgtgaccatcatcgcccgcctgctgggcgtgcacgaggccatgggcccgcagttgctgcgctggtcgcacgactatgtgcgcatgtacatgtttggccgtacgcaggccgacgagttggccgccaaccaagcggcagccgaatttgccgcctatgtgcgcggcctgatcgcccagcgccgctgccagccgcaagacgaccttattagcagcatggtccgcagcgaccgcgctggcccgcccatgacggacgaggaactcgtctctaccatcatcgtgctgctcaacgccggccacgaagccacggtgcaccagatcggcaacgccgtcaccaccatcctgaacagcggcttagaccccgccaccttgtttgccgacgaagccgctaccgcggccacggtggaagagtgcttgcgcatctgcgccccggtccatattttttcgcgctacgcgttgcaagacgtgcaattggccgagggcgtgcacctccaaaaaggccaaagcatcggcctgatcctggccgccgccaacctagacccgctgcaatttaccgagcccctgcgcttttggccgcagcgcgaccaaggcaccaacctgtcctttggcgcgggcatccacttttgcataggcgcgccgctggcgcggctggaactgcaaatcgcgctgcccatcctgttcgcccgcttgccgggcttgcgattggcgagaaggccggtggtgaaagatgtgtaccacttccatgggctggagcgggtggaggtggtttgggggtgagggcagagcgtaaacttggcggacgcaaaacaaaccctgccaagccctcatgatctcagtgcgccaacttgacccatcgacccaagatgccgttcgccgctttatggccttggcgcagagccctttctctccccgggcggttatcgtttttggcagtcgcgccctgggcacgcatcgggccgacagtgacgcggatgtagctttgctgttagcgggtgcgcccgccagttttgttgctaccaagttggcaatgtctgatttggcgtttgacgtgttgctggaaaccggtatcaatatttctccattgccagtttggatagagcaatgggagcatccaggccaatatcacacccccgctttgctgcacaacattgcgcgagacggaatctgggtatgaaataagcgcgtgcagcggcagcactgctgaaaaaggcgcaaaccgcgtgcgactccgcgcaggcgctaattgacttgggtgattgcgatggcgcctgcaatcgtgcttattacgcgatgtttgacgccgcccgcgccgcactcattctgaaaataccgcatgaggccgctacctatgccaaaacgcatcgcgggctgatcaatgtgttcagcgcccaaatggtaaagagtgggttggtatccgtcgcactaggccgcttattgaagcgcgcagaagaaatccgtcacatagccgactacaacgatgagtcggtcgggctcgaagatgcccgagaaattgttgccaatgccgctacttttgtcgtggccattgaccagacattctttgcctaaacgcagcttccaaacccgccatccgcatttgcatatgcgcgctgctggcgaggatggaggtggtttgggggcagggtaaagcaggttctgcgagttgaaaatggatatacgatgatgtatatcttttggagtcaacatgcaccttcaaattgccaagtggggaaacagccttgcggtgcgcatccccgccgcctatgtgcgccaaagtggcctgaaggaaggcgaccaattgttagcccaactgggcactgacggcgcattgcaccttagcgcgcccttgcgctggaaccgcaaagcctttgcccaagaactggcgcgcgacacccaagatatgccgctgggtagcccggtggtggagcaactgaggcaagaggcgcgttattgatgctgtatggcgataccagcgtgctggtcgcgctatgtacccatgaagcccaaactacccaagtgcacaaatggtatgcggcctgtaccgacgacatcgcaagtgccgcctggtccgtaaccgaatttgccagcgccctgggcatcaagcagcggaccgggcaattaacaccggtacaagcgcagaccgcttggtcgcagtttgaacgcatctgcgccaatgacttgcaattgcttccggtggaaccgggccattttcaccaagccgccacgctctgcaaggatgccagtgctgccttaggcgccggtgacgcgctgcacctggcctgcgccatcgaagcccgtgccaaaggcctcatcacgctagacagcgtcatggcgaaaaatgccaagcgcttgaagctaaaaactgtgacgctgtaggcgcgctcagcccagcgcttccaggcccttgtggcctgattgattcagcaacttaagtggcgtgcgagggcgcttgttgcccatttcccatttaagcatggtggacgggctggtgttcagaactgctgctagtcctgcttgattgagtgggagagtggggcgcaaccaaggtgtgttgagcatgaacctgttttatcaggtgcccgcctcgtcagaaagtgacttggtagcgccttttctgagccaataaaaattgtgttcaattccgtatatatatccaaaactgagtgcaaaattagtgcccgttctgccttgaaacccgcaaggcaaagaaaccccttgcaagcactcaggcacccatggatatacctagtcaaagcaaacaagaacgctttacccttcgcgcctacctgcgcacccccatcatcatgcagggctacctgacccttgatgccctcttgatggctgagctggtatgtggagatgtaagccacctgctgcattgccaggacggcctttactacgccagcgccgcattcccggtcgatgtgatcgggacccaaacttactcctttgtcgccagtatgcgccccaccaccatggggccagtgtgggccgaaagcctggcgccaaatagcgccaaaaaattgtccattggcgaaagccgccaacgcgaatacggcaatatcaccaaccgctacctggctaccgcttgcaaggcggtcgagtggtatgccaccggcgacgcaagcgccgtgtacgaaatcttgcgcgataccgcattcctgggtaaacgacgggcaactggcatgggcgaagtcgcccagtgggagcttgaggctggcgaactagacggcatcgtgggctacttgggtgagcctttgcggcccgtgcccgtggagctttggccgtatggtggcgattggccggtgatcgaagcagcttggcgccccgagtattgggctacccgcaaccgcagcgcctgtgtcgcgccggagttgcgtgcatgaacggcgctgaatttttcatggactacgccggtaaatatcttttaccgcccgccgatcgaaccgaggacgcgatagctgatgccgagcgcgtactcaatatgtcacttgcgcaatacacaccagggaaaaaactacgcctctcctcctgttggatggtcatcacggacagcgcggtattcactacctttaaggcccaccccgacacggggtttcatgtatgccccggcgccgaattcaagccccaagtcaaagccgccgccgccatgggcaggccctttatggttttagaactgggtaagcgcagcacctgggctcgcgacttgtttgtgagctatgacgcgcgagcagtgcggctgtgcggccagggcattactgcaaccgtcaacatcaaggaggacaaaaaatggacatcgtgatcgacaagcccgccatgctcaatggatatgcgctgcaccgaatcgtggagcaacatcagcagggcaatccagccctttgggcagacgagggcgcgcacctgcgcattcgcccgcaagacgcggtggtgccagcctatacccaaggccatttattggtatttaccgttattgcctgtgtggcgctgcgggatggccgtaagcaccgctacctgccggtgtcagactggcgcgggcggcgcgcatggtttgataacgaggctagcaaacacggcttccagattctgggcgtccacgtcaaaggcgcaatgcgaaaagtccaaacccatgacgggcgctgcttctccctggacgctaccgaattcaccggcttgctacgtgtgaccgacagccaagcgtttgcccgatgtttgcaaaaaggcgtgggccgcgtgggtaaggccttcggcctgggcatgctgatcgtgcgttgacgtacaccgcagctcaccgtaaatccaattctcaaaaaacaaggagtccctgtgaccaacatcttcgcccacatcgaaatcaaaacgatcaacccactcagtttcagccaccatggtgttcgcaaaagggccgacggcagcgtcccgctgcccacgatgattcgcggtatcaatgaaagcggcgaacctctgcgtaccgtctattggcctgctgctgctttgcggggcgcgctgcgccacggcgcagccttggccactatgcagcaaagcagcaaagcaaccctcaaggacgcctaccttttggcgcttgggcaggacctagaccgcgaagaatccgaagcacgggaaaaactagaggcgcaaaccactgggaaaaaggcagataaaaagctgcaagacgtattggccactgccgctgatcgcgcgcgcgtgcatccgatcttggatttgtttggcacttggaaaatgcccagccgactgcaagtgtccaacctgctgcccgcgcacaatgtcgtgcctgatcgcttttccttcattcgccgcgacctcgatagcaaccctgaattgtttgatctgctgtcgccaggggaacaacaggctttctttgaccgccaacagcgccaagcggaggcatcgcgcattggcgaccagttggataccttggatgaggctatcaaagccgcaggcaaagccaaagacgcagcgctcaaggccgagttgcaggctaaacgcaaggccttggacgacctcaaggtggatgccaaaggcgatgaccaatcgggcaatagcaaacacctgctcacggtggaatgcataccggccggcttgattttgcaaggcaagttggttttgcagcgcgctaagccgcgcgatatcgacatcctcttgaatggcctggatgccatcagccgcacgcccttgtttggcgcacacacggcgcgtggattcggagagatcgaggcgacggctcggtttaccgatggcgcgggcgatgttttgtgcgtagtgcagatagggggctaccaagcggcccggcaggaatggaccgaaactggcatggcatttaaaaacacggtgccactggcgtgatttttttacacccaaaaccggggaacgctttgcaaatcaatgacctgtcttcggtcaggtccagccgccccttatcggggtggttactagaaccttggtggtggacgcgtacatcgattacatggtccagccgccccttatcggggtggttactagaacacaaagtcagctcatacgcggcctggcgcaggtccagccgccccttatcggggtggttactagaacgcgtttttgtcgttggaaaagtggtagccaggtccagccgccccttatcggggtggttactagaaccgagctgtacggcacggcgcagcaacacggggtccagccgccccttatcggggtggttactagaacttctcgacgcgtatcgccacatgcgcaaacgttccagccgccccttatcggggtggttactagaacctcgaaacgcggcaagacgtaggggaggctgttccagccgccacttatcggggtggttaatagaacatgtcctctgctgtcttgagtgcatggcacggtccagccgccccttatcggggtggttactagaaccatccaagccacaggttatcgcccatttttggtccagccgccccttatcggggtggttactagaactaagtgcctggtgtgaccgccgtgtctgcaggtccagccgccccttatcggggtggttattgaaaattgaatcgaagggagctaatgtttcgcagtaaagaacaagccgcctacgccgcgctcatagaaaaggcgattgcgcggcccgggccgcccttgctcgccggggcggcggcaggcctgggcaagacgcatggtttttctttccccttgctgcagtcgggcaagcgcgtggccattgcatttagtacgcgcgccttgattacgcagtacctgggtagcgatgccctgcaagcagccatgcaaattgcaccgcaaacccccgttgcagaactactgagtcggcgcgcgtttgcaactgccagcgattaccaggcgcaccgacatcaggctttgcaagcgcaagtgcttttgattacgcatgccgctgctttggtagacgctcgtagccctgcctacgccgacttgcgttcgcgcgatgtgctgctatttgacgaggccgatttattggccgatgccgcgcaactgcgcagtacgtttcaaatcagccctcaggtcttgaaagaatgtgatgcgccggttgggcaagcaaccgacacggtgagcctgcgcgcgattgccgagttggtcaaacgcaaagcggcggagccagaggatcgcgaggcggctgccgccatgttgtacgcgctggacacgccccgctggtacaagcgcgtgggctggagcgagcaaggcgaattggtgctgatgcatgccatgccagggcggatgctgggaccgctgctggcagatgccaagcgcgtcatttttacaagtggcactttgcaagtgaacggtagctttgatcacttcgtgcgtgcgctaggcataaagcagatagaccctgccagtcgccatattgacccggtgcagcacggcagcttggacatatttgttgccgatagcgccttgacgcggcaggcgcaagcccagcgcattgcccaagccccgcgcccggcgctagtgctgactaccagccacgccgccaccaaagaactggtgcagctgctgcccgatgcagtggagcgcggtgaagacgagcccttggcccaagcgctcgcgcgctgcgggcagggcagcgtattgatatcggcgggcgcatggagcggactggacgagccacgcttgcgctgggccacggtggcgatccccgatgtgccttacggggttccaaaccaagtatccgggcgggcggtaagccactacatagacagtgtggtttgcgcggtgcggcgtaccaaccagggcttgcaccggggcttgcgcagcccagaagcgcagtgcaagctgcttttgctggatgcccgtttcaatcggcaggagttaaaggccgccattccatcgcgttttctgtcgcctgacgggtctttgcccagcatctatgaaggcatcgcccgccaaatgacacagcgcgagcgccacgtccgggccgccgctctcaagcactatggcccccattgcatgtggcccggttgcaatgaaacgcaagaacaccgactacaagcccaccacgaagatcagatagcgcacggcgaaagatttacccgcttgcaagacgtgaagatttattgcgcacaccaccatttggatgtgcaccatgcgatgcggcttactagatgacatacaggaatttttgaattttatggttcagtcgctctacaaatactgcatatttgacttggaagaccaacggtcggagaaacagctttcgacgccaatgctttggttctcatcgcctgaaagcctcaatgacccgtttgaatgcaagccgaaatttacattcgaaggtaccgccaaagaagaggtgaagctacttgtggattatttgcgtaggacatctcaaacaaaaggcctaattgatttattacaggaagcgttagctattcagcagggcggatatttttcaaaaatgaaggaacaatttgagaaagatattctgaaaaaaattgaaaaagaaattggtatctgctgcctttctgaaaggaacaatagtatcttgatgtggtcccattacgcaaaggaccatactggttattgtgtggaatttgaagccagtgaaacgacacccttctttggtgctgcgcagaaagtcgaatacgatcactcctatccaatggtggatttttttaacacaccccacgaaaagcaagtagatctcatatttcttacgaaatatatttgctggaaatatgaagccgaatggcgaatctgtgattacgtttctggccctggcctaagggaatatcccgcagagttaatgcgtagcgttacttttggcgtacgcatgctgcgggaacatcgagagcagataaaaaactggctaagcagacgagggcaccctgtagcgttttatcaggctttttgcgatgctgatcaattcaagatcatcatgaaaccggctgatttttgctaaatggtttcatccccttctccctccccatcttcctccccgacggcgaccccgacggcctgcgcaccgtggttcgcaccaactggaacggcaaggcgctggtgtttccgcgtgcggcctgggcgcagcccagcgtggccacccggcccgagttgcagcaaaccggcgtgtacctgctgctggggccgcgtgaagatggcgagggtgagcggctctacattggcgagggcgacccgatcaagccgcgcctggcctcacaccacagcggcacccatcaaaaggatttctggacgcgggcgatctgttttgtctccatggggcgtgcgctcaaagtgttgcaggcggattcgtgacgagtgtgttggcacactcacgtcatttcggttaaagtaatgattccttactttcggataggtgccatgcttgccaaaatcactgccaaaaaccagctcaccctgcccaagagcctgacgcaggccgtgggtgcgaccgaatattttgatgtcgaggcccgtgacgggcagctcatcctgacgcccgtgcgcattcagcgcggcgatgcggtgcgcgctaaattggccgagttggatttgaccgacgcagacttggccgccgctgtggcttggggcagagcgcctgcgctggcctctgccatggtcaacgagcctgctgcggcttatgacctgacgcccgccaagcccaagaaggcggctgccaaaaagaccaagcccacagcatgagcgccgctgttcgcgcggtgctggacaccaacgtggtcttgtctgcgctggtgtttcgtggcggtgcagccgggcaggtgcggcaagcttggcagcgtgggctggtcgtgccgctggccagcacagccacagtgcaagagctggtgcgtgtgttggcttaccccaagtttcgtttgtccaaagccgaacaagacgagttgctggccgactacttgccatatgccgaaaccgtacggattccacagccacctcccacggtgccctattgccgcgatgtactggatgtgcctttcatgcacttggcggtggcaggcaaagcgcaggtgctggtgactggcgaccgcgatttgctggccgttgccgccgagtttgagcggcagagtttgtgccccattttgaccttagatgcgttttgcaagatgaatgtattcgctattcgcgaatagcgaatgcatcggctatgtcaaagttgtcttggatgaatgttctggattttgcttcatttgaagccaaaattgcttcctggccaaggtttctggagccctcataatcgccactgcaccccaccagtttttgcagccgccacggggcacgcataaaaaccaaacctttcaaaccctatcccccttatgaaaatcaacaccggccgccccgtcaccatgggcccttcctgcatggtcacctgcccgcattctttggcttccgcagcgggcgtggacgtgttgcgcgctggcggctcggcggtggatgctgctatcgccactaccgccgccttggcggtgctctacccgcatatgaccggcgtgggcggcgatgcgttttggctgatttatgacgccaagaccaaggcggtgcgctacctggacggcggcgggcgcgcggcggccagcgccacggtggattggtacaaaagccaaggccacacggaaatcccgtttcgcggcatcctgcccgccaccaccaccacacccggtgcggtagccagctgggccgaggcgcattccgcttacggcaagctgcccatggcgcgcaatctgcaaagcgccatcggctatgcgcgcgacggtgctcccgtgacggcccgcttgtctggctttatcgaagccaccgccacagacctggcgccgcacgccgagaccatggctatctttatgcccgacggcaccaccccgcgccctggcgcgctcttacgcaatccgggtctcgccaagactttgcaagcgattgccgaccgtggccgtgccggtttttacgaaggcgaagtagggcgcgagctagcccgcttttccaaggaaaaaggcggtttgtttaccgaggccgatctggccgcgcaaaccgcacgctggggcgagcccatcagcggtacttaccggggcgtcaagatttttgaaacgcctgcgcctacccagggctttaccgtgctggaaatgctcaacctgctagagccgctggagctgcacaagcgcccgcaccttggcgcagaccatgtgcatttgctggtgcagtccaagcagatcgcctaccacgaccgcgaccgccacctggccgatccggcctttgctgacgtgccgatggagcgactcatctccaaagcctatgccgaagagcgccgcagcctgatggacccggcgcgcgccttgccctgggacaaagtaccgtcctacggcagcctgagcggcgataccgtgtttattgccaccgtggacgccgagggcaatgccgtggcgctgattcacagcctgtacggcgtgtttggctcgggcgtggtggcgggtaaaaccggcgtggtgctgcaaaaccgcagcgcttatttcaacctggacccgaaccaccccaaccacctgcaaccgggcaaaacgccgctgcacacgctaattgcatccatcgccttcaaagacgacaagctctggggcgtggtcggctgcatgggcgcggacgggcagccgcaaattcatttgcaaacctatatcaacctgattgaccacggctgcgatatccaggaagccctggaggcgccgcgctggctgtctggccgctttggcctgctggagtcgcgcgacacactgcacatcgaggcgcgctttcccgccgagaccattgccgagctagaccggcgcggccacttgctcaaccgctggggcgactggaacgaattcgccggccacgcgcacggcatcatgatcgacccgcaaaccggcatgcgctacggcggctccgacccgcgctcggatggcgcggctatcggtttttaggcgggacgcccaggcttctaaggctgggcgcgcctagtcgcttggggcgggcggggagtgctctacgcagtctttacatcaagcccactgcaccggctgattcgccgcgtaccaagcgtctagcttcggttcgatggctttctcgatattggcgcgcttgattttcatggtcggcgtgagcatgccgttttcgatttgccagggctgatcggccaccaccaggaatttgaggcgttcgtagtccgataactggctgttcacttcggccagcaaggtggtcagtgcgctttgcacttcggcgcgcactgccgcgtctttctggcgcgggcgcaggtcttcggccagcaccaccatggcaaaggctgcttcatggctggagccacccactagcgaaatttccaccatggggtggttgttaatcatgttttctatgggggcgggggcgacgtatttgcctttgctggttttaaacagctctttcatgcggccggtgattttgagctgaccgtcgggcagttgcgagcccaggtcgccggtgcggaaatagccgtcttcggtaaaggactcggcatccagatccgggcgcttgtagtagcccaccaactggccgggcgacttgatcaggatttcaccttcgggactgatgcgcgcctgcacccccgcgtagggcacgccgacatatccaggctcgttaaattcggcggtggcgctgtgcgaataggcaaagtcctcggtcatggcatagccttcgatcaggttcaggcccaggctgcggtaccaacggatcaggtccgccggtaacggcgccgagccgctgccagccaactcggcctggtctaggcccagcccgaccagaatcttg

SEQ ID NO: 83 - DNA, 16125 bp, Artificial Sequence
  Synthetic Oligonucleotide
  misc_feature (1)..(9997): n is a, c, g, or t
nnnnnnnnnnnnnnnnnnnnnnnnnnnnnnnnnnnnnnnnnnnnnnnnnnnnnnnnnnnnnnnnnnnnnnnnnnnnnnnnnnnnnnnnnnnnnnnnnnnnnnnnnnnnnnnnnnnnnnnnnnnnnnnnnnnnnnnnnnnnnnnnnnnnnnnnnnnnnnnnnnnnnnnnnnnnnnnnnnnnnnnnnnnnnnnnnnnnnnnnnnnnnnnnnnnnnnnnnnnnnnnnnnnnnnnnnnnnnnnnnnnnnnnnnnnnnnnnnnnnnnnnnnnnnnnnnnnnnnnnnnnnnnnnnnnnnnnnnnnnnnnnnnnnnnnnnnnnnnnnnnnnnnnnnnnnnnnnnnnnnnnnnnnnnnnnnnnnnnnnnnnnnnnnnnnnnnnnnnnnnnnnnnnnnnnnnnnnnnnnnnnnnnnnnnnnnnnnnnnnnnnnnnnnnnnnnnnnnnnnnnnnnnnnnnnnnnnnnnnnnnnnnnnnnnnnnnnnnnnnnnnnnnnnnnnnnnnnnnnnnnnnnnnnnnnnnnnnnnnnnnnnnnnnnnnnnnnnnnnnnnnnnnnnnnnnnnnnnnnnnnnnnnnnnnnnnnnnnnnnnnnnnnnnnnnnnnnnnnnnnnnnnnnnnnnnnnnnnnnnnnnnnnnnnnnnnnnnnnnnnnnnnnnnnnnnnnnnnnnnnnnnnnnnnnnnnnnnnnnnnnnnnnnnnnnnnnnnnnnnnnnnnnnnnnnnnnnnnnnnnnnnnnnnnnnnnnnnnnnnnnnnnnnnnnnnnnnnnnnnnnnnnnnnnnnnnnnnnnnnnnnnnnnnnnnnnnnnnnnnnnnnnnnnnnnnnnnnnnnnnnnnnnnnnnnnnnnnnnnnnnnnnnnnnnnnnnnnnnnnnnnnnnnnnnnnnnnnnnnnnnnnnnnnnnnnnnnnnnnnnnnnnnnnnnnnnnnnnnnnnnnnnnnnnnnnnnnnnnnnnnnnnnnnnnnnnnnnnnnnnnnnnnnnnnnnnnnnnnnnnnnnnnnnnnnnnnnnnnnnnnnnnnnnnnnnnnnnnnnnnnnnnnnnnnnnnnnnnnnnnnnnnnnnnnnnnnnnnnnnnnnnnnnnnnnnnnnnnnnnnnnnnnnnnnnnnnnnnnnnnnnnnnnnnnnnnnnnnnnnnnnnnnnnnnnnnnnnnnnnnnnnnnnnnnnnnnnnnnnnnnnnnnnnnnnnnnnnnnnnnnnnnnnnnnnnnnnnnnnnnnnnnnnnnnnnnnnnnnnnnnnnnnnnnnnnnnnnnnnnnnnnnnnnnnnnnnnnnnnnnnnnnnnnnnnnnnnnnnnnnnnnnnnnnnnnnnnnnnnnnnnnnnnnnnnnnnnnnnnnnnnnnnnnnnnnnnnnnnnnnnnnnnnnnnnnnnnnnnnnnnnnnnnnnnnnnnnnnnnnnnnnnnnnnnnnnnnnnnnnnnnnnnnnnnnnnnnnnnnnnnnnnnnnnnnnnnnnnnnnnnnnnnnnnnnnnnnnnnnnnnnnnnnnnnnnnnnnnnnnnnnnnnnnnnnnnnnnnnnnnnnnnnnnnnnnnnnnnnnnnnnnnnnnnnnnnnnnnnnnnnnnnnnnnnnnnnnnnnnnnnnnnnnnnnnnnnnnnnnnnnnnnnnnnnnnnnnnnnnnnnnnnnnnnnnnnnnnnnnnnnnnnnnnnnnnnnnnnnnnnnnnnnnnnnnnnnnnnnnnnnnnnnnnnnnnnnnnnnnnnnnnnnnnnnnnnnnnnnnnnnnnnnnnnnnnnnnnnnnnnnnnnnnnnnnnnnnnnnnnnnnnnnnnnnnnnnnnnnnnnnnnnnnnnnnnnnnnnnnnnnnnnnnnnnnnnnnnnnnnnnnnnnnnnnnnnnnnnnnnnnnnnnnnnnnnnnnnnnnnnnnnnnnnnnnnnnnnnnnnnnnnnnnnnnnnnnnnnnnnnnnnnnnnnnnnnnnnnnnnnnnnnnnnnnnnnnnnnnnnnnnnnnnnnnnnnnnnnnnnnnnnnnnnnnnnnnnnnnnnnnnnnnnnnnnnnnnnnnnnnnnnnnnnnnnnnnnnnnnnnnnnnnnnnnnnnnnnnnnnnnnnnnnnnnnnnnnnnnnnnnnnnnnnnnnnnnnnnnnnnnnnnnnnnnnnnnnnnnnnnnnnnnnnnnnnnnnnnnnnnnnnnnnnnnnnnnnnnnnnnnnnnnnnnnnnnnnnnnnnnnnnnnnnnnnnnnnnnnnnnnnnnnnnnnnnnnnnnnnnnnnnnnnnnnnnnnnnnnnnnnnnnnnnnnnnnnnnnnnnnnnnnnnnnnnnnnnnnnnnnnnnnnnnnnnnnnnnnnnnnnnnnnnnnnnnnnnnnnnnnnnnnnnnnnnnnnnnnnnnnnnnnnnnnnnnnnnnnnnnnnnnnnnnnnnnnnnnnnnnnnnnnnnnnnnnnnnnnnnnnnnnnnnnnnnnnnnnnnnnnnnnnnnnnnnnnnnnnnnnnnnnnnnnnnnnnnnnnnnnnnnnnnnnnnnnnnnnnnnnnnnnnnnnnnnnnnnnnnnnnnnnnnnnnnnnnnnnnnnnnnnnnnnnnnnnnnnnnnnnnnnnnnnnnnnnnnnnnnnnnnnnnnnnnnnnnnnnnnnnnnnnnnnnnnnnnnnnnnnnnnnnnnnnnnnnnnnnnnnnnnnnnnnnnnnnnnnnnnnnnnnnnnnnnnnnnnnnnnnnnnnnnnnnnnnnnnnnnnnnnnnnnnnnnnnnnnnnnnnnnnnnnnnnnnnnnnnnnnnnnnnnnnnnnnnnnnnnnnnnnnnnnnnnnnnnnnnnnnnnnnnnnnnnnnnnnnnnnnnnnnnnnnnnnnnnnnnnnnnnnnnnnnnnnnnnnnnnnnnnnnnnnnnnnnnnnnnnnnnnnnnnnnnnnnnnnnnnnnnnnnnnnnnnnnnnnnnnnnnnnnnnnnnnnnnnnnnnnnnnnnnnnnnnnnnnnnnnnnnnnnnnnnnnnnnnnnnnnnnnnnnnnnnnnnnnnnnnnnnnnnnnnnnnnnnnnnnnnnnnnnnnnnnnnnnnnnnnnnnnnnnnnnnnnnnnnnnnnnnnnnnnnnnnnnnnnnnnnnnnnnnnnnnnnnnnnnnnnnnnnnnnnnnnnnnnnnnnnnnnnnnnnnnnnnnnnnnnnnnnnnnnnnnnnnnnnnnnnnnnnnnnnnnnnnnnnnnnnnnnnnnnnnnnnnnnnnnnnnnnnnnnnnnnnnnnnnnnnnnnnnnnnnnnnnnnnnnnnnnnnnnnnnnnnnnnnnnnnnnnnnnnnnnnnnnnnnnnnnnnnnnnnnnnnnnnnnnnnnnnnnnnnnnnnnnnnnnnnnnnnnnnnnnnnnnnnnnnnnnnnnnnnnnnnnnnnnnnnnnnnnnnnnnnnnnnnnnnnnnnnnnnnnnnnnnnnnnnnnnnnnnnnnnnnnnnnnnnnnnnnnnnnnnnnnnnnnnnnnnnnnnnnnnnnnnnnnnnnnnnnnnnnnnnnnnnnnnnnnnnnnnnnnnnnnnnnnnnnnnnnnnnnnnnnnnnnnnnnnnnnnnnnnnnnnnnnnnnnnnnnnnnnnnnnnnnnnnnnnnnnnnnnnnnnnnnnnnnnnnnnnnnnnnnnnnnnnnnnnnnnnnnnnnnnnnnnnnnnnnnnnnnnnnnnnnnnnnnnnnnnnnnnnnnnnnnnnnnnnnnnnnnnnnnnnnnnnnnnnnnnnnnnnnnnnnnnnnnnnnnnnnnnnnnnnnnnnnnnnnnnnnnnnnnnnnnnnnnnnnnnnnnnnnnnnnnnnnnnnnnnnnnnnnnnnnnnnnnnnnnnnnnnnnnnnnnnnnnnnnnnnnnnnnnnnnnnnnnnnnnnnnnnnnnnnnnnnnnnnnnnnnnnnnnnnnnnnnnnnnnnnnnnnnnnnnnnnnnnnnnnnnnnnnnnnnnnnnnnnnnnnnnnnnnnnnnnnnnnnnnnnnnnnnnnnnnnnnnnnnnnnnnnnnnnnnnnnnnnnnnnnnnnnnnnnnnnnnnnnnnnnnnnnnnnnnnnnnnnnnnnnnnnnnnnnnnnnnnnnnnnnnnnnnnnnnnnnnnnnnnnnnnnnnnnnnnnnnnnnnnnnnnnnnnnnnnnnnnnnnnnnnnnnnnnnnnnnnnnnnnnnnnnnnnnnnnnnnnnnnnnnnnnnnnnnnnnnnnnnnnnnnnnnnnnnnnnnnnnnnnnnnnnnnnnnnnnnnnnnnnnnnnnnnnnnnnnnnnnnnnnnnnnnnnnnnnnnnnnnnnnnnnnnnnnnnnnnnnnnnnnnnnnnnnnnnnnnnnnnnnnnnnnnnnnnnnnnnnnnnnnnnnnnnnnnnnnnnnnnnnnnnnnnnnnnnnnnnnnnnnnnnnnnnnnnnnnnnnnnnnnnnnnnnnnnnnnnnnnnnnnnnnnnnnnnnnnnnnnnnnnnnnnnnnnnnnnnnnnnnnnnnnnnnnnnnnnnnnnnnnnnnnnnnnnnnnnnnnnnnnnnnnnnnnnnnnnnnnnnnnnnnnnnnnnnnnnnnnnnnnnnnnnnnnnnnnnnnnnnnnnnnnnnnnnnnnnnnnnnnnnnnnnnnnnnnnnnnnnnnnnnnnnnnnnnnnnnnnnnnnnnnnnnnnnnnnnnnnnnnnnnnnnnnnnnnnnnnnnnnnnnnnnnnnnnnnnnnnnnnnnnnnnnnnnnnnnnnnnnnnnnnnnnnnnnnnnnnnnnnnnnnnnnnnnnnnnnnnnnnnnnnnnnnnnnnnnnnnnnnnnnnnnnnnnnnnnnnnnnnnnnnnnnnnnnnnnnnnnnnnnnnnnnnnnnnnnnnnnnnnnnnnnnnnnnnnnnnnnnnnnnnnnnnnnnnnnnnnnnnnnnnnnnnnnnnnnnnnnnnnnnnnnnnnnnnnnnnnnnnnnnnnnnnnnnnnnnnnnnnnnnnnnnnnnnnnnnnnnnnnnnnnnnnnnnnnnnnnnnnnnnnnnnnnnnnnnnnnnnnnnnnnnnnnnnnnnnnnnnnnnnnnnnnnnnnnnnnnnnnnnnnnnnnnnnnnnnnnnnnnnnnnnnnnnnnnnnnnnnnnnnnnnnnnnnnnnnnnnnnnnnnnnnnnnnnnnnnnnnnnnnnnnnnnnnnnnnnnnnnnnnnnnnnnnnnnnnnnnnnnnnnnnnnnnnnnnnnnnnnnnnnnnnnnnnnnnnnnnnnnnnnnnnnnnnnnnnnnnnnnnnnnnnnnnnnnnnnnnnnnnnnnnnnnnnnnnnnnnnnnnnnnnnnnnnnnnnnnnnnnnnnnnnnnnnnnnnnnnnnnnnnnnnnnnnnnnnnnnnnnnnnnnnnnnnnnnnnnnnnnnnnnnnnnnnnnnnnnnnnnnnnnnnnnnnnnnnnnnnnnnnnnnnnnnnnnnnnnnnnnnnnnnnnnnnnnnnnnnnnnnnnnnnnnnnnnnnnnnnnnnnnnnnnnnnnnnnnnnnnnnnnnnnnnnnnnnnnnnnnnnnnnnnnnnnnnnnnnnnnnnnnnnnnnnnnnnnnnnnnnnnnnnnnnnnnnnnnnnnnnnnnnnnnnnnnnnnnnnnnnnnnnnnnnnnnnnnnnnnnnnnnnnnnnnnnnnnnnnnnnnnnnnnnnnnnnnnnnnnnnnnnnnnnnnnnnnnnnnnnnnnnnnnnnnnnnnnnnnnnnnnnnnnnnnnnnnnnnnnnnnnnnnnnnnnnnnnnnnnnnnnnnnnnnnnnnnnnnnnnnnnnnnnnnnnnnnnnnnnnnnnnnnnnnnnnnnnnnnnnnnnnnnnnnnnnnnnnnnnnnnnnnnnnnnnnnnnnnnnnnnnnnnnnnnnnnnnnnnnnnnnnnnnnnnnnnnnnnnnnnnnnnnnnnnnnnnnnnnnnnnnnnnnnnnnnnnnnnnnnnnnnnnnnnnnnnnnnnnnnnnnnnnnnnnnnnnnnnnnnnnnnnnnnnnnnnnnnnnnnnnnnnnnnnnnnnnnnnnnnnnnnnnnnnnnnnnnnnnnnnnnnnnnnnnnnnnnnnnnnnnnnnnnnnnnnnnnnnnnnnnnnnnnnnnnnnnnnnnnnnnnnnnnnnnnnnnnnnnnnnnnnnnnnnnnnnnnnnnnnnnnnnnnnnnnnnnnnnnnnnnnnnnnnnnnnnnnnnnnnnnnnnnnnnnnnnnnnnnnnnnnnnnnnnnnnnnnnnnnnnnnnnnnnnnnnnnnnnnnnnnnnnnnnnnnnnnnnnnnnnnnnnnnnnnnnnnnnnnnnnnnnnnnnnnnnnnnnnnnnnnnnnnnnnnnnnnnnnnnnnnnnnnnnnnnnnnnnnnnnnnnnnnnnnnnnnnnnnnnnnnnnnnnnnnnnnnnnnnnnnnnnnnnnnnnnnnnnnnnnnnnnnnnnnnnnnnnnnnnnnnnnnnnnnnnnnnnnnnnnnnnnnnnnnnnnnnnnnnnnnnnnnnnnnnnnnnnnnnnnnnnnnnnnnnnnnnnnnnnnnnnnnnnnnnnnnnnnnnnnnnnnnnnnnnnnnnnnnnnnnnnnnnnnnnnnnnnnnnnnnnnnnnnnnnnnnnnnnnnnnnnnnnnnnnnnnnnnnnnnnnnnnnnnnnnnnnnnnnnnnnnnnnnnnnnnnnnnnnnnnnnnnnnnnnnnnnnnnnnnnnnnnnnnnnnnnnnnnnnnnnnnnnnnnnnnnnnnnnnnnnnnnnnnnnnnnnnnnnnnnnnnnnnnnnnnnnnnnnnnnnnnnnnnnnnnnnnnnnnnnnnnnnnnnnnnnnnnnnnnnnnnnnnnnnnnnnnnnnnnnnnnnnnnnnnnnnnnnnnnnnnnnnnnnnnnnnnnnnnnnnnnnnnnnnnnnnnnnnnnnnnnnnnnnnnnnnnnnnnnnnnnnnnnnnnnnnnnnnnnnnnnnnnnnnnnnnnnnnnnnnnnnnnnnnnnnnnnnnnnnnnnnnnnnnnnnnnnnnnnnnnnnnnnnnnnnnnnnnnnnnnnnnnnnnnnnnnnnnnnnnnnnnnnnnnnnnnnnnnnnnnnnnnnnnnnnnnnnnnnnnnnnnnnnnnnnnnnnnnnnnnnnnnnnnnnnnnnnnnnnnnnnnnnnnnnnnnnnnnnnnnnnnnnnnnnnnnnnnnnnnnnnnnnnnnnnnnnnnnnnnnnnnnnnnnnnnnnnnnnnnnnnnnnnnnnnnnnnnnnnnnnnnnnnnnnnnnnnnnnnnnnnnnnnnnnnnnnnnnnnnnnnnnnnnnnnnnnnnnnnnnnnnnnnnnnnnnnnnnnnnnnnnnnnnnnnnnnnnnnnnnnnnnnnnnnnnnnnnnnnnnnnnnnnnnnnnnnnnnnnnnnnnnnnnnnnnnnnnnnnnnnnnnnnnnnnnnnnnnnnnnnnnnnnnnnnnnnnnnnnnnnnnnnnnnnnnnnnnnnnnnnnnnnnnnnnnnnnnnnnnnnnnnnnnnnnnnnnnnnnnnnnnnnnnnnnnnnnnnnnnnnnnnnnnnnnnnnnnnnnnnnnnnnnnnnnnnnnnnnnnnnnnnnnnnnnnnnnnnnnnnnnnnnnnnnnnnnnnnnnnnnnnnnnnnnnnnnnnnnnnnnnnnnnnnnnnnnnnnnnnnnnnnnnnnnnnnnnnnnnnnnnnnnnnnnnnnnnnnnnnnnnnnnnnnnnnnnnnnnnnnnnnnnnnnnnnnnnnnnnnnnnnnnnnnnnnnnnnnnnnnnnnnnnnnnnnnnnnnnnnnnnnnnnnnnnnnnnnnnnnnnnnnnnnnnnnnnnnnnnnnnnnnnnnnnnnnnnnnnnnnnnnnnnnnnnnnnnnnnnnnnnnnnnnnnnnnnnnnnnnnnnnnnnnnnnnnnnnnnnnnnnnnnnnnnnnnnnnnnnnnnnnnnnnnnnnnnnnnnnnnnnnnnnnnnnnnnnnnnnnnnnnnnnnnnnnnnnnnnnnnnnnnnnnnnnnnnnnnnnnnnnnnnnnnnnnnnnnnnnnnnnnnnnnnnnnnnnnnnnnnnnnnnnnnnnnnnnnnnnnnnnnnnnnnnnnnnnnnnnnnnnnnnnnnnnnnnnnnnnnnnnnnnnnnnnnnnnnnnnnnnnnnnnnnnnnnnnnnnnnnnnnnnnnnnnnnnnnnnnnnnnnnnnnnnnnnnnnnnnnnnnnnnnnnnnnnnnnnnnnnnnnnnnnnnnnnnnnnnnnnnnnnnnnnnnnnnnnnnnnnnnnnnnnnnnnnnnnnnnnnnnnnnnnnnnnnnnnnnnnnnnnnnnnnnnnnnnnnnnnnnnnnnnnnnnnnnnnnnnnnnnnnnnnnnnnnnnnnnnnnnnnnnnnnnnnnnnnnnnnnnnnnnnnnnnnnnnnnnnnnnnnnnnnnnnnnnnnnnnnnnnnnnnnnnnnnnnnnnnnnnnnnnnnnnnnnnnnnnnnnnnnnnnnnnnnnnnnnnnnnnnnnnnnnnnnnnnnnnnnnnnnnnnnnnnnnnnnnnnnnnnnnnnnnnnnnnnnnnnnnnnnnnnnnnnnnnnnnnnnnnnnnnnnnnnnnnnnnnnnnnnnnnnnnnnnnnnnnnnnnnnnnnnnnnnnnnnnnnnnnnnnnnnnnnnnnnnnnnnnnnnnnnnnnnnnnnnnnnnnnnnnnnnnnnnnnnnnnnnnnnnnnnnnnnnnnnnnnnnnnnnnnnnnnnnnnnnnnnnnnnnnnnnnnnnnnnnnnnnnnnnnnnnnnnnnnnnnnnnnnnnnnnnnnnnnnnnnnnnnnnnnnnnnnnnnnnnnnnnnnnnnnnnnnnnnnnnnnnnnnnnnnnnnnnnnnnnnnnnnnnnnnnnnnnnnnnnnnnnnnnnnnnnnnnnnnnnnnnnnnnnnnnnnnnnnnnnnnnnnnnnnnnnnnnnnnnnnnnnnnnnnnnnnnnnnnnnnnnnnnnnnnnnnnnnnnnnnnnnnnnnnnnnnnnnnnnnnnnnnnnnnnnnnnnnnnnnnnnnnnnnnnnnnnnnnnnnnnnnnnnnnnnnnnnnnnnnnnnnnnnnnnnnnnnnnnnnnnnnnnnnnnnnnnnnnnnnnnnnnnnnnnnnnnnnnnnnnnnnnnnnnnnnnnnnnnnnnnnnnnnnnnnnnnnnnnnnnnnnnnnnnnnnnnnnnnnnnnnnnnnnnnnnnnnnnnnnnnnnnnnnnnnnnnnnnnnnnnnnnnnnnnnnnnnnnnnnnnnnnnnnnnnnnnnnnnnnnnnnnnnnnnnnnnnnnnnnnnnnnnnnnnnnnnnnnnnnnnnnnnnnnnnnnnnnnnnnnnnnnnnnnnnnnnnnnnnnnnnnnnnnnnnnnnnnnnnnnnnnnnnnnnnnnnnnnnnnnnnnnnnnnnnnnnnnnnnnnnnnnnnnnnnnnnnnnnnnnnnnnnnnnnnnnnnnnnnnnnnnnnnnnnnnnnnnnnnnnnnnnnnnnnnnnnnnnnnnnnnnnnnnnnnnnnnnnnnnnnnnnnnnnnnnnnnnnnnnnnnnnnnnnnnnnnnnnnnnnnnnnnnnnnnnnnnnnnnnnnnnnnnnnnnnnnnnnnnnnnnnnnnnnnnnnnnnnnnnnnnnnnnnnnnnnnnnnnnnnnnnnnnnnnnnnnnnnnnnnnnnnnnnnnnnnnnnnnnnnnnnnnnnnnnnnnnnnnnnnnnnnnnnnnnnnnnnnnnnnnnnnnnnnnnnnnnnnnnnnnnnnnnnnnnnnnnnnnnnnnnnnnnnnnnnnnnnnnnnnnnnnnnnnnnnnnnnnnnnnnnnnnnnnnnnnnnnnnnnnnnnnnnnnnnnnnnnnnnnnnnnnnnnnnnnnnnnnnnnnnnnnnnnnnnnnnnnnnnnnnnnnnnnnnnnnnnnnnnnnnnnnnnnnnnnnnnnnnnnnnnnnnnnnnnnnnnnnnnnnnnnnnnnnnnnnnnnnnnnnnnnnnnnnnnnnnnnnnnnnnnnnnnnnnnnnnnnnnnnnnnnnnnnnnnnnnnnnnnnnnnnnnnnnnnnnnnnnnnnnnnnnnnnnnnnnnnnnnnnnnnnnnnnnnnnnnnnnnnnnnnnnnnnnnnnnnnnnnnnnnnnnnnnnnnnnnnnnnnnnnnnnnnnnnnnnnnnnnnnnnnnnnnnnnnnnnnnnnnnnnnnnnnnnnnnnnnnnnnnnnnnnnnnnnnnnnnnnnnnnnnnnnnnnnnnnnnnnnnnnnnnnnnnnnnnnnnnnnnnnnnnnnnnnnnnnnnnnnnnnnnnnnnnnnnnnnnnnnnnnnnnnnnnnnnnnnnnnnnnnnnnnnnnnnnnnnnnnnnnnnnnnnnnnnnnnnnnnnnnnnnnnnnnnnnnnnnnnnnnnggctacaacccgccgtgggtgagcaagcagacttgcttatacgtgcgggtgcatgggcgggtcttgacacgccaacgcgctggcgtaccgtggttattccgcgcgtgccatttggcgcaccagtcattgttgacggggtggcggtcacgtcttacttggccgccaaggtgacggccagtcggcggatgcgccaagcaattggccgtgggcttagaacacctgaggcggtgtgcacggttgtggttttggatgcgcgggcacacaacttaggtcgctttgtgccagagcgttttgcggcagattggtcgtctcggcaagtgtttgacgagggtgcccgccatgcggtggtgctgtccaaagcggagcgcgaccccgctttggccaaagccgcgctcagacactacggcgctcaatgccaacaagcgggttgttccgtgacagaggcgtgtcagctggacgtgcaccaccttgaccccgtaagcgaaggcgtgcgccgcacaaccttgaaggatgtgaccgtgctgtgtgcaaaccaccaccgacaggcccaccacgacatgaaaatggggctgaacgtgtcgtagcgcaacaaaaaacccgccatacctttgggtacgcgggttttgggagttctggcaaggcctgaaacctaaatgtggtggtgataggtggacttgaaccaccgaccccagcattatgaatgctgtgctctaaccaactgagctatatcaccgagcctgaaattatagccaaaattctcagggctttggcttgcctccaaaagtttttgttagccattttgtcgcgcccgtacgacgcgccaagcccttggttattggtgtttgaaggcgggtttgcgcttgtttatgaacgcatccatgccctctttttggtcttcggttgcaaacagcgcgtggaacagacggcgctcaaaacgcacgccttcgctgaggctgccttcaaacgcttggttcaccgcttcctttgccgccatgacactggggagggagtagttgcaaatcatcagggctgcgcccaaggcctcggtcatgagttggtcatcggcgaccacgcggctcaccagtccgccgcgctcggcttctgcagcgtccatcatgcggcctgtgagggccatgtccatggccttggctttgccaacggcgcgtggcaggcgctgcgtgccacctgcgccagggataacgcccaacttgatttcgggttggccaaatttggcgctctcgctggcaatgatgacgtcgcacatcatggccaattcacagccgccgccgagggcaaagccgctgacggcggcaataacgggcttgcgaacgctgcgaatggtttcccagttgcgcgtgatgtagtctgacttgtagacgtcagcaaaggtgtaggtcgccatagcgccaatgtcggcacccgcggcaaaggctttttcactgcctgtgagcacaatgcagccaatgtccgggtcggcgtcgaatgcggttagcgccgcgccaagctcgtccattagcgcactgttgagggcattgagttgtttggggcggtttagggtgagtatgcccacgcggccttcgatgcggattaaaaccagttgctcactcatgtctgtgttctccaatgtggtgcgaaaagttgcttcgacgtaagcggttgatcatagccaagcggtgagcttgctagggtctttcaccaccagttcggcgatctggttggcgtgggtcgatggccagatgagggggcacgacaacatgcggccatcgcgcgcgacaccggcaaccaatgggtgctgggctacgtcggcgtggcgtctcgcaatgttctccacatcgctcagtgactttacccgccattgatcggtgccatcaaatagtgtcacccattcgtcacccgccgccatgcccgcttgttcgcctgcaccgcctcttgccacgtgggtgatgcggatgccgtctcgctcaacgacacgcatgcccaagcgctgggcgagggtgccgctcttggccgccacggcgacaccgtaatgactaagcagtgcgtgtaccggcaggtcttcggtgctgtgtacccagtgcgcgagctgtgtggcgacgttggcgtgcccttgctggttgagcagggcgtagatgtcggcctcactgatggtgccgcctttgcttttgacccataggccgcgcatgagggtgtcgagatcgccgccttgttggcgcagcatgaggtcggtgcacagcgctattagcgcccctttggtgtagtagctaacggtggcgttgggcgtgttttcgccaatgcggtagtacttgacccacgcgtcatagctagactgggcaacgctttgcagatgccgccctggggtggccgcaacgtggttaatggatttggccagcagcgtgagataggtgggcgtatcaatgagtttggcgcgttgcagaaacaggtcatcgtagtagctggtaaagccttcaaagaaccacagcagctcggtgtagttctcttggttgaagtcgatgcttgcaaactcggatgggcgcaggcgcttgacgttccatgtgtgaaagtactcatggctaatgaggccaagtaattggttgtagccagcgccttgtgcatgggggggcgctgcctcgccagcgacggccgttaggggcaagtcggcacgctggcaaatgagtgcggtgctggcgatgtgctctagcccgccgtagccgttttcagtggcgtgaagcatgaagacgtagcggtcaaagggtagttggcgttgcggttgtttgccgtgccaaaacgtgatctctgtttcgcaaattcggcgggtgtcggcaactaattttttgacatcaaacccgggcgcggtgtggttgccaatgcccgtgacaacgagttcatgcggtacgccagagaccttaaaccggctgacgtaaaaatcacccaaggtaaagggactgtcggcgagctcgccgcagttgcgggcggtgtagcgcccgaagccacgcgcgtcgatttgccgcgcgggcaatgcggtagacagccgccacgcattgaacgcgggcgcggtggggcgctcgacggagatggtttgtatctcgtcttcgcccccgaccacttgcaaacacaggctggtggggttaaagaagccgcgggtgttgtccaaaaaggcggttcgcaccgaggcgtcaaaggcgtagatttggtaattgagctccagcgggcgtttgccgtcggattccactagccactcatttttactgcactgcgtgatttggcaaggcgtgcggccttgcttggctgtgagcgcttgcaggtgttgcgaaaattcacgcaccaaataactacccgcaatccaaacgggtagacgcaggcgctgttgcttttttgggcttgagatgcgcagatgcacaccgaacaggtgcgcttccgcgctgtcaacgcgaatgttgtgatcgatgcgcatggtgttacttgatggcggccagacgcttctcaacttcggcggcagaaatggcgccggggacacgtgtgccgtctgagaagaaaagggcaggcgtgcccgagatacggtgcttttgaccaaacgcgatgttgcggtcaagcgcgctggtgtcgcagctgatggcggcggcgctggtggttagagggacttcattcaccatccagtcttcaaaggctacgccggggtttttgtcgcaccaaatggccttggacttgagcgttgaatccgcgccgagtatggggtacaaaaagatatgcagggtgatgttgtcgacattcatcatgtcacgttcaaagcgcttgcagaagccacagttggggtcttcaaaaaccgcgagttgacgcttgccgttaccgcgtttgatggtgaaggcatctttaaagggcagggcctcaaagggtattgcgctcaatttatcgaggcgctcctgcgtcaggttgcgtttgcccttgaggtcaacgagtacgccttgcagcaaaaattcaccgttggcatcggtgtacaaaatttcggtttcaccaaagcgaacttcgtagaggccggccatgggggtcttggtgacgctgttgatagcgggtaagttgggtagttgcttgggtagcatctcgcgaatcttggcttcctgtgcccagcccatgcttgccatgagagtgaatgcgatgcccacggccaagccgcgcaataaagagcgtgtgggggtgggtgcgagaggtgacgtgtggtgaagcatggtgtggttcgctaggtaggcgttgtttgggggtaagagggtgggtgggttggttcgtgggagggggctgttgggtagcggatgctcgctgttggagcaccatcgtggcaatcagttccccatgccaacacgctgtacccacgacttgagtgggcccatggcattaaagcccgacatgcctgcattgcgtagccaactggcggcggggttgcggcccaaggggttgttgaacaagtgaaagagtccgtgcgtgacccattgcatgggttcggtggcggcgcgtcgacgccgttggtagcgctgaagcacgcgtgaggcacccggagactcacctcgggcgcgtgccgcaacgcagtcactgagcgtttgtacgtcggccaagccaaggttgagaccttgccctgcgagggggtggatggtgtgcgccgcatcgccggctaacgcggtctgctgggcaacccattgcgtggttaagccgacgctcaaggggaaggcaacaggcccgctggtaagggagaggtgccctagcgcgccctgactggcttgggtgagttggtcttctagggcggcggtttgggcggtggtctccatgtccagccacgtctggtgcgcagcgtctggtagcgaccagacaacggccaggtcgtgcccgtcagcgccgcccatgggcagcagggccaaaatatgtgtgccgttaaaccactggtgggcgacgccgccgtggctgtgctcggcgcgcatgcgcaacgccaaggcacggtgggggtagtgcttacttaccatgtcaatacccaaggcggtgcgcgcgataccgctcttgccttcgcaaatgatggtcaatgcgctaggcggtgtctgggctgatggtgacgcgtggtcgtcaaattgcacgcgtgcatggcgtgtgacggcttcggcaagatggtcctctaggacaggcacatcgaccatccacgccaagggctgcgcttgctgtgggggtgcgtcgaattgcagcgcgcctgacgcatcgccaaacacccgcatatgggtcatgggggtcagccacgcggcctgatcgtcttgaggccagacaccgcatgctttgagggtgtctctcgaggtgtggttgatggcgtaggcgcgaatgtcgcgggtgtgcggtggcgcttggggcgcgggcaggctgacggaaaagccttgctctgccaataacaatgccgccgcgtgcgcggtgatgccagcgcctaaaacggtgatgtgccctgattgagtcatggcgttattctattgggacacccacttggggggccagcgatgaccctgccccggaagtgccttaaactctgggtcttgctttttgaggattgtcatgagtttgaaatgcggcatcgttggtctgcccaacgtcggtaaatctaccctgtttaacgcgcttaccaaggctggtatcgccgctgagaactaccctttttgcaccatcgagcccaacgttggcgtggtggaggtgcccgacacccgcctagcgcagctcagcgatatcgtgacgcctgagcgcattgttcctgcgattgttgaatttgtggatatagccggcttggtggcgggtgccagtacgggcgagggcttgggtaacaagtttttggcccatatccgcgaaaccgatgccacggttaacgttgtgcgttgttttgaagatgacaacgtggtgcacgtcgcgggcaaggtggatccgatttctgacattgaggtgattcaaacggagttgtgccttgccgacttaggcgcagtagagaaagccctgcaccgggtctccaagaccgcgcgttctggcgacaaagagtcggtgcgcttggtgtcgattttggagcgctgtcaggcggccttaaacgagggcaagcctgttcgcacgctagatttcagcaaaga

SEQ ID NO: 84 - DNA, 16125 bp, Artificial Sequence; identical to SEQ ID NO: 83
  Synthetic Oligonucleotide
  misc_feature (1)..(9997): n is a, c, g, or t

SEQ ID NO: 85 - DNA, 16094 bp, Artificial Sequence
  Synthetic Oligonucleotide
  misc_feature (1)..(9997): n is a, c, g, or t
nnnnnnnnnnnnnnnnnnnnnnnnnnnnnnnnnnnnnnnnnnnnnnnnnnnnnnnnnnnnnnnnnnnnnnnnnnnnnnnnnnnnnnnnnnnnnnnnnnnnnnnnnnnnnnnnnnnnnnnnnnnnnnnnnnnnnnnnnnnnnnnnnnnnnnnnnnnnnnnnnnnnnnnnnnnnnnnnnnnnnnnnnnnnnnnnnnnnnnnnnnnnnnnnnnnnnnnnnnnnnnnnnnnnnnnnnnnnnnnnnnnnnnnnnnnnnnnnnnnnnnnnnnnnnnnnnnnnnnnnnnnnnnnnnnnnnnnnnnnnnnnnnnnnnnnnnnnnnnnnnnnnnnnnnnnnnnnnnnnnnnnnnnnnnnnnnnnnnnnnnnnnnnnnnnnnnnnnnnnnnnnnnnnnnnnnnnnnnnnnnnnnnnnnnnnnnnnnnnnnnnnnnnnnnnnnnnnnnnnnnnnnnnnnnnnnnnnnnnnnnnnnnnnnnnnnnnnnnnnnnnnnnnnnnnnnnnnnnnnnnnnnnnnnnnnnnnnnnnnnnnnnnnnnnnnnnnnnnnnnnnnnnnnnnnnnnnnnnnnnnnnnnnnnnnnnnnnnnnnnnnnnnnnnnnnnnnnnnnnnnnnnnnnnnnnnnnnnnnnnnnnnnnnnnnnnnnnnnnnnnnnnnnnnnnnnnnnnnnnnnnnnnnnnnnnnnnnnnnnnnnnnnnnnnnnnnnnnnnnnnnnnnnnnnnnnnnnnnnnnnnnnnnnnnnnnnnnnnnnnnnnnnnnnnnnnnnnnnnnnnnnnnnnnnnnnnnnnnnnnnnnnnnnnnnnnnnnnnnnnnnnnnnnnnnnnnnnnnnnnnnnnnnnnnnnnnnnnnnnnnnnnnnnnnnnnnnnnnnnnnnnnnnnnnnnnnnnnnnnnnnnnnnnnnnnnnnnnnnnnnnnnnnnnnnnnnnnnnnnnnnnnnnnnnnnnnnnnnnnnnnnnnnnnnnnnnnnnnnnnnnnnnnnnnnnnnnnnnnnnnnnnnnnnnnnnnnnnnnnnnnnnnnnnnnnnnnnnnnnnnnnnnnnnnnnnnnnnnnnnnnnnnnnnnnnnnnnnnnnnnnnnnnnnnnnnnnnnnnnnnnnnnnnnnnnnnnnnnnnnnnnnnnnnnnnnnnnnnnnnnnnnnnnnnnnnnnnnnnnnnnnnnnnnnnnnnnnnnnnnnnnnnnnnnnnnnnnnnnnnnnnnnnnnnnnnnnnnnnnnnnnnnnnnnnnnnnnnnnnnnnnnnnnnnnnnnnnnnnnnnnnnnnnnnnnnnnnnnnnnnnnnnnnnnnnnnnnnnnnnnnnnnnnnnnnnnnnnnnnnnnnnnnnnnnnnnnnnnnnnnnnnnnnnnnnnnnnnnnnnnnnnnnnnnnnnnnnnnnnnnnnnnnnnnnnnnnnnnnnnnnnnnnnnnnnnnnnnnnnnnnnnnnnnnnnnnnnnnnnnnnnnnnnnnnnnnnnnnnnnnnnnnnnnnnnnnnnnnnnnnnnnnnnnnnnnnnnnnnnnnnnnnnnnnnnnnnnnnnnnnnnnnnnnnnnnnnnnnnnnnnnnnnnnnnnnnnnnnnnnnnnnnnnnnnnnnnnnnnnnnnnnnnnnnnnnnnnnnnnnnnnnnnnnnnnnnnnnnnnnnnnnnnnnnnnnnnnnnnnnnnnnnnnnnnnnnnnnnnnnnnnnnnnnnnnnnnnnnnnnnnnnnnnnnnnnnnnnnnnnnnnnnnnnnnnnnnnnnnnnnnnnnnnnnnnnnnnnnnnnnnnnnnnnnnnnnnnnnnnnnnnnnnnnnnnnnnnnnnnnnnnnnnnnnnnnnnnnnnnnnnnnnnnnnnnnnnnnnnnnnnnnnnnnnnnnnnnnnnnnnnnnnnnnnnnnnnnnnnnnnnnnnnnnnnnnnnnnnnnnnnnnnnnnnnnnnnnnnnnnnnnnnnnnnnnnnnnnnnnnnnnnnnnnnnnnnnnnnnnnnnnnnnnnnnnnnnnnnnnnnnnnnnnnnnnnnnnnnnnnnnnnnnnnnnnnnnnnnnnnnnnnnnnnnnnnnnnnnnnnnnnnnnnnnnnnnnnnnnnnnnnnnnnnnnnnnnnnnnnnnnnnnnnnnnnnnnnnnnnnnnnnnnnnnnnnnnnnnnnnnnnnnnnnnnnnnnnnnnnnnnnnnnnnnnnnnnnnnnnnnnnnnnnnnnnnnnnnnnnnnnnnnnnnnnnnnnnnnnnnnnnnnnnnnnnnnnnnnnnnnnnnnnnnnnnnnnnnnnnnnnnnnnnnnnnnnnnnnnnnnnnnnnnnnnnnnnnnnnnnnnnnnnnnnnnnnnnnnnnnnnnnnnnnnnnnnnnnnnnnnnnnnnnnnnnnnnnnnnnnnnnnnnnnnnnnnnnnnnnnnnnnnnnnnnnnnnnnnnnnnnnnnnnnnnnnnnnnnnnnnnnnnnnnnnnnnnnnnnnnnnnnnnnnnnnnnnnnnnnnnnnnnnnnnnnnnnnnnnnnnnnnnnnnnnnnnnnnnnnnnnnnnnnnnnnnnnnnnnnnnnnnnnnnnnnnnnnnnnnnnnnnnnnnnnnnnnnnnnnnnnnnnnnnnnnnnnnnnnnnnnnnnnnnnnnnnnnnnnnnnnnnnnnnnnnnnnnnnnnnnnnnnnnnnnnnnnnnnnnnnnnnnnnnnnnnnnnnnnnnnnnnnnnnnnnnnnnnnnnnnnnnnnnnnnnnnnnnnnnnnnnnnnnnnnnnnnnnnnnnnnnnnnnnnnnnnnnnnnnnnnnnnnnnnnnnnnnnnnnnnnnnnnnnnnnnnnnnnnnnnnnnnnnnnnnnnnnnnnnnnnnnnnnnnnnnnnnnnnnnnnnnnnnnnnnnnnnnnnnnnnnnnnnnnnnnnnnnnnnnnnnnnnnnnnnnnnnnnnnnnnnnnnnnnnnnnnnnnnnnnnnnnnnnnnnnnnnnnnnnnnnnnnnnnnnnnnnnnnnnnnnnnnnnnnnnnnnnnnnnnnnnnnnnnnnnnnnnnnnnnnnnnnnnnnnnnnnnnnnnnnnnnnnnnnnnnnnnnnnnnnnnnnnnnnnnnnnnnnnnnnnnnnnnnnnnnnnnnnnnnnnnnnnnnnnnnnnnnnnnnnnnnnnnnnnnnnnnnnnnnnnnnnnnnnnnnnnnnnnnnnnnnnnnnnnnnnnnnnnnnnnnnnnnnnnnnnnnnnnnnnnnnnnnnnnnnnnnnnnnnnnnnnnnnnnnnnnnnnnnnnnnnnnnnnnnnnnnnnnnnnnnnnnnnnnnnnnnnnnnnnnnnnnnnnnnnnnnnnnnnnnnnnnnnnnnnnnnnnnnnnnnnnnnnnnnnnnnnnnnnnnnnnnnnnnnnnnnnnnnnnnnnnnnnnnnnnnnnnnnnnnnnnnnnnnnnnnnnnnnnnnnnnnnnnnnnnnnnnnnnnnnnnnnnnnnnnnnnnnnnnnnnnnnnnnnnnnnnnnnnnnnnnnnnnnnnnnnnnnnnnnnnnnnnnnnnnnnnnnnnnnnnnnnnnnnnnnnnnnnnnnnnnnnnnnnnnnnnnnnnnnnnnnnnnnnnnnnnnnnnnnnnnnnnnnnnnnnnnnnnnnnnnnnnnnnnnnnnnnnnnnnnnnnnnnnnnnnnnnnnnnnnnnnnnnnnnnnnnnnnnnnnnnnnnnnnnnnnnnnnnnnnnnnnnnnnnnnnnnnnnnnnnnnnnnnnnnnnnnnnnnnnnnnnnnnnnnnnnnnnnnnnnnnnnnnnnnnnnnnnnnnnnnnnnnnnnnnnnnnnnnnnnnnnnnnnnnnnnnnnnnnnnnnnnnnnnnnnnnnnnnnnnnnnnnnnnnnnnnnnnnnnnnnnnnnnnnnnnnnnnnnnnnnnnnnnnnnnnnnnnnnnnnnnnnnnnnnnnnnnnnnnnnnnnnnnnnnnnnnnnnnnnnnnnnnnnnnnnnnnnnnnnnnnnnnnnnnnnnnnnnnnnnnnnnnnnnnnnnnnnnnnnnnnnnnnnnnnnnnnnnnnnnnnnnnnnnnnnnnnnnnnnnnnnnnnnnnnnnnnnnnnnnnnnnnnnnnnnnnnnnnnnnnnnnnnnnnnnnnnnnnnnnnnnnnnnnnnnnnnnnnnnnnnnnnnnnnnnnnnnnnnnnnnnnnnnnnnnnnnnnnnnnnnnnnnnnnnnnnnnnnnnnnnnnnnnnnnnnnnnnnnnnnnnnnnnnnnnnnnnnnnnnnnnnnnnnnnnnnnnnnnnnnnnnnnnnnnnnnnnnnnnnnnnnnnnnnnnnnnnnnnnnnnnnnnnnnnnnnnnnnnnnnnnnnnnnnnnnnnnnnnnnnnnnnnnnnnnnnnnnnnnnnnnnnnnnnnnnnnnnnnnnnnnnnnnnnnnnnnnnnnnnnnnnnnnnnnnnnnnnnnnnnnnnnnnnnnnnnnnnnnnnnnnnnnnnnnnnnnnnnnnnnnnnnnnnnnnnnnnnnnnnnnnnnnnnnnnnnnnnnnnnnnnnnnnnnnnnnnnnnnnnnnnnnnnnnnnnnnnnnnnnnnnnnnnnnnnnnnnnnnnnnnnnnnnnnnnnnnnnnnnnnnnnnnnnnnnnnnnnnnnnnnnnnnnnnnnnnnnnnnnnnnnnnnnnnnnnnnnnnnnnnnnnnnnnnnnnnnnnnnnnnnnnnnnnnnnnnnnnnnnnnnnnnnnnnnnnnnnnnnnnnnnnnnnnnnnnnnnnnnnnnnnnnnnnnnnnnnnnnnnnnnnnnnnnnnnnnnnnnnnnnnnnnnnnnnnnnnnnnnnnnnnnnnnnnnnnnnnnnnnnnnnnnnnnnnnnnnnnnnnnnnnnnnnnnnnnnnnnnnnnnnnnnnnnnnnnnnnnnnnnnnnnnnnnnnnnnnnnnnnnnnnnnnnnnnnnnnnnnnnnnnnnnnnnnnnnnnnnnnnnnnnnnnnnnnnnnnnnnnnnnnnnnnnnnnnnnnnnnnnnnnnnnnnnnnnnnnnnnnnnnnnnnnnnnnnnnnnnnnnnnnnnnnnnnnnnnnnnnnnnnnnnnnnnnnnnnnnnnnnnnnnnnnnnnnnnnnnnnnnnnnnnnnnnnnnnnnnnnnnnnnnnnnnnnnnnnnnnnnnnnnnnnnnnnnnnnnnnnnnnnnnnnnnnnnnnnnnnnnnnnnnnnnnnnnnnnnnnnnnnnnnnnnnnnnnnnnnnnnnnnnnnnnnnnnnnnnnnnnnnnnnnnnnnnnnnnnnnnnnnnnnnnnnnnnnnnnnnnnnnnnnnnnnnnnnnnnnnnnnnnnnnnnnnnnnnnnnnnnnnnnnnnnnnnnnnnnnnnnnnnnnnnnnnnnnnnnnnnnnnnnnnnnnnnnnnnnnnnnnnnnnnnnnnnnnnnnnnnnnnnnnnnnnnnnnnnnnnnnnnnnnnnnnnnnnnnnnnnnnnnnnnnnnnnnnnnnnnnnnnnnnnnnnnnnnnnnnnnnnnnnnnnnnnnnnnnnnnnnnnnnnnnnnnnnnnnnnnnnnnnnnnnnnnnnnnnnnnnnnnnnnnnnnnnnnnnnnnnnnnnnnnnnnnnnnnnnnnnnnnnnnnnnnnnnnnnnnnnnnnnnnnnnnnnnnnnnnnnnnnnnnnnnnnnnnnnnnnnnnnnnnnnnnnnnnnnnnnnnnnnnnnnnnnnnnnnnnnnnnnnnnnnnnnnnnnnnnnnnnnnnnnnnnnnnnnnnnnnnnnnnnnnnnnnnnnnnnnnnnnnnnnnnnnnnnnnnnnnnnnnnnnnnnnnnnnnnnnnnnnnnnnnnnnnnnnnnnnnnnnnnnnnnnnnnnnnnnnnnnnnnnnnnnnnnnnnnnnnnnnnnnnnnnnnnnnnnnnnnnnnnnnnnnnnnnnnnnnnnnnnnnnnnnnnnnnnnnnnnnnnnnnnnnnnnnnnnnnnnnnnnnnnnnnnnnnnnnnnnnnnnnnnnnnnnnnnnnnnnnnnnnnnnnnnnnnnnnnnnnnnnnnnnnnnnnnnnnnnnnnnnnnnnnnnnnnnnnnnnnnnnnnnnnnnnnnnnnnnnnnnnnnnnnnnnnnnnnnnnnnnnnnnnnnnnnnnnnnnnnnnnnnnnnnnnnnnnnnnnnnnnnnnnnnnnnnnnnnnnnnnnnnnnnnnnnnnnnnnnnnnnnnnnnnnnnnnnnnnnnnnnnnnnnnnnnnnnnnnnnnnnnnnnnnnnnnnnnnnnnnnnnnnnnnnnnnnnnnnnnnnnnnnnnnnnnnnnnnnnnnnnnnnnnnnnnnnnnnnnnnnnnnnnnnnnnnnnnnnnnnnnnnnnnnnnnnnnnnnnnnnnnnnnnnnnnnnnnnnnnnnnnnnnnnnnnnnnnnnnnnnnnnnnnnnnnnnnnnnnnnnnnnnnnnnnnnnnnnnnnnnnnnnnnnnnnnnnnnnnnnnnnnnnnnnnnnnnnnnnnnnnnnnnnnnnnnnnnnnnnnnnnnnnnnnnnnnnnnnnnnnnnnnnnnnnnnnnnnnnnnnnnnnnnnnnnnnnnnnnnnnnnnnnnnnnnnnnnnnnnnnnnnnnnnnnnnnnnnnnnnnnnnnnnnnnnnnnnnnnnnnnnnnnnnnnnnnnnnnnnnnnnnnnnnnnnnnnnnnnnnnnnnnnnnnnnnnnnnnnnnnnnnnnnnnnnnnnnnnnnnnnnnnnnnnnnnnnnnnnnnnnnnnnnnnnnnnnnnnnnnnnnnnnnnnnnnnnnnnnnnnnnnnnnnnnnnnnnnnnnnnnnnnnnnnnnnnnnnnnnnnnnnnnnnnnnnnnnnnnnnnnnnnnnnnnnnnnnnnnnnnnnnnnnnnnnnnnnnnnnnnnnnnnnnnnnnnnnnnnnnnnnnnnnnnnnnnnnnnnnnnnnnnnnnnnnnnnnnnnnnnnnnnnnnnnnnnnnnnnnnnnnnnnnnnnnnnnnnnnnnnnnnnnnnnnnnnnnnnnnnnnnnnnnnnnnnnnnnnnnnnnnnnnnnnnnnnnnnnnnnnnnnnnnnnnnnnnnnnnnnnnnnnnnnnnnnnnnnnnnnnnnnnnnnnnnnnnnnnnnnnnnnnnnnnnnnnnnnnnnnnnnnnnnnnnnnnnnnnnnnnnnnnnnnnnnnnnnnnnnnnnnnnnnnnnnnnnnnnnnnnnnnnnnnnnnnnnnnnnnnnnnnnnnnnnnnnnnnnnnnnnnnnnnnnnnnnnnnnnnnnnnnnnnnnnnnnnnnnnnnnnnnnnnnnnnnnnnnnnnnnnnnnnnnnnnnnnnnnnnnnnnnnnnnnnnnnnnnnnnnnnnnnnnnnnnnnnnnnnnnnnnnnnnnnnnnnnnnnnnnnnnnnnnnnnnnnnnnnnnnnnnnnnnnnnnnnnnnnnnnnnnnnnnnnnnnnnnnnnnnnnnnnnnnnnnnnnnnnnnnnnnnnnnnnnnnnnnnnnnnnnnnnnnnnnnnnnnnnnnnnnnnnnnnnnnnnnnnnnnnnnnnnnnnnnnnnnnnnnnnnnnnnnnnnnnnnnnnnnnnnnnnnnnnnnnnnnnnnnnnnnnnnnnnnnnnnnnnnnnnnnnnnnnnnnnnnnnnnnnnnnnnnnnnnnnnnnnnnnnnnnnnnnnnnnnnnnnnnnnnnnnnnnnnnnnnnnnnnnnnnnnnnnnnnnnnnnnnnnnnnnnnnnnnnnnnnnnnnnnnnnnnnnnnnnnnnnnnnnnnnnnnnnnnnnnnnnnnnnnnnnnnnnnnnnnnnnnnnnnnnnnnnnnnnnnnnnnnnnnnnnnnnnnnnnnnnnnnnnnnnnnnnnnnnnnnnnnnnnnnnnnnnnnnnnnnnnnnnnnnnnnnnnnnnnnnnnnnnnnnnnnnnnnnnnnnnnnnnnnnnnnnnnnnnnnnnnnnnnnnnnnnnnnnnnnnnnnnnnnnnnnnnnnnnnnnnnnnnnnnnnnnnnnnnnnnnnnnnnnnnnnnnnnnnnnnnnnnnnnnnnnnnnnnnnnnnnnnnnnnnnnnnnnnnnnnnnnnnnnnnnnnnnnnnnnnnnnnnnnnnnnnnnnnnnnnnnnnnnnnnnnnnnnnnnnnnnnnnnnnnnnnnnnnnnnnnnnnnnnnnnnnnnnnnnnnnnnnnnnnnnnnnnnnnnnnnnnnnnnnnnnnnnnnnnnnnnnnnnnnnnnnnnnnnnnnnnnnnnnnnnnnnnnnnnnnnnnnnnnnnnnnnnnnnnnnnnnnnnnnnnnnnnnnnnnnnnnnnnnnnnnnnnnnnnnnnnnnnnnnnnnnnnnnnnnnnnnnnnnnnnnnnnnnnnnnnnnnnnnnnnnnnnnnnnnnnnnnnnnnnnnnnnnnnnnnnnnnnnnnnnnnnnnnnnnnnnnnnnnnnnnnnnnnnnnnnnnnnnnnnnnnnnnnnnnnnnnnnnnnnnnnnnnnnnnnnnnnnnnnnnnnnnnnnnnnnnnnnnnnnnnnnnnnnnnnnnnnnnnnnnnnnnnnnnnnnnnnnnnnnnnnnnnnnnnnnnnnnnnnnnnnnnnnnnnnnnnnnnnnnnnnnnnnnnnnnnnnnnnnnnnnnnnnnnnnnnnnnnnnnnnnnnnnnnnnnnnnnnnnnnnnnnnnnnnnnnnnnnnnnnnnnnnnnnnnnnnnnnnnnnnnnnnnnnnnnnnnnnnnnnnnnnnnnnnnnnnnnnnnnnnnnnnnnnnnnnnnnnnnnnnnnnnnnnnnnnnnnnnnnnnnnnnnnnnnnnnnnnnnnnnnnnnnnnnnnnnnnnnnnnnnnnnnnnnnnnnnnnnnnnnnnnnnnnnnnnnnnnnnnnnnnnnnnnnnnnnnnnnnnnnnnnnnnnnnnnnnnnnnnnnnnnnnnnnnnnnnnnnnnnnnnnnnnnnnnnnnnnnnnnnnnnnnnnnnnnnnnnnnnnnnnnnnnnnnnnnnnnnnnnnnnnnnnnnnnnnnnnnnnnnnnnnnnnnnnnnnnnnnnnnnnnnnnnnnnnnnnnnnnnnnnnnnnnnnnnnnnnnnnnnnnnnnnnnnnnnnnnnnnnnnnnnnnnnnnnnnnnnnnnnnnnnnnnnnnnnnnnnnnnnnnnnnnnnnnnnnnnnnnnnnnnnnnnnnnnnnnnnnnnnnnnnnnnnnnnnnnnnnnnnnnnnnnnnnnnnnnnnnnnnnnnnnnnnnnnnnnnnnnnnnnnnnnnnnnnnnnnnnnnnnnnnnnnnnnnnnnnnnnnnnnnnnnnnnnnnnnnnnnnnnnnnnnnnnnnnnnnnnnnnnnnnnnnnnnnnnnnnnnnnnnnnnnnnnnnnnnnnnnnnnnnnnnnnnnnnnnnnnnnnnnnnnnnnnnnnnnnnnnnnnnnnnnnnnnnnnnnnnnnnnnnnnnnnnnnnnnnnnnnnnnnnnnnnnnnnnnnnnnnnnnnnnnnnnnnnnnnnnnnnnnnnnnnnnnnnnnnnnnnnnnnnnnnnnnnnnnnnnnnnnnnnnnnnnnnnnnnnnnnnnnnnnnnnnnnnnnnnnnnnnnnnnnnnnnnnnnnnnnnnnnnnnnnnnnnnnnnnnnnnnnnnnnnnnnnnnnnnnnnnnnnnnnnnnnnnnnnnnnnnnnnnnnnnnnnnnnnnnnnnnnnnnnnnnnnnnnnnnnnnnnnnnnnnnnnnnnnnnnnnnnnnnnnnnnnnnnnnnnnnnnnnnnnnnnnnnnnnnnnnnnnnnnnnnnnnnnnnnnnnnnnnnnnnnnnnnnnnnnnnnnnnnnnnnnnnnnnnnnnnnnnnnnnnnnnnnnnnnnnnnnnnnnnnnnnnnnnnnnnnnnnnnnnnnnnnnnnnnnnnnnnnnnnnnnnnnnnnnnnnnnnnnnnnnnnnnnnnnnnnnnnnnnnnnnnnnnnnnnnnnnnnnnnnnnnnnnnnnnnnnnnnnnnnnnnnnnnnnnnnnnnnnnnnnnnnnnnnnnnnnnnnnnnnnnnnnnnnnnnnnnnnnnnnnnnnnnnnnnnnnnnnnnnnnnnnnnnnnnnnnnnnnnnnnnnnnnnnnnnnnnnnnnnnnnnnnnnnnnnnnnnnnnnnnnnnnnnnnnnnnnnnnnnnnnnnnnnnnnnnnnnnnnnnnnnnnnnnnnnnnnnnnnnnnnnnnnnnnnnnnnnnnnnnnnnnnnnnnnnnnnnnnnnnnnnnnnnnnnnnnnnnnnnnnnnnnnnnnnnnnnnnnnnnnnnnnnnnnnnnnnnnnnnnnnnnnnnnnnnnnnnnnnnnnnnnnnnnnnnnnnnnnnnnnnnnnnnnnnnnnnnnnnnnnnnnnnnnnnnnnnnnnnnnnnnnnnnnnnnnnnnnnnnnnnnnnnnnnnnnnnnnnnngatcaagccaccctctaaatgggtggttacttatttacagacataccatgggccgccgtgcccttattaggagttcaccgatgtttcgttcctcagagcagcagcatttctgcaatgtgcttattaagcatttgaaacgcgtcgatgcgcccatattgctggaaggcggggtgggtcttgggaagacgcgtgcctacctggccgcactggcaactacgacgcaaacggttgccattgtgttacccacacaccaactgattgaccagttgctggctagcgctgacttgtcagccgttgccttgccattggccgtgttcaggccagccagtcggtttgacacacgggaggcgtaccaagcgcagcgagaggcggcccgtgctgcgcgtgtcatgctctgcaccgctgcaagcgtgattattgaccaacgccttgcgggggcttacaacggcgcaacacagcgtgatgtggtgttatttgatgaagccgaccagttacccgatatggcggcattgcagagcgactttgtgattgaggcggcgctactgcagggccagccgctgcacgcggccttagagcgcataagcaccacccgttcacagtcggttgaggccgagcaaaaggctgctgcgcgggtcatgcttgagatattggccgaaccggtgggctacgcatccgtcgggcttgatgatgatggcaatgcgcggctacaccacgccctgccaggtcgcttattaaagaaaattagcaatcgcggtagcacggtgtttctttctgcaacgctgacccacaacgataagtttgatgacttcaagatcgccatgggcctagacgcggtgagtagcctgtcaacaagcattgagccagaacagcatggcacgctcgacttcaccgtacacgcgcacgaggtggacacgcctgactggtttgcggccaccgttcagtgcatacaaagcgcgcagcgccccacgttggtggtcacacctagccatgacctcacagagcggctacaaaccgccgtgggtgagcaagcagacttgcttatacgtgcgggtgcatgggcgggtcttgacacgccaacgcgctggcgtaccgtggttattccgcgcgtgccatttggcgcaccagtcattgttgacggggtggcggtcacgtcttacttggccgccaaggtgacggccagtcggcggatgcgccaagcaattggccgtgggcttagaacacctgaggcggtgtgcacggttgtggttttggatgcgcgggcacacaacttaggtcgctttgtgccagagcgttttgcggcagattggtcgtctcggcaagtgtttgaggagggtgcccgccatgcggtggtgctgtccaaagcggagcgcgaccccgctttggccaaagccgcgctcagacactacggcgctcaatgccaacaagcgggttgttccgtgacagaggcgtgtcagctggacgtgcaccaccttgaccccgtaagcgaaggcgtgcgccgcacaaccttgaaggatgtgaccgtgctgtgtgcaaaccaccaccgacaggcccaccacgacatgaaaatggggctgaacgtgtcgtagcgcaacaaaaaacccgccatacctttgggtacgcgggttttgggagttctggcaaggcctgaaacctaaatgtggtggtgataggtggacttgaaccaccgaccccagcattatgaatgctgtgctctaaccaactgagctatatcaccgagcctgaaattatagccaaaattctcagggctttggcttgccgccaaaagtttttgttagccattttgtcgcgcccgtacgacgcgccaagcccttggttattggtgtttgaaggcgggtttgcgcttgtttatgaacgcatccatgccctctttttggtcttcggttgcaaacagcgcgtggaacagacggcgctcaaaacgcacgccttcgctgaggctgccttcaaacgcttggttcaccgcttcctttgccgccatgacactggggagggagtagttgcaaatcatcagggctgcgcccaaggcctcggtcatgagttggtcatcggcgaccacgcggctcaccagtccgccgcgctcggcttctgcagcgtccatcatgcggcctgtgagggccatgtccatggccttggctttgccaacggcgcgtggcaggcgctgcgtgccacctgcgccagggataacgcccaacttgatttcgggttggccaaatttggcgctctcgctggcaatgatgacgtcgcacatcatggccaattcacaaccgccgccgagcgcaaaaccgctgacggcggcaataacgggcttgcgaacgctgcgaatggtttcccagttgcgcgtgatgtagtctgacttgtagacgtccgcaaaggtgtaggtcgccatagcgccaatgtcggcacccgcggcaaaggctttttcactgcctgtgagcacaatgcagccaatgtccgggtcggcgtcgaatgcggttagcgccgcgccaagctcgtccattagcgcactgttgagggcattgagttgtttggggcggtttagggtgagtatgcccacgcggccttcgatgcggattaaaaccagttgctcactcatgtctgtgttctccaatgtggtgcgaaaagttgcttagaaaaagttgtttcgaaagttgcttcgacgtaaggggttgatcatagccaagcggtgagcttgctagggtctttcaccaccagttcggcgatctggttggcgtgggtcgatggccagatgagggggcacgacaacatgcggccatcgcgcgcgacaccggcaaccaatgggtgctgggctacgtcggcgtggcgtctcgcaatgttctccacatcgctcagtgactttacccgccattgatcggtgccatcaaatagtgtcacccattcgtcacccgccgccatgcccgcttgttcgcctgcaccgcctcttgccacgtgggtgatgcggatgccgtctcgctcaacgacacgcatgcccaagcgctgggcgagggtgccgctcttggccgccactgcgacaccgtaatgactaagcagtgcgtgtaccggcaggtcttccgtgctgtgtacccagtgcgcgagttgtgtggcgacgttggcgtgcccttgctggttgagcagggcgtagatgtcggcctcactgatggtgccgcctttgcttttgacccataggccgcgcatgagggtgtcgagatcgccgccttgttggcgcagcatgaggtcggtgcacagcgctattagcgcccctttggtgtagtagctaacggtggcgttgggcgtgttttcgccaatgcggtagtacttgacccacgcgtcatagctagactgggcaacgctttgcagatgccgccctggggtggccgcaacgtggttaatggatttggccagcagcgtgagataggtgggcgtatcaatgagtttggcgcgttgcagaaacaggtcatcgtagtagctggtaaagccttcaaagaaccacagcagctcggtgtagttctcttggttgaagtcgatgcttgcaaactcggatgggcgcaggcgcttgacgttccatgtgtgaaagtactcatggctaatgaggccaagtaattggttgtagccagcgccttgtgcatgggggggcgctgcctcgccagcgacggccgttaggggcaagtcggcacgctggcaaatgagtgcggtgctggcgatgtgctctagcccgccgtagccgttttcagtggcgtgaagcatgaagacgtagcggtcaaagggtagttggcgttgcggttgtttgccgtgccaaaacgtgatctctgtttcgcaaattcggcgggtgtcggcaactaattttttgacatcaaacccgggcgcggtgtggttgccaatgcccgtgacaacgagttcatgcggtacgccagagaccttaaaccggctgacgtaaaaatcacccaaggtaaagggactgtcggcgagctcgccgcagttgcgggcggtgtagcgcccgaagccacgcgcgtcgatttgccgcgcgggcaatgcggtagacagccgccacgcattgaacgcgggcgcggtggggcgctcgacggagatggtttgtatctcgtcttcgcccccgaccacttgcaaacacaggctggtggggttgaagaagccgcgggtgttgtccaaaaaggcggttcgcaccgaggcgtcaaaggcgtagatttggtaattgagctccagcgggcgtttgccgtcggattccactagccactcatttttactgcactgcgtgatttggcaaggcgtgcggccttgcttggctgtgagcgcttgcaggtgttgcgaaaattcacgcaccaaataactacccgcaatccaaacgggtagacgcaggcgctgttgcttttttgggcttgagatgcgcagatgcacaccgaacaggtgcgcttccgcgctgtcaacgcgaatgttgtgatcgatgcgcatggtgttacttgatggcggccagacgcttctcaacttcggcggcagaaatggcgccggggacacgtgtgccgtctgagaagaaaagggcaggcgtgcccgagatacggtgcttttgaccaaacgcgatgttgcggtcaagcgcgctggtgtcgcagctgatggcggcggcgctggtggttagagggacttcattcaccatccagtcttcaaaggctacgccggggtttttgtcgcaccaaatggccttggacttgagcgttgaatccgcgccgagtatggggtacaaaaagatatgcagggtgatgttgtcgacattcatcatgtcacgttcaaagcgcttgcagaagccacagttggggtcttcaaaaaccgcgagttgacgcttgccgttaccgcgtttgatggtgaaggcatctttaaagggcagggcctcaaagggtattgcgctcaatttatcgaggcgctcctgcgtcaggttgcgtttgcccttgaggtcaacgagtacgccttgcagcaaaaattcaccgttggcatcggtgtacaaaatttcggtttcaccaaagcgaacttcgtagaggccggccatgggggtcttggtgacgctgttgatagcgggtaagttgggtagttgcttgggtagcatctcgcgaatcttggcttcctgtgcccagcccatgcttgccatgagggtgaatgcgatgcccacggccaagccgcgcaataaagagcgtgtgggggtgggtgcgagaggtgacgtgtggtgaagcatggtgtggttcgctaggtaggcgttgtttgggggtaagagggtgggtgggttggttcgtgggagggggctgttgggtagcggatgctcgctgttggagcaccatcgtggcaatcagttccccatgccaacacgctgtacccacgacttgagtgggcccatggcattaaagcccgacatgcctgcattgcgtagccaactggcggcggggttgcggcccaaggggttgttgaacaagtgaaagagtccgtgcgtgacccattgcatgggttcggtggcggcgcgtcgacgccgttggtagcgctgaagcacgcgtgaggcacccggagactcacctcgggcgcgtgccgcaacgcagtcactgagcgtttgtacgtcggccaagccaaggttgagaccttgccctgcgagggggtggatggtgtgcgccgcatcgccggctaacgcggtctgctgggcaacccattgcgtggttaagccgacgctcaaggggaaggcaacaggcccgctggtaagggagaggtgccctagcgcgccctgactggcttgggtgagttggtcttctagggcggcggtttgggcggtggtctccatgtccagccacgtctggtgcgcagcgtctggtagcgaccagacaacggccaggtcgtgcccgtcagcgccgcccatgggcagcagggccaaaatatgtgtgccgttaaaccactggtgggcgacgccgccgtggctgtgctcggcgcgcatgcgcaacgccaaggcacggtgggggtagtgcttacttaccatgtcaatacccaaggcggtgcgcgcgataccgctcttgccttcgcaaatgatggtcaatgcgctagg

SEQ ID NO: 86 - DNA, 16016 bp, Artificial Sequence
  Synthetic Oligonucleotide
  misc_feature (1)..(9919): n is a, c, g, or t
nnnnnnnnnnnnnnnnnnnnnnnnnnnnnnnnnnnnnnnnnnnnnnnnnnnnnnnnnnnnnnnnnnnnnnnnnnnnnnnnnnnnnnnnnnnnnnnnnnnnnnnnnnnnnnnnnnnnnnnnnnnnnnnnnnnnnnnnnnnnnnnnnnnnnnnnnnnnnnnnnnnnnnnnnnnnnnnnnnnnnnnnnnnnnnnnnnnnnnnnnnnnnnnnnnnnnnnnnnnnnnnnnnnnnnnnnnnnnnnnnnnnnnnnnnnnnnnnnnnnnnnnnnnnnnnnnnnnnnnnnnnnnnnnnnnnnnnnnnnnnnnnnnnnnnnnnnnnnnnnnnnnnnnnnnnnnnnnnnnnnnnnnnnnnnnnnnnnnnnnnnnnnnnnnnnnnnnnnnnnnnnnnnnnnnnnnnnnnnnnnnnnnnnnnnnnnnnnnnnnnnnnnnnnnnnnnnnnnnnnnnnnnnnnnnnnnnnnnnnnnnnnnnnnnnnnnnnnnnnnnnnnnnnnnnnnnnnnnnnnnnnnnnnnnnnnnnnnnnnnnnnnnnnnnnnnnnnnnnnnnnnnnnnnnnnnnnnnnnnnnnnnnnnnnnnnnnnnnnnnnnnnnnnnnnnnnnnnnnnnnnnnnnnnnnnnnnnnnnnnnnnnnnnnnnnnnnnnnnnnnnnnnnnnnnnnnnnnnnnnnnnnnnnnnnnnnnnnnnnnnnnnnnnnnnnnnnnnnnnnnnnnnnnnnnnnnnnnnnnnnnnnnnnnnnnnnnnnnnnnnnnnnnnnnnnnnnnnnnnnnnnnnnnnnnnnnnnnnnnnnnnnnnnnnnnnnnnnnnnnnnnnnnnnnnnnnnnnnnnnnnnnnnnnnnnnnnnnnnnnnnnnnnnnnnnnnnnnnnnnnnnnnnnnnnnnnnnnnnnnnnnnnnnnnnnnnnnnnnnnnnnnnnnnnnnnnnnnnnnnnnnnnnnnnnnnnnnnnnnnnnnnnnnnnnnnnnnnnnnnnnnnnnnnnnnnnnnnnnnnnnnnnnnnnnnnnnnnnnnnnnnnnnnnnnnnnnnnnnnnnnnnnnnnnnnnnnnnnnnnnnnnnnnnnnnnnnnnnnnnnnnnnnnnnnnnnnnnnnnnnnnnnnnnnnnnnnnnnnnnnnnnnnnnnnnnnnnnnnnnnnnnnnnnnnnnnnnnnnnnnnnnnnnnnnnnnnnnnnnnnnnnnnnnnnnnnnnnnnnnnnnnnnnnnnnnnnnnnnnnnnnnnnnnnnnnnnnnnnnnnnnnnnnnnnnnnnnnnnnnnnnnnnnnnnnnnnnnnnnnnnnnnnnnnnnnnnnnnnnnnnnnnnnnnnnnnnnnnnnnnnnnnnnnnnnnnnnnnnnnnnnnnnnnnnnnnnnnnnnnnnnnnnnnnnnnnnnnnnnnnnnnnnnnnnnnnnnnnnnnnnnnnnnnnnnnnnnnnnnnnnnnnnnnnnnnnnnnnnnnnnnnnnnnnnnnnnnnnnnnnnnnnnnnnnnnnnnnnnnnnnnnnnnnnnnnnnnnnnnnnnnnnnnnnnnnnnnnnnnnnnnnnnnnnnnnnnnnnnnnnnnnnnnnnnnnnnnnnnnnnnnnnnnnnnnnnnnnnnnnnnnnnnnnnnnnnnnnnnnnnnnnnnnnnnnnnnnnnnnnnnnnnnnnnnnnnnnnnnnnnnnnnnnnnnnnnnnnnnnnnnnnnnnnnnnnnnnnnnnnnnnnnnnnnnnnnnnnnnnnnnnnnnnnnnnnnnnnnnnnnnnnnnnnnnnnnnnnnnnnnnnnnnnnnnnnnnnnnnnnnnnnnnnnnnnnnnnnnnnnnnnnnnnnnnnnnnnnnnnnnnnnnnnnnnnnnnnnnnnnnnnnnnnnnnnnnnnnnnnnnnnnnnnnnnnnnnnnnnnnnnnnnnnnnnnnnnnnnnnnnnnnnnnnnnnnnnnnnnnnnnnnnnnnnnnnnnnnnnnnnnnnnnnnnnnnnnnnnnnnnnnnnnnnnnnnnnnnnnnnnnnnnnnnnnnnnnnnnnnnnnnnnnnnnnnnnnnnnnnnnnnnnnnnnnnnnnnnnnnnnnnnnnnnnnnnnnnnnnnnnnnnnnnnnnnnnnnnnnnnnnnnnnnnnnnnnnnnnnnnnnnnnnnnnnnnnnnnnnnnnnnnnnnnnnnnnnnnnnnnnnnnnnnnnnnnnnnnnnnnnnnnnnnnnnnnnnnnnnnnnnnnnnnnnnnnnnnnnnnnnnnnnnnnnnnnnnnnnnnnnnnnnnnnnnnnnnnnnnnnnnnnnnnnnnnnnnnnnnnnnnnnnnnnnnnnnnnnnnnnnnnnnnnnnnnnnnnnnnnnnnnnnnnnnnnnnnnnnnnnnnnnnnnnnnnnnnnnnnnnnnnnnnnnnnnnnnnnnnnnnnnnnnnnnnnnnnnnnnnnnnnnnnnnnnnnnnnnnnnnnnnnnnnnnnnnnnnnnnnnnnnnnnnnnnnnnnnnnnnnnnnnnnnnnnnnnnnnnnnnnnnnnnnnnnnnnnnnnnnnnnnnnnnnnnnnnnnnnnnnnnnnnnnnnnnnnnnnnnnnnnnnnnnnnnnnnnnnnnnnnnnnnnnnnnnnnnnnnnnnnnnnnnnnnnnnnnnnnnnnnnnnnnnnnnnnnnnnnnnnnnnnnnnnnnnnnnnnnnnnnnnnnnnnnnnnnnnnnnnnnnnnnnnnnnnnnnnnnnnnnnnnnnnnnnnnnnnnnnnnnnnnnnnnnnnnnnnnnnnnnnnnnnnnnnnnnnnnnnnnnnnnnnnnnnnnnnnnnnnnnnnnnnnnnnnnnnnnnnnnnnnnnnnnnnnnnnnnnnnnnnnnnnnnnnnnnnnnnnnnnnnnnnnnnnnnnnnnnnnnnnnnnnnnnnnnnnnnnnnnnnnnnnnnnnnnnnnnnnnnnnnnnnnnnnnnnnnnnnnnnnnnnnnnnnnnnnnnnnnnnnnnnnnnnnnnnnnnnnnnnnnnnnnnnnnnnnnnnnnnnnnnnnnnnnnnnnnnnnnnnnnnnnnnnnnnnnnnnnnnnnnnnnnnnnnnnnnnnnnnnnnnnnnnnnnnnnnnnnnnnnnnnnnnnnnnnnnnnnnnnnnnnnnnnnnnnnnnnnnnnnnnnnnnnnnnnnnnnnnnnnnnnnnnnnnnnnnnnnnnnnnnnnnnnnnnnnnnnnnnnnnnnnnnnnnnnnnnnnnnnnnnnnnnnnnnnnnnnnnnnnnnnnnnnnnnnnnnnnnnnnnnnnnnnnnnnnnnnnnnnnnnnnnnnnnnnnnnnnnnnnnnnnnnnnnnnnnnnnnnnnnnnnnnnnnnnnnnnnnnnnnnnnnnnnnnnnnnnnnnnnnnnnnnnnnnnnnnnnnnnnnnnnnnnnnnnnnnnnnnnnnnnnnnnnnnnnnnnnnnnnnnnnnnnnnnnnnnnnnnnnnnnnnnnnnnnnnnnnnnnnnnnnnnnnnnnnnnnnnnnnnnnnnnnnnnnnnnnnnnnnnnnnnnnnnnnnnnnnnnnnnnnnnnnnnnnnnnnnnnnnnnnnnnnnnnnnnnnnnnnnnnnnnnnnnnnnnnnnnnnnnnnnnnnnnnnnnnnnnnnnnnnnnnnnnnnnnnnnnnnnnnnnnnnnnnnnnnnnnnnnnnnnnnnnnnnnnnnnnnnnnnnnnnnnnnnnnnnnnnnnnnnnnnnnnnnnnnnnnnnnnnnnnnnnnnnnnnnnnnnnnnnnnnnnnnnnnnnnnnnnnnnnnnnnnnnnnnnnnnnnnnnnnnnnnnnnnnnnnnnnnnnnnnnnnnnnnnnnnnnnnnnnnnnnnnnnnnnnnnnnnnnnnnnnnnnnnnnnnnnnnnnnnnnnnnnnnnnnnnnnnnnnnnnnnnnnnnnnnnnnnnnnnnnnnnnnnnnnnnnnnnnnnnnnnnnnnnnnnnnnnnnnnnnnnnnnnnnnnnnnnnnnnnnnnnnnnnnnnnnnnnnnnnnnnnnnnnnnnnnnnnnnnnnnnnnnnnnnnnnnnnnnnnnnnnnnnnnnnnnnnnnnnnnnnnnnnnnnnnnnnnnnnnnnnnnnnnnnnnnnnnnnnnnnnnnnnnnnnnnnnnnnnnnnnnnnnnnnnnnnnnnnnnnnnnnnnnnnnnnnnnnnnnnnnnnnnnnnnnnnnnnnnnnnnnnnnnnnnnnnnnnnnnnnnnnnnnnnnnnnnnnnnnnnnnnnnnnnnnnnnnnnnnnnnnnnnnnnnnnnnnnnnnnnnnnnnnnnnnnnnnnnnnnnnnnnnnnnnnnnnnnnnnnnnnnnnnnnnnnnnnnnnnnnnnnnnnnnnnnnnnnnnnnnnnnnnnnnnnnnnnnnnnnnnnnnnnnnnnnnnnnnnnnnnnnnnnnnnnnnnnnnnnnnnnnnnnnnnnnnnnnnnnnnnnnnnnnnnnnnnnnnnnnnnnnnnnnnnnnnnnnnnnnnnnnnnnnnnnnnnnnnnnnnnnnnnnnnnnnnnnnnnnnnnnnnnnnnnnnnnnnnnnnnnnnnnnnnnnnnnnnnnnnnnnnnnnnnnnnnnnnnnnnnnnnnnnnnnnnnnnnnnnnnnnnnnnnnnnnnnnnnnnnnnnnnnnnnnnnnnnnnnnnnnnnnnnnnnnnnnnnnnnnnnnnnnnnnnnnnnnnnnnnnnnnnnnnnnnnnnnnnnnnnnnnnnnnnnnnnnnnnnnnnnnnnnnnnnnnnnnnnnnnnnnnnnnnnnnnnnnnnnnnnnnnnnnnnnnnnnnnnnnnnnnnnnnnnnnnnnnnnnnnnnnnnnnnnnnnnnnnnnnnnnnnnnnnnnnnnnnnnnnnnnnnnnnnnnnnnnnnnnnnnnnnnnnnnnnnnnnnnnnnnnnnnnnnnnnnnnnnnnnnnnnnnnnnnnnnnnnnnnnnnnnnnnnnnnnnnnnnnnnnnnnnnnnnnnnnnnnnnnnnnnnnnnnnnnnnnnnnnnnnnnnnnnnnnnnnnnnnnnnnnnnnnnnnnnnnnnnnnnnnnnnnnnnnnnnnnnnnnnnnnnnnnnnnnnnnnnnnnnnnnnnnnnnnnnnnnnnnnnnnnnnnnnnnnnnnnnnnnnnnnnnnnnnnnnnnnnnnnnnnnnnnnnnnnnnnnnnnnnnnnnnnnnnnnnnnnnnnnnnnnnnnnnnnnnnnnnnnnnnnnnnnnnnnnnnnnnnnnnnnnnnnnnnnnnnnnnnnnnnnnnnnnnnnnnnnnnnnnnnnnnnnnnnnnnnnnnnnnnnnnnnnnnnnnnnnnnnnnnnnnnnnnnnnnnnnnnnnnnnnnnnnnnnnnnnnnnnnnnnnnnnnnnnnnnnnnnnnnnnnnnnnnnnnnnnnnnnnnnnnnnnnnnnnnnnnnnnnnnnnnnnnnnnnnnnnnnnnnnnnnnnnnnnnnnnnnnnnnnnnnnnnnnnnnnnnnnnnnnnnnnnnnnnnnnnnnnnnnnnnnnnnnnnnnnnnnnnnnnnnnnnnnnnnnnnnnnnnnnnnnnnnnnnnnnnnnnnnnnnnnnnnnnnnnnnnnnnnnnnnnnnnnnnnnnnnnnnnnnnnnnnnnnnnnnnnnnnnnnnnnnnnnnnnnnnnnnnnnnnnnnnnnnnnnnnnnnnnnnnnnnnnnnnnnnnnnnnnnnnnnnnnnnnnnnnnnnnnnnnnnnnnnnnnnnnnnnnnnnnnnnnnnnnnnnnnnnnnnnnnnnnnnnnnnnnnnnnnnnnnnnnnnnnnnnnnnnnnnnnnnnnnnnnnnnnnnnnnnnnnnnnnnnnnnnnnnnnnnnnnnnnnnnnnnnnnnnnnnnnnnnnnnnnnnnnnnnnnnnnnnnnnnnnnnnnnnnnnnnnnnnnnnnnnnnnnnnnnnnnnnnnnnnnnnnnnnnnnnnnnnnnnnnnnnnnnnnnnnnnnnnnnnnnnnnnnnnnnnnnnnnnnnnnnnnnnnnnnnnnnnnnnnnnnnnnnnnnnnnnnnnnnnnnnnnnnnnnnnnnnnnnnnnnnnnnnnnnnnnnnnnnnnnnnnnnnnnnnnnnnnnnnnnnnnnnnnnnnnnnnnnnnnnnnnnnnnnnnnnnnnnnnnnnnnnnnnnnnnnnnnnnnnnnnnnnnnnnnnnnnnnnnnnnnnnnnnnnnnnnnnnnnnnnnnnnnnnnnnnnnnnnnnnnnnnnnnnnnnnnnnnnnnnnnnnnnnnnnnnnnnnnnnnnnnnnnnnnnnnnnnnnnnnnnnnnnnnnnnnnnnnnnnnnnnnnnnnnnnnnnnnnnnnnnnnnnnnnnnnnnnnnnnnnnnnnnnnnnnnnnnnnnnnnnnnnnnnnnnnnnnnnnnnnnnnnnnnnnnnnnnnnnnnnnnnnnnnnnnnnnnnnnnnnnnnnnnnnnnnnnnnnnnnnnnnnnnnnnnnnnnnnnnnnnnnnnnnnnnnnnnnnnnnnnnnnnnnnnnnnnnnnnnnnnnnnnnnnnnnnnnnnnnnnnnnnnnnnnnnnnnnnnnnnnnnnnnnnnnnnnnnnnnnnnnnnnnnnnnnnnnnnnnnnnnnnnnnnnnnnnnnnnnnnnnnnnnnnnnnnnnnnnnnnnnnnnnnnnnnnnnnnnnnnnnnnnnnnnnnnnnnnnnnnnnnnnnnnnnnnnnnnnnnnnnnnnnnnnnnnnnnnnnnnnnnnnnnnnnnnnnnnnnnnnnnnnnnnnnnnnnnnnnnnnnnnnnnnnnnnnnnnnnnnnnnnnnnnnnnnnnnnnnnnnnnnnnnnnnnnnnnnnnnnnnnnnnnnnnnnnnnnnnnnnnnnnnnnnnnnnnnnnnnnnnnnnnnnnnnnnnnnnnnnnnnnnnnnnnnnnnnnnnnnnnnnnnnnnnnnnnnnnnnnnnnnnnnnnnnnnnnnnnnnnnnnnnnnnnnnnnnnnnnnnnnnnnnnnnnnnnnnnnnnnnnnnnnnnnnnnnnnnnnnnnnnnnnnnnnnnnnnnnnnnnnnnnnnnnnnnnnnnnnnnnnnnnnnnnnnnnnnnnnnnnnnnnnnnnnnnnnnnnnnnnnnnnnnnnnnnnnnnnnnnnnnnnnnnnnnnnnnnnnnnnnnnnnnnnnnnnnnnnnnnnnnnnnnnnnnnnnnnnnnnnnnnnnnnnnnnnnnnnnnnnnnnnnnnnnnnnnnnnnnnnnnnnnnnnnnnnnnnnnnnnnnnnnnnnnnnnnnnnnnnnnnnnnnnnnnnnnnnnnnnnnnnnnnnnnnnnnnnnnnnnnnnnnnnnnnnnnnnnnnnnnnnnnnnnnnnnnnnnnnnnnnnnnnnnnnnnnnnnnnnnnnnnnnnnnnnnnnnnnnnnnnnnnnnnnnnnnnnnnnnnnnnnnnnnnnnnnnnnnnnnnnnnnnnnnnnnnnnnnnnnnnnnnnnnnnnnnnnnnnnnnnnnnnnnnnnnnnnnnnnnnnnnnnnnnnnnnnnnnnnnnnnnnnnnnnnnnnnnnnnnnnnnnnnnnnnnnnnnnnnnnnnnnnnnnnnnnnnnnnnnnnnnnnnnnnnnnnnnnnnnnnnnnnnnnnnnnnnnnnnnnnnnnnnnnnnnnnnnnnnnnnnnnnnnnnnnnnnnnnnnnnnnnnnnnnnnnnnnnnnnnnnnnnnnnnnnnnnnnnnnnnnnnnnnnnnnnnnnnnnnnnnnnnnnnnnnnnnnnnnnnnnnnnnnnnnnnnnnnnnnnnnnnnnnnnnnnnnnnnnnnnnnnnnnnnnnnnnnnnnnnnnnnnnnnnnnnnnnnnnnnnnnnnnnnnnnnnnnnnnnnnnnnnnnnnnnnnnnnnnnnnnnnnnnnnnnnnnnnnnnnnnnnnnnnnnnnnnnnnnnnnnnnnnnnnnnnnnnnnnnnnnnnnnnnnnnnnnnnnnnnnnnnnnnnnnnnnnnnnnnnnnnnnnnnnnnnnnnnnnnnnnnnnnnnnnnnnnnnnnnnnnnnnnnnnnnnnnnnnnnnnnnnnnnnnnnnnnnnnnnnnnnnnnnnnnnnnnnnnnnnnnnnnnnnnnnnnnnnnnnnnnnnnnnnnnnnnnnnnnnnnnnnnnnnnnnnnnnnnnnnnnnnnnnnnnnnnnnnnnnnnnnnnnnnnnnnnnnnnnnnnnnnnnnnnnnnnnnnnnnnnnnnnnnnnnnnnnnnnnnnnnnnnnnnnnnnnnnnnnnnnnnnnnnnnnnnnnnnnnnnnnnnnnnnnnnnnnnnnnnnnnnnnnnnnnnnnnnnnnnnnnnnnnnnnnnnnnnnnnnnnnnnnnnnnnnnnnnnnnnnnnnnnnnnnnnnnnnnnnnnnnnnnnnnnnnnnnnnnnnnnnnnnnnnnnnnnnnnnnnnnnnnnnnnnnnnnnnnnnnnnnnnnnnnnnnnnnnnnnnnnnnnnnnnnnnnnnnnnnnnnnnnnnnnnnnnnnnnnnnnnnnnnnnnnnnnnnnnnnnnnnnnnnnnnnnnnnnnnnnnnnnnnnnnnnnnnnnnnnnnnnnnnnnnnnnnnnnnnnnnnnnnnnnnnnnnnnnnnnnnnnnnnnnnnnnnnnnnnnnnnnnnnnnnnnnnnnnnnnnnnnnnnnnnnnnnnnnnnnnnnnnnnnnnnnnnnnnnnnnnnnnnnnnnnnnnnnnnnnnnnnnnnnnnnnnnnnnnnnnnnnnnnnnnnnnnnnnnnnnnnnnnnnnnnnnnnnnnnnnnnnnnnnnnnnnnnnnnnnnnnnnnnnnnnnnnnnnnnnnnnnnnnnnnnnnnnnnnnnnnnnnnnnnnnnnnnnnnnnnnnnnnnnnnnnnnnnnnnnnnnnnnnnnnnnnnnnnnnnnnnnnnnnnnnnnnnnnnnnnnnnnnnnnnnnnnnnnnnnnnnnnnnnnnnnnnnnnnnnnnnnnnnnnnnnnnnnnnnnnnnnnnnnnnnnnnnnnnnnnnnnnnnnnnnnnnnnnnnnnnnnnnnnnnnnnnnnnnnnnnnnnnnnnnnnnnnnnnnnnnnnnnnnnnnnnnnnnnnnnnnnnnnnnnnnnnnnnnnnnnnnnnnnnnnnnnnnnnnnnnnnnnnnnnnnnnnnnnnnnnnnnnnnnnnnnnnnnnnnnnnnnnnnnnnnnnnnnnnnnnnnnnnnnnnnnnnnnnnnnnnnnnnnnnnnnnnnnnnnnnnnnnnnnnnnnnnnnnnnnnnnnnnnnnnnnnnnnnnnnnnnnnnnnnnnnnnnnnnnnnnnnnnnnnnnnnnnnnnnnnnnnnnnnnnnnnnnnnnnnnnnnnnnnnnnnnnnnnnnnnnnnnnnnnnnnnnnnnnnnnnnnnnnnnnnnnnnnnnnnnnnnnnnnnnnnnnnnnnnnnnnnnnnnnnnnnnnnnnnnnnnnnnnnnnnnnnnnnnnnnnnnnnnnnnnnnnnnnnnnnnnnnnnnnnnnnnnnnnnnnnnnnnnnnnnnnnnnnnnnnnnnnnnnnnnnnnnnnnnnnnnnnnnnnnnnnnnnnnnnnnnnnnnnnnnnnnnnnnnnnnnnnnnnnnnnnnnnnnnnnnnnnnnnnnnnnnnnnnnnnnnnnnnnnnnnnnnnnnnnnnnnnnnnnnnnnnnnnnnnnnnnnnnnnnnnnnnnnnnnnnnnnnnnnnnnnnnnnnnnnnnnnnnnnnnnnnnnnnnnnnnnnnnnnnnnnnnnnnnnnnnnnnnnnnnnnnnnnnnnnnnnnnnnnnnnnnnnnnnnnnnnnnnnnnnnnnnnnnnnnnnnnnnnnnnnnnnnnnnnnnnnnnnnnnnnnnnnnnnnnnnnnnnnnnnnnnnnnnnnnnnnnnnnnnnnnnnnnnnnnnnnnnnnnnnnnnnnnnnnnnnnnnnnnnnnnnnnnnnnnnnnnnnnnnnnnnnnnnnnnnnnnnnnnnnnnnnnnnnnnnnnnnnnnnnnnnnnnnnnnnnnnnnnnnnnnnnnnnnnnnnnnnnnnnnnnnnnnnnnnnnnnnnnnnnnnnnnnnnnnnnnnnnnnnnnnnnnnnnnnnnnnnnnnnnnnnnnnnnnnnnnnnnnnnnnnnnnnnnnnnnnnnnnnnnnnnnnnnnnnnnnnnnnnnnnnnnnnnnnnnnnnnnnnnnnnnnnnnnnnnnnnnnnnnnnnnnnnnnnnnnnnnnnnnnnnnnnnnnnnnnnnnnnnnnnnnnnnnnnnnnnnnnnnnnnnnnnnnnnnnnnnnnnnnnnnnnnnnnnnnnnnnnnnnnnnnnnnnnnnnnnnnnnnnnnnnnnnnnnngatcaagccaccctctaaatgggtggttacttatttacagacataccatgggccgccgtgcccttattaggagttcaccgatgtttcgttcctcagagcagcagcatttctgcaatgtgcttattaagcatttgaaacgcgtcgatgcgcccatattgctggaaggcggggtgggtcttgggaagacgcgtgcctacctggccgcactggcaactacgacgcaaacggttgccattgtgttacccacacaccaactgattgaccagttgctggctagcgctgacttgtcagccgttgccttgccattggccgtgttcaggccagccagtcggtttgacacacgggaggcgtaccaagcgcagcgagaggcggcccgtgctgcgcgtgtcatgctctgcaccgctgcaagcgtgattattgaccaacgccttgcgggggcttacaacggcgcaacacagcgtgatgtggtgttatttgatgaagccgaccagttacccgatatggcggcattgcagagcgactttgtgattgaggcggcgctactgcagggccagccgctgcacgcggccttagagcgcataagcaccacccgttcacagtcggttgaggccgagcaaaaggctgctgcgcgggtcatgcttgagatattggccgaaccggtgggctacgcatccgtcgggcttgatgatgatggcaatgcgcggctacaccacgccctgccaggtcgcttattaaagaaaattagcaatcgcggtagcacggtgtttctttctgcaacgctgacccacaacgataagtttgatgacttcaagatcgccatgggcctagacgcggtgagtagcctgtcaacaagcattgagccagaacagcatggcacgctcgacttcaccgtacacgcgcacgaggtggacacgcctgactggtttgcggccaccgttcagtgcatacaaagcgcgcagcgccccacgttggtggtcacacctagccatgacctcacagagcggctacaaaccgccgtgggtgagcaagcagacttgcttatacgtgcgggtgcatgggcgggtcttgacacgccaacgcgctggcgtaccgtggttattccgcgcgtgccatttggcgcaccagtcattgttgacggggtggcggtcacgtcttacttggccgccaaggtgacggccagtcggcggatgcgccaagcaattggccgtgggcttagaacacctgaggcggtgtgcacggttgtggttttggatgcgcgggcacacaacttaggtcgctttgtgccagagcgttttgcggcagattggtcgtctcggcaagtgtttgaggagggtgcccgccatgcggtggtgctgtccaaagcggagcgcgaccccgctttggccaaagccgcgctcagacactacggcgctcaatgccaacaagcgggttgttccgtgacagaggcgtgtcagctggacgtgcaccaccttgaccccgtaagcgaaggcgtgcgccgcacaaccttgaaggatgtgaccgtgctgtgtgcaaaccaccaccgacaggcccaccacgacatgaaaatggggctgaacgtgtcgtagcgcaacaaaaaacccgccatacctttgggtacgcgggttttgggagttctggcaaggcctgaaacctaaatgtggtggtgataggtggacttgaaccaccgaccccagcattatgaatgctgtgctctaaccaactgagctatatcaccgagcctgaaattatagccaaaattctcagggctttggcttgccgccaaaagtttttgttagccattttgtcgcgcccgtacgacgcgccaagcccttggttattggtgtttgaaggcgggtttgcgcttgtttatgaacgcatccatgccctctttttggtcttcggttgcaaacagcgcgtggaacagacggcgctcaaaacgcacgccttcgctgaggctgccttcaaacgcttggttcaccgcttcctttgccgccatgacactggggagggagtagttgcaaatcatcagggctgcgcccaaggcctcggtcatgagttggtcatcggcgaccacgcggctcaccagtccgccgcgctcggcttctgcagcgtccatcatgcggcctgtgagggccatgtccatggccttggctttgccaacggcgcgtggcaggcgctgcgtgccacctgcgccagggataacgcccaacttgatttcgggttggccaaatttggcgctctcgctggcaatgatgacgtcgcacatcatggccaattcacaaccgccgccgagcgcaaaaccgctgacggcggcaataacgggcttgcgaacgctgcgaatggtttcccagttgcgcgtgatgtagtctgacttgtagacgtccgcaaaggtgtaggtcgccatagcgccaatgtcggcacccgcggcaaaggctttttcactgcctgtgagcacaatgcagccaatgtccgggtcggcgtcgaatgcggttagcgccgcgccaagctcgtccattagcgcactgttgagggcattgagttgtttggggcggtttagggtgagtatgcccacgcggccttcgatgcggattaaaaccagttgctcactcatgtctgtgttctccaatgtggtgcgaaaagttgcttagaaaaagttgtttcgaaagttgcttcgacgtaaggggttgatcatagccaagcggtgagcttgctagggtctttcaccaccagttcggcgatctggttggcgtgggtcgatggccagatgagggggcacgacaacatgcggccatcgcgcgcgacaccggcaaccaatgggtgctgggctacgtcggcgtggcgtctcgcaatgttctccacatcgctcagtgactttacccgccattgatcggtgccatcaaatagtgtcacccattcgtcacccgccgccatgcccgcttgttcgcctgcaccgcctcttgccacgtgggtgatgcggatgccgtctcgctcaacgacacgcatgcccaagcgctgggcgagggtgccgctcttggccgccactgcgacaccgtaatgactaagcagtgcgtgtaccggcaggtcttccgtgctgtgtacccagtgcgcgagttgtgtggcgacgttggcgtgcccttgctggttgagcagggcgtagatgtcggcctcactgatggtgccgcctttgcttttgacccataggccgcgcatgagggtgtcgagatcgccgccttgttggcgcagcatgaggtcggtgcacagcgctattagcgcccctttggtgtagtagctaacggtggcgttgggcgtgttttcgccaatgcggtagtacttgacccacgcgtcatagctagactgggcaacgctttgcagatgccgccctggggtggccgcaacgtggttaatggatttggccagcagcgtgagataggtgggcgtatcaatgagtttggcgcgttgcagaaacaggtcatcgtagtagctggtaaagccttcaaagaaccacagcagctcggtgtagttctcttggttgaagtcgatgcttgcaaactcggatgggcgcaggcgcttgacgttccatgtgtgaaagtactcatggctaatgaggccaagtaattggttgtagccagcgccttgtgcatgggggggcgctgcctcgccagcgacggccgttaggggcaagtcggcacgctggcaaatgagtgcggtgctggcgatgtgctctagcccgccgtagccgttttcagtggcgtgaagcatgaagacgtagcggtcaaagggtagttggcgttgcggttgtttgccgtgccaaaacgtgatctctgtttcgcaaattcggcgggtgtcggcaactaattttttgacatcaaacccgggcgcggtgtggttgccaatgcccgtgacaacgagttcatgcggtacgccagagaccttaaaccggctgacgtaaaaatcacccaaggtaaagggactgtcggcgagctcgccgcagttgcgggcggtgtagcgcccgaagccacgcgcgtcgatttgccgcgcgggcaatgcggtagacagccgccacgcattgaacgcgggcgcggtggggcgctcgacggagatggtttgtatctcgtcttcgcccccgaccacttgcaaacacaggctggtggggttgaagaagccgcgggtgttgtccaaaaaggcggttcgcaccgaggcgtcaaaggcgtagatttggtaattgagctccagcgggcgtttgccgtcggattccactagccactcatttttactgcactgcgtgatttggcaaggcgtgcggccttgcttggctgtgagcgcttgcaggtgttgcgaaaattcacgcaccaaataactacccgcaatccaaacgggtagacgcaggcgctgttgcttttttgggcttgagatgcgcagatgcacaccgaacaggtgcgcttccgcgctgtcaacgcgaatgttgtgatcgatgcgcatggtgttacttgatggcggccagacgcttctcaacttcggcggcagaaatggcgccggggacacgtgtgccgtctgagaagaaaagggcaggcgtgcccgagatacggtgcttttgaccaaacgcgatgttgcggtcaagcgcgctggtgtcgcagctgatggcggcggcgctggtggttagagggacttcattcaccatccagtcttcaaaggctacgccggggtttttgtcgcaccaaatggccttggacttgagcgttgaatccgcgccgagtatggggtacaaaaagatatgcagggtgatgttgtcgacattcatcatgtcacgttcaaagcgcttgcagaagccacagttggggtcttcaaaaaccgcgagttgacgcttgccgttaccgcgtttgatggtgaaggcatctttaaagggcagggcctcaaagggtattgcgctcaatttatcgaggcgctcctgcgtcaggttgcgtttgcccttgaggtcaacgagtacgccttgcagcaaaaattcaccgttggcatcggtgtacaaaatttcggtttcaccaaagcgaacttcgtagaggccggccatgggggtcttggtgacgctgttgatagcgggtaagttgggtagttgcttgggtagcatctcgcgaatcttggcttcctgtgcccagcccatgcttgccatgagggtgaatgcgatgcccacggccaagccgcgcaataaagagcgtgtgggggtgggtgcgagaggtgacgtgtggtgaagcatggtgtggttcgctaggtaggcgttgtttgggggtaagagggtgggtgggttggttcgtgggagggggctgttgggtagcggatgctcgctgttggagcaccatcgtggcaatcagttccccatgccaacacgctgtacccacgacttgagtgggcccatggcattaaagcccgacatgcctgcattgcgtagccaactggcggcggggttgcggcccaaggggttgttgaacaagtgaaagagtccgtgcgtgacccattgcatgggttcggtggcggcgcgtcgacgccgttggtagcgctgaagcacgcgtgaggcacccggagactcacctcgggcgcgtgccgcaacgcagtcactgagcgtttgtacgtcggccaagccaaggttgagaccttgccctgcgagggggtggatggtgtgcgccgcatcgccggctaacgcggtctgctgggcaacccattgcgtggttaagccgacgctcaaggggaaggcaacaggcccgctggtaagggagaggtgccctagcgcgccctgactggcttgggtgagttggtcttctagggcggcggtttgggcggtggtctccatgtccagccacgtctggtgcgcagcgtctggtagcgaccagacaacggccaggtcgtgcccgtcagcgccgcccatgggcagcagggccaaaatatgtgtgccgttaaaccactggtgggcgacgccgccgtggctgtgctcggcgcgcatgcgcaacgccaaggcacggtgggggtagtgcttacttaccatgtcaatacccaaggcggtgcgcgcgataccgctcttgccttcgcaaatgatggtcaatgcgctagg

SEQ ID NO: 87 - DNA, 15964 bp, Artificial Sequence
  Synthetic Oligonucleotide
  misc_feature (1)..(7171): n is a, c, g, or t
nnnnnnnnnnnnnnnnnnnnnnnnnnnnnnnnnnnnnnnnnnnnnnnnnnnnnnnnnnnnnnnnnnnnnnnnnnnnnnnnnnnnnnnnnnnnnnnnnnnnnnnnnnnnnnnnnnnnnnnnnnnnnnnnnnnnnnnnnnnnnnnnnnnnnnnnnnnnnnnnnnnnnnnnnnnnnnnnnnnnnnnnnnnnnnnnnnnnnnnnnnnnnnnnnnnnnnnnnnnnnnnnnnnnnnnnnnnnnnnnnnnnnnnnnnnnnnnnnnnnnnnnnnnnnnnnnnnnnnnnnnnnnnnnnnnnnnnnnnnnnnnnnnnnnnnnnnnnnnnnnnnnnnnnnnnnnnnnnnnnnnnnnnnnnnnnnnnnnnnnnnnnnnnnnnnnnnnnnnnnnnnnnnnnnnnnnnnnnnnnnnnnnnnnnnnnnnnnnnnnnnnnnnnnnnnnnnnnnnnnnnnnnnnnnnnnnnnnnnnnnnnnnnnnnnnnnnnnnnnnnnnnnnnnnnnnnnnnnnnnnnnnnnnnnnnnnnnnnnnnnnnnnnnnnnnnnnnnnnnnnnnnnnnnnnnnnnnnnnnnnnnnnnnnnnnnnnnnnnnnnnnnnnnnnnnnnnnnnnnnnnnnnnnnnnnnnnnnnnnnnnnnnnnnnnnnnnnnnnnnnnnnnnnnnnnnnnnnnnnnnnnnnnnnnnnnnnnnnnnnnnnnnnnnnnnnnnnnnnnnnnnnnnnnnnnnnnnnnnnnnnnnnnnnnnnnnnnnnnnnnnnnnnnnnnnnnnnnnnnnnnnnnnnnnnnnnnnnnnnnnnnnnnnnnnnnnnnnnnnnnnnnnnnnnnnnnnnnnnnnnnnnnnnnnnnnnnnnnnnnnnnnnnnnnnnnnnnnnnnnnnnnnnnnnnnnnnnnnnnnnnnnnnnnnnnnnnnnnnnnnnnnnnnnnnnnnnnnnnnnnnnnnnnnnnnnnnnnnnnnnnnnnnnnnnnnnnnnnnnnnnnnnnnnnnnnnnnnnnnnnnnnnnnnnnnnnnnnnnnnnnnnnnnnnnnnnnnnnnnnnnnnnnnnnnnnnnnnnnnnnnnnnnnnnnnnnnnnnnnnnnnnnnnnnnnnnnnnnnnnnnnnnnnnnnnnnnnnnnnnnnnnnnnnnnnnnnnnnnnnnnnnnnnnnnnnnnnnnnnnnnnnnnnnnnnnnnnnnnnnnnnnnnnnnnnnnnnnnnnnnnnnnnnnnnnnnnnnnnnnnnnnnnnnnnnnnnnnnnnnnnnnnnnnnnnnnnnnnnnnnnnnnnnnnnnnnnnnnnnnnnnnnnnnnnnnnnnnnnnnnnnnnnnnnnnnnnnnnnnnnnnnnnnnnnnnnnnnnnnnnnnnnnnnnnnnnnnnnnnnnnnnnnnnnnnnnnnnnnnnnnnnnnnnnnnnnnnnnnnnnnnnnnnnnnnnnnnnnnnnnnnnnnnnnnnnnnnnnnnnnnnnnnnnnnnnnnnnnnnnnnnnnnnnnnnnnnnnnnnnnnnnnnnnnnnnnnnnnnnnnnnnnnnnnnnnnnnnnnnnnnnnnnnnnnnnnnnnnnnnnnnnnnnnnnnnnnnnnnnnnnnnnnnnnnnnnnnnnnnnnnnnnnnnnnnnnnnnnnnnnnnnnnnnnnnnnnnnnnnnnnnnnnnnnnnnnnnnnnnnnnnnnnnnnnnnnnnnnnnnnnnnnnnnnnnnnnnnnnnnnnnnnnnnnnnnnnnnnnnnnnnnnnnnnnnnnnnnnnnnnnnnnnnnnnnnnnnnnnnnnnnnnnnnnnnnnnnnnnnnnnnnnnnnnnnnnnnnnnnnnnnnnnnnnnnnnnnnnnnnnnnnnnnnnnnnnnnnnnnnnnnnnnnnnnnnnnnnnnnnnnnnnnnnnnnnnnnnnnnnnnnnnnnnnnnnnnnnnnnnnnnnnnnnnnnnnnnnnnnnnnnnnnnnnnnnnnnnnnnnnnnnnnnnnnnnnnnnnnnnnnnnnnnnnnnnnnnnnnnnnnnnnnnnnnnnnnnnnnnnnnnnnnnnnnnnnnnnnnnnnnnnnnnnnnnnnnnnnnnnnnnnnnnnnnnnnnnnnnnnnnnnnnnnnnnnnnnnnnnnnnnnnnnnnnnnnnnnnnnnnnnnnnnnnnnnnnnnnnnnnnnnnnnnnnnnnnnnnnnnnnnnnnnnnnnnnnnnnnnnnnnnnnnnnnnnnnnnnnnnnnnnnnnnnnnnnnnnnnnnnnnnnnnnnnnnnnnnnnnnnnnnnnnnnnnnnnnnnnnnnnnnnnnnnnnnnnnnnnnnnnnnnnnnnnnnnnnnnnnnnnnnnnnnnnnnnnnnnnnnnnnnnnnnnnnnnnnnnnnnnnnnnnnnnnnnnnnnnnnnnnnnnnnnnnnnnnnnnnnnnnnnnnnnnnnnnnnnnnnnnnnnnnnnnnnnnnnnnnnnnnnnnnnnnnnnnnnnnnnnnnnnnnnnnnnnnnnnnnnnnnnnnnnnnnnnnnnnnnnnnnnnnnnnnnnnnnnnnnnnnnnnnnnnnnnnnnnnnnnnnnnnnnnnnnnnnnnnnnnnnnnnnnnnnnnnnnnnnnnnnnnnnnnnnnnnnnnnnnnnnnnnnnnnnnnnnnnnnnnnnnnnnnnnnnnnnnnnnnnnnnnnnnnnnnnnnnnnnnnnnnnnnnnnnnnnnnnnnnnnnnnnnnnnnnnnnnnnnnnnnnnnnnnnnnnnnnnnnnnnnnnnnnnnnnnnnnnnnnnnnnnnnnnnnnnnnnnnnnnnnnnnnnnnnnnnnnnnnnnnnnnnnnnnnnnnnnnnnnnnnnnnnnnnnnnnnnnnnnnnnnnnnnnnnnnnnnnnnnnnnnnnnnnnnnnnnnnnnnnnnnnnnnnnnnnnnnnnnnnnnnnnnnnnnnnnnnnnnnnnnnnnnnnnnnnnnnnnnnnnnnnnnnnnnnnnnnnnnnnnnnnnnnnnnnnnnnnnnnnnnnnnnnnnnnnnnnnnnnnnnnnnnnnnnnnnnnnnnnnnnnnnnnnnnnnnnnnnnnnnnnnnnnnnnnnnnnnnnnnnnnnnnnnnnnnnnnnnnnnnnnnnnnnnnnnnnnnnnnnnnnnnnnnnnnnnnnnnnnnnnnnnnnnnnnnnnnnnnnnnnnnnnnnnnnnnnnnnnnnnnnnnnnnnnnnnnnnnnnnnnnnnnnnnnnnnnnnnnnnnnnnnnnnnnnnnnnnnnnnnnnnnnnnnnnnnnnnnnnnnnnnnnnnnnnnnnnnnnnnnnnnnnnnnnnnnnnnnnnnnnnnnnnnnnnnnnnnnnnnnnnnnnnnnnnnnnnnnnnnnnnnnnnnnnnnnnnnnnnnnnnnnnnnnnnnnnnnnnnnnnnnnnnnnnnnnnnnnnnnnnnnnnnnnnnnnnnnnnnnnnnnnnnnnnnnnnnnnnnnnnnnnnnnnnnnnnnnnnnnnnnnnnnnnnnnnnnnnnnnnnnnnnnnnnnnnnnnnnnnnnnnnnnnnnnnnnnnnnnnnnnnnnnnnnnnnnnnnnnnnnnnnnnnnnnnnnnnnnnnnnnnnnnnnnnnnnnnnnnnnnnnnnnnnnnnnnnnnnnnnnnnnnnnnnnnnnnnnnnnnnnnnnnnnnnnnnnnnnnnnnnnnnnnnnnnnnnnnnnnnnnnnnnnnnnnnnnnnnnnnnnnnnnnnnnnnnnnnnnnnnnnnnnnnnnnnnnnnnnnnnnnnnnnnnnnnnnnnnnnnnnnnnnnnnnnnnnnnnnnnnnnnnnnnnnnnnnnnnnnnnnnnnnnnnnnnnnnnnnnnnnnnnnnnnnnnnnnnnnnnnnnnnnnnnnnnnnnnnnnnnnnnnnnnnnnnnnnnnnnnnnnnnnnnnnnnnnnnnnnnnnnnnnnnnnnnnnnnnnnnnnnnnnnnnnnnnnnnnnnnnnnnnnnnnnnnnnnnnnnnnnnnnnnnnnnnnnnnnnnnnnnnnnnnnnnnnnnnnnnnnnnnnnnnnnnnnnnnnnnnnnnnnnnnnnnnnnnnnnnnnnnnnnnnnnnnnnnnnnnnnnnnnnnnnnnnnnnnnnnnnnnnnnnnnnnnnnnnnnnnnnnnnnnnnnnnnnnnnnnnnnnnnnnnnnnnnnnnnnnnnnnnnnnnnnnnnnnnnnnnnnnnnnnnnnnnnnnnnnnnnnnnnnnnnnnnnnnnnnnnnnnnnnnnnnnnnnnnnnnnnnnnnnnnnnnnnnnnnnnnnnnnnnnnnnnnnnnnnnnnnnnnnnnnnnnnnnnnnnnnnnnnnnnnnnnnnnnnnnnnnnnnnnnnnnnnnnnnnnnnnnnnnnnnnnnnnnnnnnnnnnnnnnnnnnnnnnnnnnnnnnnnnnnnnnnnnnnnnnnnnnnnnnnnnnnnnnnnnnnnnnnnnnnnnnnnnnnnnnnnnnnnnnnnnnnnnnnnnnnnnnnnnnnnnnnnnnnnnnnnnnnnnnnnnnnnnnnnnnnnnnnnnnnnnnnnnnnnnnnnnnnnnnnnnnnnnnnnnnnnnnnnnnnnnnnnnnnnnnnnnnnnnnnnnnnnnnnnnnnnnnnnnnnnnnnnnnnnnnnnnnnnnnnnnnnnnnnnnnnnnnnnnnnnnnnnnnnnnnnnnnnnnnnnnnnnnnnnnnnnnnnnnnnnnnnnnnnnnnnnnnnnnnnnnnnnnnnnnnnnnnnnnnnnnnnnnnnnnnnnnnnnnnnnnnnnnnnnnnnnnnnnnnnnnnnnnnnnnnnnnnnnnnnnnnnnnnnnnnnnnnnnnnnnnnnnnnnnnnnnnnnnnnnnnnnnnnnnnnnnnnnnnnnnnnnnnnnnnnnnnnnnnnnnnnnnnnnnnnnnnnnnnnnnnnnnnnnnnnnnnnnnnnnnnnnnnnnnnnnnnnnnnnnnnnnnnnnnnnnnnnnnnnnnnnnnnnnnnnnnnnnnnnnnnnnnnnnnnnnnnnnnnnnnnnnnnnnnnnnnnnnnnnnnnnnnnnnnnnnnnnnnnnnnnnnnnnnnnnnnnnnnnnnnnnnnnnnnnnnnnnnnnnnnnnnnnnnnnnnnnnnnnnnnnnnnnnnnnnnnnnnnnnnnnnnnnnnnnnnnnnnnnnnnnnnnnnnnnnnnnnnnnnnnnnnnnnnnnnnnnnnnnnnnnnnnnnnnnnnnnnnnnnnnnnnnnnnnnnnnnnnnnnnnnnnnnnnnnnnnnnnnnnnnnnnnnnnnnnnnnnnnnnnnnnnnnnnnnnnnnnnnnnnnnnnnnnnnnnnnnnnnnnnnnnnnnnnnnnnnnnnnnnnnnnnnnnnnnnnnnnnnnnnnnnnnnnnnnnnnnnnnnnnnnnnnnnnnnnnnnnnnnnnnnnnnnnnnnnnnnnnnnnnnnnnnnnnnnnnnnnnnnnnnnnnnnnnnnnnnnnnnnnnnnnnnnnnnnnnnnnnnnnnnnnnnnnnnnnnnnnnnnnnnnnnnnnnnnnnnnnnnnnnnnnnnnnnnnnnnnnnnnnnnnnnnnnnnnnnnnnnnnnnnnnnnnnnnnnnnnnnnnnnnnnnnnnnnnnnnnnnnnnnnnnnnnnnnnnnnnnnnnnnnnnnnnnnnnnnnnnnnnnnnnnnnnnnnnnnnnnnnnnnnnnnnnnnnnnnnnnnnnnnnnnnnnnnnnnnnnnnnnnnnnnnnnnnnnnnnnnnnnnnnnnnnnnnnnnnnnnnnnnnnnnnnnnnnnnnnnnnnnnnnnnnnnnnnnnnnnnnnnnnnnnnnnnnnnnnnnnnnnnnnnnnnnnnnnnnnnnnnnnnnnnnnnnnnnnnnnnnnnnnnnnnnnnnnnnnnnnnnnnnnnnnnnnnnnnnnnnnnnnnnnnnnnnnnnnnnnnnnnnnnnnnnnnnnnnnnnnnnnnnnnnnnnnnnnnnnnnnnnnnnnnnnnnnnnnnnnnnnnnnnnnnnnnnnnnnnnnnnnnnnnnnnnnnnnnnnnnnnnnnnnnnnnnnnnnnnnnnnnnnnnnnnnnnnnnnnnnnnnnnnnnnnnnnnnnnnnnnnnnnnnnnnnnnnnnnnnnnnnnnnnnnnnnnnnnnnnnnnnnnnnnnnnnnnnnnnnnnnnnnnnnnnnnnnnnnnnnnnnnnnnnnnnnnnnnnnnnnnnnnnnnnnnnnnnnnnnnnnnnnnnnnnnnnnnnnnnnnnnnnnnnnnnnnnnnnnnnnnnnnnnnnnnnnnnnnnnnnnnnnnnnnnnnnnnnnnnnnnnnnnnnnnnnnnnnnnnnnnnnnnnnnnnnnnnnnnnnnnnnnnnnnnnnnnnnnnnnnnnnnnnnnnnnnnnnnnnnnnnnnnnnnnnnnnnnnnnnnnnnnnnnnnnnnnnnnnnnnnnnnnnnnnnnnnnnnnnnnnnnnnnnnnnnnnnnnnnnnnnnnnnnnnnnnnnnnnnnnnnnnnnnnnnnnnnnnnnnnnnnnnnnnnnnnnnnnnnnnnnnnnnnnnnnnnnnnnnnnnnnnnnnnnnnnnnnnnnnnnnnnnnnnnnnnnnnnnnnnnnnnnnnnnnnnnnnnnnnnnnnnnnnnnnnnnnnnnnnnnnnnnnnnnnnnnnnnnnnnnnnnnnnnnnnnnnnnnnnnnnnnnnnnnnnnnnnnnnnnnnnnnnnnnnnnnnnnnnnnnnnnnnnnnnnnnnnnnnnnnnnnnnnnnnnnnnnnnnnnnnnnnnnnnnnnnnnnnnnnnnnnnnnnnnnnnnnnnnnnnnnnnnnnnnnnnnnnnnnnnnnnnnnnnnnnnnnnnnnnnnnnnnnnnnnnnnnnnnnnnnnnnnnnnnnnnnnnnnnnnnnnnnnnnnnnnnnnnnnnnnnnnnnnnnnnnnnnnnnnnnnnnnnnnnnnnnnnnnnnnnnnnnnnnnnnnnnnnnnnnnnnnnnnnnnnnnnnnnnnnnnnnnnnnnnnnnnnnnnnnnnnnnnnnnnnnnnnnnnnnnnnnnnnnnnnnnnnnnnnnnnnnnnnnnnnnnnnnnnnnnnnnnnnnnnnnnnnnnnnnnnnnnnnnnnnnnnnnnnnnnnnnnnnnnnnnnnnnnnnnnnnnnnnnnnnnnnnnnnnnnnnnnnnnnnnnnnnnnnnnnnnnnnnnnnnnnnnnnnnnnnnnnnnnnnnnnnnnnnnnnnnnnnnnnnnnnnnnnnnnnnnnnnnnnnnnnnnnnnnnnnnnnnnnnnnnnnnnnnnnnnnnnnnnnnnnnnnnnnnnnnnnnnnnnnnnnnnnnnnnnnnnnnnnnnnnnnnnnnnnnnnnnnnnnnnnnnnnnnnnnnnnnnnnnnnnnnnnnnnnnnnnnnnnnnnnnnnnnnnnnnnnnnnnnnnnnnnnnnnnnnnnnnnnnnnnnnnnnnnnnnnnnnnnnnnnnnnnnnnnnnnnnnncgggcctgctcgacggggcaccctgcctgttcgccgacaagggcgaccacctcgtgctgcgcgcggaccgcccgtttgacggcctggccgcgcggcccgttcgcgaggtggccacgggcgacatcctcgccttcagcctgcgcgcctgcgtgggcgccaaggtacgcgggcgccaccgctacttccccacgcaggactggcgcgcccgccatgaatggctcgggcgccagggcgagctacacggcttcagcctgatcaccgtccactgctcggccagcatcgcccgcatcgacaaaggcgaaaagatgttcaccgtggacgacacccagttcgacggcgtgctcaaggtcaccgacgcggcgcggttcgaggccgcgctgcgcaccggcatcggcaacaagggcaaggccttcggcttcggcctgctgctcgtctgacaccgcatccctcacgaaagcgaccaccatgaacaagcacaccctgatcatcgaggccacgctgcgcaccgtcggcccgctgtcgatccgcctgccggtggccgagggcgccgccgagaaccgctgggcaaacttcccggtgctcacgcgcggcctggacgacgaaggcaatccgctgcagaccggctacctgcccgccaccacggtgcgcggcttcctgcgccgcgccatcgtgaccaacgccatggagcgcgccgccgccgagggcaagccctacactctgcagcgcgcctacgcggacctgatcggccaggacgcggcgagcgagaagtccgaggacgtggatctcgtgaagctcgccgcgcagcgcgacgcagagccggtggccgatctctttggcctgggcatgacgctcaagtctcggctcttcgtcagccacttcctgccgcgggtgaacgtactgcccgaggtgacctcgggcgtgcgcaaggaccttgaagacaccgagggcgtgctcgatgcgctcagccaggcggatcgcgacctgtatctcggccgctcggctgccaacagcgagcgggctgccgccgctgcggtggtgaccgacctgcgccgcaagctcaagaaggccgagcgcgcgggcgaggacaccgccgacctggccgccgccctcaaggccgccgaggagcgcgtcgcgggcttcgaggaccgcatgggcgagatgaagaactcctcgcgcacgctgaccagctacttcgccctgcccgcggggctcgatctgcttggccgcctggtgatcgagcgtgcacgcgagcgcgacttgccgatgattgaactcgcgctcgatgccctgagccgccgcccgctgctgggcgcgcaggtggcgcgcggctgcggcgaggtggcaggcagctttgacgtgctgcgcgacggcgtgctgatccggcgcatcagcgtgggcggctggaagccggcgcagatgaccgagttcgccgctgcggcgtgaggaaaattgcgacttcttgcgggcgcgaagagccgattgcgctaggcaatcagaggcttgcagcgcctcgggtcaagccacccctcgtttgggtggctactggaactccctgcaaaggactcccgcatcatggacaggtcaagccacccctcgtttgggtggctactggaacaacttctggaaacgaacggacacgttgcggggtcaagccacccctcgtttgggtggctactggaaccggatgccgaaggtccaagtgcccgccgccggtcaagccacctcgttcgggtggctactggaactcgccgcgtcttgctgcctgccgtctctggggtcaagccacccctcgtttgggtggctactggaacgacgccgaggtgcagtccctcatcctcaccggtcaagccacccctcgtttgggtggctactggaacaagctggctagcgaggaatggttgaagaacggtcaagccacccctcgtttgggtggctactggaaccgcgagcggatcgtccacggttcggcagcgggtcaagccacccctcgtttgggtggctactggaaccagttattgaagcgggtccgtggctcgcgcaatcaagccacctctcgtttaggtggctactggaactccatcaggccgacgtgcgtgaccgtgcccgatcaagccacccctcgtttgggtggctactggaactcgtcggcgagaatgacggtgatgctgttgagtcaagccacccctcgtttgggtggctactggaactacctgcaagaccgcaccgaggccccggccagtcaagccacccctcgtttgggtggctactggaactgggcgtactgaaacgcctcttgcgcctcgggtcaagccacccctcgtttgggtggctactggaacgacaagctcgccgccgccgctgaagcgcagggtcaagccacccctcgtttgggtggttactggaactgcacgatgcgttgccgctgctcttgctcgggtcaagccacccctcgtttgggtggctacttgaagttcgcttcggcgtcttcgtcggaggcatccgctcaagccacccctcgtttgggtggctactggaacgaggccaacgaactcatgcgtcacgtcgagggtcaagccacccctcgtttgggtggctactggaagaagggcgtcaactggttgcgccgcgcgaccgcctaagccaccgcattggtgcgtggctactgtgcacgtccggcttgctaacaggtgttagcaagtccgaaggcatcgctaggacgacgcccccgtgggcgcaccgcgcggtgatcactggccagccctacaacggccggcatgatcgggtagcgcaggacgctgcgcgatcaagggcaaggagactgggcatccgtgtttcgcaccactgagcaggccaacttcgcaaacgtgatggcggcgcatctgcccgcgcccgatgcacccctgctgctcgaagggggcgtgggcatcggcaagacgcgcgcctacctgcacgctgccgtgcagtcgggccagcggattgcggtcgtcgtgcccacgcaccagctcatcgaccagttgctcgcctcggccgacctgacagccgtgcgcggcgaggccacagtggcggccttccggccggcgcggatgttcgagcggcggcgcgagtacgaagagcagcgcgaggccgccgcccacgcgcagatcatggtgtgcacggcggcctcggtggtgatcgatcagcgcctcgccggcgaatacaacggctcgaccaccgcgcgcgactacctgatcttcgacgaggccgaccagttgcccgacatggcggcgctgcagtcggatctggcaatcagtcgcgccgacctcgacgccgccggcatccgctttaccacggtggaagacacactgcgccgcctggccgacaaggcgccgcgcaccgtcgagcccgaggtgcgcgccgcggcgcgcgtgatgatcgaggttctggccgagcctcgctggttccagaaggtggggctggacgaggacggcgccatcgtgctcacgcacaagctgccgggtcgcctgctcaagaaggtggccaaccggccgggcgtggcctttgtgtcggccacgctcacggtggcgggtcgcttcgacgacttccgcaacaccatgggcatcgggccgatctcgcggctctcgacggtgatcgagccgcagcagcacgggcgcctgagctttcgcatcgatccgcagaccgtggacacgcccgagtggatcgaggccacggtggcggccatcaaggcggcaccgcggccctgcctggtggcgaccaccagccacgacctgtcggcacggctaggggagagggtgcccggcgccatcgtgcgcgacgccgatgttcccgcccgcaccgccgccgagcaggccgagggcggggtgctgatcagcgccggcgcctgggcggggctggatacgccaacccgctggcgggccatcgtcgtgccgcgcgtgccctacggccagccggtggtcatcgatgggcagatcgagtcaagctacctcgacgcccgcaacaccgccgtgcgccggctaaggcaggtgatcggccgcggactgcgcacccccgatgcggtgtgcgaggtcaccctgctcgacgcgcgcgccgagcgcctgcccgagttcgtgccggtgcggttccgggcggcgtggagcactagagtgttcattgagggcgctcgcactgaggtcatgctcagcaaggccgagcgtgacccggcactgcgtcgggccgcgctgagtcggtacggccaccgttgtcaggcctgcagtttcgttcccaccgttctgggacagcttgacgtgcaccacaagagtcccatcaaggagggggaacgcaagacgcgccttgaggatgtggctgtgctgtgcgccaactgccaccggctggcgcatgctgaggatccccctgttccggtcgagaggcttgccgagttgacgcgagacacgcgctagcggtgtgtgctcgttaggcttggctggcaagagacgtgccttagagaaagctcgcttgaccaagtggagtcatggttgggcgccttggtctcggccagcctcggctagatcccatcgaacactcacctgaagtgctctcagagatgaatgaacttgacctgcaaggcgctgattcgaaggttggtgacaccgaagaagcgcgaggaatcgaactgcgctttgaggccgacccgacagtcaattacgcatcagtgcagaacagtgttccgatcggcaggcgcctggatatccagaacaagaccgaccacgccgcggtgaacgtcttggtgaccgtgaagccggccacaccattcgcgcaatcaaaaaagttcctgttcgagcaccttgcccctggggagacgcggcgcgtagatgtcgtcaaccttccgccggagccggcttatctcgctgcgctcgtggacgcagagcgctcccacatcgattgcgtggcaaccgaaggggagggcggacggacgctcgcgaccgcgcgagtcgatgtggacgtgctcgctgccaatcagtgggcaggcctgcgcgccttgccgtctctgctggcggccttcagccagccgaacattcctctcatcgagggcatcctgcgggatgcgtccgagcggctaaggaaagtgagcagcggcgcgtccctgaacgcctaccagtcgagtaaccgggaggccgtctggctgcagttgtcggccatctactccgctgtcgccgcgctcgacgtccagtacagccaggcgccggccagcttcgaggccgaagggcagaaaatccgcggcagcgagcagatcctgcaaagccgactagccaactgcctggacctgagcatgctgctcgcagcatgcctggagcaagccgggctgcacccggtggtgctgctgagcaagggccacgcgtggctggggtgctggctgaccgatacctacttcgccacgaccgttgtcgatgacgctcaggcggtccgcaagcggatagacactggggagttcattaccttcgagtgcaccggcgtcacgactcagcccaagctccggctcaagacggcggtgaacaagggcgccgagaacctcgccagcgaggagtttggctacgccatcgacgttcgacgctgcagggaggagcaggttcgtcccctgccttcccgctcggaattcttgcagtccgtgactgccaatgtcgacaccgaggaactggaggtcgagcctgctcccgcgctgccgccactagaggtcggtgaaccgattgtcattggagacgacacgccgcaggggcgcctggcgcgttggaaggcgaagctcctggacatgacgctgcgcaatcgcctgctgaacttcaagaaatcaaagagcaatctggaacttgtcgttcacgacgttgcggcgctcgaggatcgcctagctagcgggaaagagttgagcttcaagccctacccgaaggtgatggagggcgccgacccgcgcgatgcgaccgtctatgccagtcgacacggcgcggaggcaatcgccaatttcgtgcgtgacgctcttgacaagggcgagttggtcacgcgagcttccgaggagaagttcgagaaccaactgctggatctgtttcgggcggccagaaccgggatcgaggagagcggcgcgaacgcgcttcacctggcgatcggcatgctgcagtggacggagaccgacacggcggagcgaaagctcatggcaccgatactgatgttgcctgtgagcttgactcggtcctcggtgcgttctggcttcaagctcggcagcactgacgacgagccgttcatcaatccgaccttgctgcagttactggccgagcagttcgacattcggatcgatgtggcgaggttgctgcctcaagacgccgcaggaatcgacgtggagcgcgtcctgcaggcgtttcgcctggccatcagggagtacaagggctgggaggtcaaggccgaggttcaccttggcatgttctcgttcgctaagttcgtgatgtggcgggacttggagtcgcgcttggatgacctgaccaggaatcgggtggtcaagcacctgctgcacactcccggccaagaattcgcgggagagcgcgcagacatcacagagaccgatctggacgacaggttttcacctagccagatccttgcacccttgctcgcggactcgtcccagctggcggccctcgccaaggcaggggcagggatggatctcgtcatcatcggccctcccggctgcggcaagacccaggttctggccaacgcagtggcacatctcatcgcggagggtaagaaggttctggtgtgctccgagaaggcggctgcactcgaagttcttcagaggcgcctggtacagatcggcctggggccctttgtgctcgaactccactcgtcgaaggccaacaaggttggcgtgctgaagcagctcgaggaggcgctccatcaagccggtcagcttccgacggaccgctggcaggccgaggctgaacacttggcgggactgcgcgacactctcaacggcgttgtcagggcactgcacaagcgccgtcgctcgggactgacagtgttcgaggcgaccgggactgtggttgctgccggtcagcgcaagccctcgcagttcgactggcctgatgccgagatgcatgacgcggtggggttcgcgcaccttcgcgagtgcgccaagcgcgcccaggcggtggcctgtgcattaccgacaatcaaggatcacgcgctcagccaggtctacgcggcggagtggtcgttcgcgtggcaagacgacctactgcaatcagcacagcgtctgatgcgcctcgctgccgacctcgaagtcgctgcgggacccgtgttcaggacggtcggcctgccagagaagggcggttctttggccaactacctggcgctggatcgtctggctgacgtcttgctcgacgcgaccggcgtccccggcccagtcgcccgggcaggacacaaccctgacatcacgcgaaggctcgagagtctccaaaggcacggtgcgcttcggcaggaggccgccgggaaattggcgaccggctacaagccttcgattgaagggctgagtgctgaggacatcgcgcaacggtggcgcacggctggatcgtcccgcggaggcttgctcagcgcgccgttctccgggagctgcagccgcatcgccaggatggcgaggttccaacggctggcgaagtgcccggactgatcgatgccctcggaatcctcaacaccgaagacgccgagatccgcaccctttccgccgggcaggagagtgtgctcggggccgcgtggcctagcgtaaatgagcggctcgataccctgggacggtgcgcggcgtggagccaacgctatcgggaggcgctcgcacagctcgtggatgcgagccgatcggttgacgacatggccgcccgcctccagatcctggtgggcgaacagcagcacctattgaaggtggacgcggttgtcggtcagcagctggtccgcgtgcgcgaactgatggtcgccttgagcgcggaacttgagcgcgcccggaaactttctcaaaacacggacttcgcaggcgggccacacagcgcgggatttctggttcgcctggcagcgaccgcacaacactggcttggatcggcgcgcgacctgaaggattggtgcagttggcgacgggctcgtgccgacgcgatctcggcaggattggcgcccctggtggcggacatcgaggaggggaacattgcggttggatcgatagtcgagcacttcgacttcagctatcagctttggtggctcaagcgaacggtcgacagcgatccagttctgcgcaccttctccagcgctgaccatgccaggaagattgaggagttccgatcggtggacagggcctttcaggacctgacgcgggactacatcaaagccaaggtcgcagcgaacatcccggagcaacgcagcctacagcccgccagcgagtctgagatgggtaggctgcgccgggagctacagaagcagcggggtcatcaatcgatccgtcgcttgatcgagggaatgccgacccttctgactcggctgaagccgtgcgtgctgatgtcgcccctctcggtggccacctttctcgatacggcgaacacgatgttcgacgtggtgctgttcgatgaggcgagccagatcccggcttgggacgcggtcggagccattgctcgcgcgcgtcaggccgtcgttgtcggcgatcccaagcagttgcctcccacgaacttcttccagaaggtcgacgagcttgacgacgctgccgaggaagctggggtggtggcggatctggagagcatcctcgacgagtgt

SEQ ID NO: 88 - DNA, 15964 bp, Artificial Sequence; identical to SEQ ID NO: 87
  Synthetic Oligonucleotide
  misc_feature (1)..(7171): n is a, c, g, or t

SEQ ID NO: 89 - DNA, 15900 bp, Artificial Sequence
  Synthetic Oligonucleotide
  misc_feature (1)..(9735): n is a, c, g, or t
nnnnnnnnnnnnnnnnnnnnnnnnnnnnnnnnnnnnnnnnnnnnnnnnnnnnnnnnnnnnnnnnnnnnnnnnnnnnnnnnnnnnnnnnnnnnnnnnnnnnnnnnnnnnnnnnnnnnnnnnnnnnnnnnnnnnnnnnnnnnnnnnnnnnnnnnnnnnnnnnnnnnnnnnnnnnnnnnnnnnnnnnnnnnnnnnnnnnnnnnnnnnnnnnnnnnnnnnnnnnnnnnnnnnnnnnnnnnnnnnnnnnnnnnnnnnnnnnnnnnnnnnnnnnnnnnnnnnnnnnnnnnnnnnnnnnnnnnnnnnnnnnnnnnnnnnnnnnnnnnnnnnnnnnnnnnnnnnnnnnnnnnnnnnnnnnnnnnnnnnnnnnnnnnnnnnnnnnnnnnnnnnnnnnnnnnnnnnnnnnnnnnnnnnnnnnnnnnnnnnnnnnnnnnnnnnnnnnnnnnnnnnnnnnnnnnnnnnnnnnnnnnnnnnnnnnnnnnnnnnnnnnnnnnnnnnnnnnnnnnnnnnnnnnnnnnnnnnnnnnnnnnnnnnnnnnnnnnnnnnnnnnnnnnnnnnnnnnnnnnnnnnnnnnnnnnnnnnnnnnnnnnnnnnnnnnnnnnnnnnnnnnnnnnnnnnnnnnnnnnnnnnnnnnnnnnnnnnnnnnnnnnnnnnnnnnnnnnnnnnnnnnnnnnnnnnnnnnnnnnnnnnnnnnnnnnnnnnnnnnnnnnnnnnnnnnnnnnnnnnnnnnnnnnnnnnnnnnnnnnnnnnnnnnnnnnnnnnnnnnnnnnnnnnnnnnnnnnnnnnnnnnnnnnnnnnnnnnnnnnnnnnnnnnnnnnnnnnnnnnnnnnnnnnnnnnnnnnnnnnnnnnnnnnnnnnnnnnnnnnnnnnnnnnnnnnnnnnnnnnnnnnnnnnnnnnnnnnnnnnnnnnnnnnnnnnnnnnnnnnnnnnnnnnnnnnnnnnnnnnnnnnnnnnnnnnnnnnnnnnnnnnnnnnnnnnnnnnnnnnnnnnnnnnnnnnnnnnnnnnnnnnnnnnnnnnnnnnnnnnnnnnnnnnnnnnnnnnnnnnnnnnnnnnnnnnnnnnnnnnnnnnnnnnnnnnnnnnnnnnnnnnnnnnnnnnnnnnnnnnnnnnnnnnnnnnnnnnnnnnnnnnnnnnnnnnnnnnnnnnnnnnnnnnnnnnnnnnnnnnnnnnnnnnnnnnnnnnnnnnnnnnnnnnnnnnnnnnnnnnnnnnnnnnnnnnnnnnnnnnnnnnnnnnnnnnnnnnnnnnnnnnnnnnnnnnnnnnnnnnnnnnnnnnnnnnnnnnnnnnnnnnnnnnnnnnnnnnnnnnnnnnnnnnnnnnnnnnnnnnnnnnnnnnnnnnnnnnnnnnnnnnnnnnnnnnnnnnnnnnnnnnnnnnnnnnnnnnnnnnnnnnnnnnnnnnnnnnnnnnnnnnnnnnnnnnnnnnnnnnnnnnnnnnnnnnnnnnnnnnnnnnnnnnnnnnnnnnnnnnnnnnnnnnnnnnnnnnnnnnnnnnnnnnnnnnnnnnnnnnnnnnnnnnnnnnnnnnnnnnnnnnnnnnnnnnnnnnnnnnnnnnnnnnnnnnnnnnnnnnnnnnnnnnnnnnnnnnnnnnnnnnnnnnnnnnnnnnnnnnnnnnnnnnnnnnnnnnnnnnnnnnnnnnnnnnnnnnnnnnnnnnnnnnnnnnnnnnnnnnnnnnnnnnnnnnnnnnnnnnnnnnnnnnnnnnnnnnnnnnnnnnnnnnnnnnnnnnnnnnnnnnnnnnnnnnnnnnnnnnnnnnnnnnnnnnnnnnnnnnnnnnnnnnnnnnnnnnnnnnnnnnnnnnnnnnnnnnnnnnnnnnnnnnnnnnnnnnnnnnnnnnnnnnnnnnnnnnnnnnnnnnnnnnnnnnnnnnnnnnnnnnnnnnnnnnnnnnnnnnnnnnnnnnnnnnnnnnnnnnnnnnnnnnnnnnnnnnnnnnnnnnnnnnnnnnnnnnnnnnnnnnnnnnnnnnnnnnnnnnnnnnnnnnnnnnnnnnnnnnnnnnnnnnnnnnnnnnnnnnnnnnnnnnnnnnnnnnnnnnnnnnnnnnnnnnnnnnnnnnnnnnnnnnnnnnnnnnnnnnnnnnnnnnnnnnnnnnnnnnnnnnnnnnnnnnnnnnnnnnnnnnnnnnnnnnnnnnnnnnnnnnnnnnnnnnnnnnnnnnnnnnnnnnnnnnnnnnnnnnnnnnnnnnnnnnnnnnnnnnnnnnnnnnnnnnnnnnnnnnnnnnnnnnnnnnnnnnnnnnnnnnnnnnnnnnnnnnnnnnnnnnnnnnnnnnnnnnnnnnnnnnnnnnnnnnnnnnnnnnnnnnnnnnnnnnnnnnnnnnnnnnnnnnnnnnnnnnnnnnnnnnnnnnnnnnnnnnnnnnnnnnnnnnnnnnnnnnnnnnnnnnnnnnnnnnnnnnnnnnnnnnnnnnnnnnnnnnnnnnnnnnnnnnnnnnnnnnnnnnnnnnnnnnnnnnnnnnnnnnnnnnnnnnnnnnnnnnnnnnnnnnnnnnnnnnnnnnnnnnnnnnnnnnnnnnnnnnnnnnnnnnnnnnnnnnnnnnnnnnnnnnnnnnnnnnnnnnnnnnnnnnnnnnnnnnnnnnnnnnnnnnnnnnnnnnnnnnnnnnnnnnnnnnnnnnnnnnnnnnnnnnnnnnnnnnnnnnnnnnnnnnnnnnnnnnnnnnnnnnnnnnnnnnnnnnnnnnnnnnnnnnnnnnnnnnnnnnnnnnnnnnnnnnnnnnnnnnnnnnnnnnnnnnnnnnnnnnnnnnnnnnnnnnnnnnnnnnnnnnnnnnnnnnnnnnnnnnnnnnnnnnnnnnnnnnnnnnnnnnnnnnnnnnnnnnnnnnnnnnnnnnnnnnnnnnnnnnnnnnnnnnnnnnnnnnnnnnnnnnnnnnnnnnnnnnnnnnnnnnnnnnnnnnnnnnnnnnnnnnnnnnnnnnnnnnnnnnnnnnnnnnnnnnnnnnnnnnnnnnnnnnnnnnnnnnnnnnnnnnnnnnnnnnnnnnnnnnnnnnnnnnnnnnnnnnnnnnnnnnnnnnnnnnnnnnnnnnnnnnnnnnnnnnnnnnnnnnnnnnnnnnnnnnnnnnnnnnnnnnnnnnnnnnnnnnnnnnnnnnnnnnnnnnnnnnnnnnnnnnnnnnnnnnnnnnnnnnnnnnnnnnnnnnnnnnnnnnnnnnnnnnnnnnnnnnnnnnnnnnnnnnnnnnnnnnnnnnnnnnnnnnnnnnnnnnnnnnnnnnnnnnnnnnnnnnnnnnnnnnnnnnnnnnnnnnnnnnnnnnnnnnnnnnnnnnnnnnnnnnnnnnnnnnnnnnnnnnnnnnnnnnnnnnnnnnnnnnnnnnnnnnnnnnnnnnnnnnnnnnnnnnnnnnnnnnnnnnnnnnnnnnnnnnnnnnnnnnnnnnnnnnnnnnnnnnnnnnnnnnnnnnnnnnnnnnnnnnnnnnnnnnnnnnnnnnnnnnnnnnnnnnnnnnnnnnnnnnnnnnnnnnnnnnnnnnnnnnnnnnnnnnnnnnnnnnnnnnnnnnnnnnnnnnnnnnnnnnnnnnnnnnnnnnnnnnnnnnnnnnnnnnnnnnnnnnnnnnnnnnnnnnnnnnnnnnnnnnnnnnnnnnnnnnnnnnnnnnnnnnnnnnnnnnnnnnnnnnnnnnnnnnnnnnnnnnnnnnnnnnnnnnnnnnnnnnnnnnnnnnnnnnnnnnnnnnnnnnnnnnnnnnnnnnnnnnnnnnnnnnnnnnnnnnnnnnnnnnnnnnnnnnnnnnnnnnnnnnnnnnnnnnnnnnnnnnnnnnnnnnnnnnnnnnnnnnnnnnnnnnnnnnnnnnnnnnnnnnnnnnnnnnnnnnnnnnnnnnnnnnnnnnnnnnnnnnnnnnnnnnnnnnnnnnnnnnnnnnnnnnnnnnnnnnnnnnnnnnnnnnnnnnnnnnnnnnnnnnnnnnnnnnnnnnnnnnnnnnnnnnnnnnnnnnnnnnnnnnnnnnnnnnnnnnnnnnnnnnnnnnnnnnnnnnnnnnnnnnnnnnnnnnnnnnnnnnnnnnnnnnnnnnnnnnnnnnnnnnnnnnnnnnnnnnnnnnnnnnnnnnnnnnnnnnnnnnnnnnnnnnnnnnnnnnnnnnnnnnnnnnnnnnnnnnnnnnnnnnnnnnnnnnnnnnnnnnnnnnnnnnnnnnnnnnnnnnnnnnnnnnnnnnnnnnnnnnnnnnnnnnnnnnnnnnnnnnnnnnnnnnnnnnnnnnnnnnnnnnnnnnnnnnnnnnnnnnnnnnnnnnnnnnnnnnnnnnnnnnnnnnnnnnnnnnnnnnnnnnnnnnnnnnnnnnnnnnnnnnnnnnnnnnnnnnnnnnnnnnnnnnnnnnnnnnnnnnnnnnnnnnnnnnnnnnnnnnnnnnnnnnnnnnnnnnnnnnnnnnnnnnnnnnnnnnnnnnnnnnnnnnnnnnnnnnnnnnnnnnnnnnnnnnnnnnnnnnnnnnnnnnnnnnnnnnnnnnnnnnnnnnnnnnnnnnnnnnnnnnnnnnnnnnnnnnnnnnnnnnnnnnnnnnnnnnnnnnnnnnnnnnnnnnnnnnnnnnnnnnnnnnnnnnnnnnnnnnnnnnnnnnnnnnnnnnnnnnnnnnnnnnnnnnnnnnnnnnnnnnnnnnnnnnnnnnnnnnnnnnnnnnnnnnnnnnnnnnnnnnnnnnnnnnnnnnnnnnnnnnnnnnnnnnnnnnnnnnnnnnnnnnnnnnnnnnnnnnnnnnnnnnnnnnnnnnnnnnnnnnnnnnnnnnnnnnnnnnnnnnnnnnnnnnnnnnnnnnnnnnnnnnnnnnnnnnnnnnnnnnnnnnnnnnnnnnnnnnnnnnnnnnnnnnnnnnnnnnnnnnnnnnnnnnnnnnnnnnnnnnnnnnnnnnnnnnnnnnnnnnnnnnnnnnnnnnnnnnnnnnnnnnnnnnnnnnnnnnnnnnnnnnnnnnnnnnnnnnnnnnnnnnnnnnnnnnnnnnnnnnnnnnnnnnnnnnnnnnnnnnnnnnnnnnnnnnnnnnnnnnnnnnnnnnnnnnnnnnnnnnnnnnnnnnnnnnnnnnnnnnnnnnnnnnnnnnnnnnnnnnnnnnnnnnnnnnnnnnnnnnnnnnnnnnnnnnnnnnnnnnnnnnnnnnnnnnnnnnnnnnnnnnnnnnnnnnnnnnnnnnnnnnnnnnnnnnnnnnnnnnnnnnnnnnnnnnnnnnnnnnnnnnnnnnnnnnnnnnnnnnnnnnnnnnnnnnnnnnnnnnnnnnnnnnnnnnnnnnnnnnnnnnnnnnnnnnnnnnnnnnnnnnnnnnnnnnnnnnnnnnnnnnnnnnnnnnnnnnnnnnnnnnnnnnnnnnnnnnnnnnnnnnnnnnnnnnnnnnnnnnnnnnnnnnnnnnnnnnnnnnnnnnnnnnnnnnnnnnnnnnnnnnnnnnnnnnnnnnnnnnnnnnnnnnnnnnnnnnnnnnnnnnnnnnnnnnnnnnnnnnnnnnnnnnnnnnnnnnnnnnnnnnnnnnnnnnnnnnnnnnnnnnnnnnnnnnnnnnnnnnnnnnnnnnnnnnnnnnnnnnnnnnnnnnnnnnnnnnnnnnnnnnnnnnnnnnnnnnnnnnnnnnnnnnnnnnnnnnnnnnnnnnnnnnnnnnnnnnnnnnnnnnnnnnnnnnnnnnnnnnnnnnnnnnnnnnnnnnnnnnnnnnnnnnnnnnnnnnnnnnnnnnnnnnnnnnnnnnnnnnnnnnnnnnnnnnnnnnnnnnnnnnnnnnnnnnnnnnnnnnnnnnnnnnnnnnnnnnnnnnnnnnnnnnnnnnnnnnnnnnnnnnnnnnnnnnnnnnnnnnnnnnnnnnnnnnnnnnnnnnnnnnnnnnnnnnnnnnnnnnnnnnnnnnnnnnnnnnnnnnnnnnnnnnnnnnnnnnnnnnnnnnnnnnnnnnnnnnnnnnnnnnnnnnnnnnnnnnnnnnnnnnnnnnnnnnnnnnnnnnnnnnnnnnnnnnnnnnnnnnnnnnnnnnnnnnnnnnnnnnnnnnnnnnnnnnnnnnnnnnnnnnnnnnnnnnnnnnnnnnnnnnnnnnnnnnnnnnnnnnnnnnnnnnnnnnnnnnnnnnnnnnnnnnnnnnnnnnnnnnnnnnnnnnnnnnnnnnnnnnnnnnnnnnnnnnnnnnnnnnnnnnnnnnnnnnnnnnnnnnnnnnnnnnnnnnnnnnnnnnnnnnnnnnnnnnnnnnnnnnnnnnnnnnnnnnnnnnnnnnnnnnnnnnnnnnnnnnnnnnnnnnnnnnnnnnnnnnnnnnnnnnnnnnnnnnnnnnnnnnnnnnnnnnnnnnnnnnnnnnnnnnnnnnnnnnnnnnnnnnnnnnnnnnnnnnnnnnnnnnnnnnnnnnnnnnnnnnnnnnnnnnnnnnnnnnnnnnnnnnnnnnnnnnnnnnnnnnnnnnnnnnnnnnnnnnnnnnnnnnnnnnnnnnnnnnnnnnnnnnnnnnnnnnnnnnnnnnnnnnnnnnnnnnnnnnnnnnnnnnnnnnnnnnnnnnnnnnnnnnnnnnnnnnnnnnnnnnnnnnnnnnnnnnnnnnnnnnnnnnnnnnnnnnnnnnnnnnnnnnnnnnnnnnnnnnnnnnnnnnnnnnnnnnnnnnnnnnnnnnnnnnnnnnnnnnnnnnnnnnnnnnnnnnnnnnnnnnnnnnnnnnnnnnnnnnnnnnnnnnnnnnnnnnnnnnnnnnnnnnnnnnnnnnnnnnnnnnnnnnnnnnnnnnnnnnnnnnnnnnnnnnnnnnnnnnnnnnnnnnnnnnnnnnnnnnnnnnnnnnnnnnnnnnnnnnnnnnnnnnnnnnnnnnnnnnnnnnnnnnnnnnnnnnnnnnnnnnnnnnnnnnnnnnnnnnnnnnnnnnnnnnnnnnnnnnnnnnnnnnnnnnnnnnnnnnnnnnnnnnnnnnnnnnnnnnnnnnnnnnnnnnnnnnnnnnnnnnnnnnnnnnnnnnnnnnnnnnnnnnnnnnnnnnnnnnnnnnnnnnnnnnnnnnnnnnnnnnnnnnnnnnnnnnnnnnnnnnnnnnnnnnnnnnnnnnnnnnnnnnnnnnnnnnnnnnnnnnnnnnnnnnnnnnnnnnnnnnnnnnnnnnnnnnnnnnnnnnnnnnnnnnnnnnnnnnnnnnnnnnnnnnnnnnnnnnnnnnnnnnnnnnnnnnnnnnnnnnnnnnnnnnnnnnnnnnnnnnnnnnnnnnnnnnnnnnnnnnnnnnnnnnnnnnnnnnnnnnnnnnnnnnnnnnnnnnnnnnnnnnnnnnnnnnnnnnnnnnnnnnnnnnnnnnnnnnnnnnnnnnnnnnnnnnnnnnnnnnnnnnnnnnnnnnnnnnnnnnnnnnnnnnnnnnnnnnnnnnnnnnnnnnnnnnnnnnnnnnnnnnnnnnnnnnnnnnnnnnnnnnnnnnnnnnnnnnnnnnnnnnnnnnnnnnnnnnnnnnnnnnnnnnnnnnnnnnnnnnnnnnnnnnnnnnnnnnnnnnnnnnnnnnnnnnnnnnnnnnnnnnnnnnnnnnnnnnnnnnnnnnnnnnnnnnnnnnnnnnnnnnnnnnnnnnnnnnnnnnnnnnnnnnnnnnnnnnnnnnnnnnnnnnnnnnnnnnnnnnnnnnnnnnnnnnnnnnnnnnnnnnnnnnnnnnnnnnnnnnnnnnnnnnnnnnnnnnnnnnnnnnnnnnnnnnnnnnnnnnnnnnnnnnnnnnnnnnnnnnnnnnnnnnnnnnnnnnnnnnnnnnnnnnnnnnnnnnnnnnnnnnnnnnnnnnnnnnnnnnnnnnnnnnnnnnnnnnnnnnnnnnnnnnnnnnnnnnnnnnnnnnnnnnnnnnnnnnnnnnnnnnnnnnnnnnnnnnnnnnnnnnnnnnnnnnnnnnnnnnnnnnnnnnnnnnnnnnnnnnnnnnnnnnnnnnnnnnnnnnnnnnnnnnnnnnnnnnnnnnnnnnnnnnnnnnnnnnnnnnnnnnnnnnnnnnnnnnnnnnnnnnnnnnnnnnnnnnnnnnnnnnnnnnnnnnnnnnnnnnnnnnnnnnnnnnnnnnnnnnnnnnnnnnnnnnnnnnnnnnnnnnnnnnnnnnnnnnnnnnnnnnnnnnnnnnnnnnnnnnnnnnnnnnnnnnnnnnnnnnnnnnnnnnnnnnnnnnnnnnnnnnnnnnnnnnnnnnnnnnnnnnnnnnnnnnnnnnnnnnnnnnnnnnnnnnnnnnnnnnnnnnnnnnnnnnnnnnnnnnnnnnnnnnnnnnnnnnnnnnnnnnnnnnnnnnnnnnnnnnnnnnnnnnnnnnnnnnnnnnnnnnnnnnnnnnnnnnnnnnnnnnnnnnnnnnnnnnnnnnnnnnnnnnnnnnnnnnnnnnnnnnnnnnnnnnnnnnnnnnnnnnnnnnnnnnnnnnnnnnnnnnnnnnnnnnnnnnnnnnnnnnnnnnnnnnnnnnnnnnnnnnnnnnnnnnnnnnnnnnnnnnnnnnnnnnnnnnnnnnnnnnnnnnnnnnnnnnnnnnnnnnnnnnnnnnnnnnnnnnnnnnnnnnnnnnnnnnnnnnnnnnnnnnnnnnnnnnnnnnnnnnnnnnnnnnnnnnnnnnnnnnnnnnnnnnnnnnnnnnnnnnnnnnnnnnnnnnnnnnnnnnnnnnnnnnnnnnnnnnnnnnnnnnnnnnnnnnnnnnnnnnnnnnnnnnnnnnnnnnnnnnnnnnnnnnnnnnnnnnnnnnnnnnnnnnnnnnnnnnnnnnnnnnnnnnnnnnnnnnnnnnnnnnnnnnnnnnnnnnnnnnnnnnnnnnnnnnnnnnnnnnnnnnnnnnnnnnnnnnnnnnnnnnnnnnnnnnnnnnnnnnnnnnnnnnnnnnnnnnnnnnnnnnnnnnnnnnnnnnnnnnnnnnnnnnnnnnnnnnnnnnnnnnnnnnnnnnnnnnnnnnnnnnnnnnnnnnnnnnnnnnnnnnnnnnnnnnnnnnnnnnnnnnnnnnnnnnnnnnnnnnnnnnnnnnnnnnnnnnnnnnnnnnnnnnnnnnnnnnnnnnnnnnnnnnnnnnnnnnnnnnnnnnnnnnnnnnnnnnnnnnnnnnnnnnnnnnnnnnnnnnnnnnnnnnnnnnnnnnnnnnnnnnnnnnnnnnnnnnnnnnnnnnnnnnnnnnnnnnnnnnnnnnnnnnnnnnnnnnnnnnnnnnnnnnnnnnnnnnnnnnnnnnnnnnnnnnnnnnnnnnnnnnnnnnnnnnnnnnnnnnnnnnnnnnnnnnnnnnnnnnnnnnnnnnnnnnnnnnnnnnnnnnnnnnnnnnnnnnnnnnnnnnnnnnnnnnnnnnnnnnnnnnnnnnnnnnnnnnnnnnnnnnnnnnnnnnnnnnnnnnnnnnnnnnnnnnnnnnnnnnnnnnnnnnnnnnnnnnnnnnnnnnnnnnnnnnnnnnnnnnnnnnnnnnnnnnnnnnnnnnnnnnnnnnnnnnnnnnnnnnnnnnnnnnnnnnnnnnnnnnnnnnnnnnnnnnnnnnnnnnnnnnnnnnnnnnnnnnnnnnnnnnnnnnnnnnnnnnnnnnnnnnnnnnnnnnnnnnnnnnnnnnnnnnnnnnnnnnnnnnnnnnnnnnnnnnnnnnnnnnnnnnnnnnnnnnnnnnnnnnnnnnnnnnnnnnnnnnnnnnnnnnnnnnnnnnnnnnnnnnnnnnnnnnnnnnnnnnnnnnnnnnnnnnnnnnnnnnnnnnnnnnnnnnnnnnnnnnnnnnnnnnnnnnnnnnnnnnnnnnnnnnnnnnnnnnnnnnnnnnnnnnnnnnnnnnnnnnnnnnnnnnnnnnnnnnnnnnnnnnnnnnnnnnnnnnnnnnnnnnnnnnnnnnnnnnnnnnnnnnnnnnnnnnnnnnnnnnnnnnnnnnnnnnnnnnnnnnnnnnnnnnnnnnnnnnnnnnnnnnnnnnnnnnnnnnnnnnnnnnnnnnnnnnnnnnnnnnnnnnnnnnnnnnnnnnnnnnnnnnnnnnnnnnnnnnnnnnnnnactgccggccagttttcccgcagcgccagcgcgaggccttgggcaaagttgtcgttgggcgccacgccgtggccgataagtgcggctttgctatgcagaaggttgccgctgacatatctgatcattagattctccgtgatcgtcgtgcgtacccatgttcgctccttccgggcgggcttcaatacgcattgatcctgagaaaggttgccgcggcggagtacaccactacgccccgaagatgttgtcggtactggaggcattgtcttgttccgttcgcccgagcagcgcgatttcttcgaaaaaatcctggcccatgtcagggcgccggagcagtcgaggtcctttgccaagggcgtcgatgggcccctgcttctcgagggtggtacgggtctgggcaagacgcgcgccgccctgatggcggccgtggaaaccgtccgatccggactgacggtcgcgatcgtcctcccctccgaaaccctcatgcagcggctgctggattccgtcgatttcgccgaggtcgtccccgcggatctggattggctggcgttccgacctgcggcgggcgacgcctcaccggacgagatcgaacgggtggcagacgcagcccgcgaggtgccgctgctcctctgcacggcgggctcggtcatcatcgaccgggtgctcagggggcgctacaacggtgccacgtcacgtgactacctgatcttcgacgatgcggaccgcttgcccgacagtgcactgaaggcgaccgattgcgaagtcactgcgtcgcagttgcgcgagttgggggtggttggcagcaacgtgcgggatgtcgccaccaaggtttcccgtgcgcctgctgcgtcccaggaggcgcgcgctgccgcgacgatgatcctcgagatgctggatgatcccgcgaagtatcactcggtgaccttcaacccggagaccgggctcgtcttgcggcacaacatgccaggacgcctgatgaagcgggtcgccaacaacccgaacgctgccttcatcggtacgtcgcttgccctcggcaggagcttcgatgccttcaagcgtgccatgggcatcgtcagtccgagcggcttgtcatcgatcatcgagcccaagaaccacggcagcctgcgttgccaccacgccgcgcatgcgccgctgtccgaggaatggttcgccgcgctcaagcagagtatcgcgaaggcggcgcgaccctgcctcgtcgtcaccgcggacgagcagcaggcccgggccatcggcttgctgacgcccgaggcgtcggtacgcctttcaggcgactcgccgtcacccgaatcattgacgtccgctggagccgtgctgatcgctgcggcgaactggccgggactcgacgcgccgcgggagtggcgcagcatcatcatcgcccgcgtacccatcgacgccgaatggggtcaggacgaagatgccgacgaacacttcgtcgatccccgcaatcaggccgtcaggctgctcaagaacatcatcggctggggagttcgccgacccgatgccgaatgtgatctttatgtgctcgactatcgcccggggttggtggagtcgctgatcccggctcgattcaagggtgattgggcacagcggcgcgcgatgacgggacgcggggcggcggaggacagcgcgatcgaacgcctcatcgctgccgagcagcctggcaaggcgctgcgtgacgaggtgttccgggtgcttggcaagcgctgcatgacctgcgatctcgtgccgaagccggggataccgctcgagatccatctgctcgggccagtctcggtcagcgaagacgatcgatcgctggccgaggagatggcggtgctctgccagtcatgccaccggctcgcgcattcggtcacgccgccgctctcgatgcccatgctgcgcggcttccacgaacgcaagcgcgcgcgaacctgagtccgtcgccgttgccgcgcaaggcggcttccgtcagatcgccaccgcgtgcacggggctgtccgtggcggcgctacggcgccgcagcgcgaacatgcgcatggttccgtagcctttggcggcagccgtcagaccgacgtagtcgcagcagaactcgtccgcgtgctcgagttcgagcgccgcggcaaaagtttcggtgacatagacgagaccgggtggcgtcaccggctcgatgcgcgccgcaagactcacgtgcgcgccgaagaagttctgtttcagcagcagaggatcgtcggtttcgaacaccggaccgagatgaccgccgagtcgcaaggccaggggttcggcgaaagcgccgctgtcggcagccaacgcctgcatcgcgacctgcaggtcgagggcgcattccgccgcttcgcgggtccggcgaaaaacgaggaacatgccatcgccccaggtgttgaggctgagcacgcgcgcgcgatggctctcgatggcacgtgcgaccccgcccaggacaccatggacgaactgcggcatttcccgatccgatatggtgctgaagcgggtgaagtcgccgaacagcatggctcgcgcccgtcgccggttcctgcgctcgtccgcaggcggcgcagcgttggtttcttgcgcgtcttgcggtgcgttgccgggatccggcaacggaatgatgcgctgcggccttccggattcgcgccacagtccgacgtcgacggccgttccggccacgccgcgagcgggggtgccgtcccacaccgcaagttgcgccacgctcgtgaaaaggtgttgggaggcgagcacggcaaggcccatggcgatccggctcgagtaggtgaacaacgtgtcgtcgccgagcccggcgccatcggtcgcgtaacggaccgattgcgcggcggcgaggcaacgccgcatccgggtcacccattgcccgccggcgggccgcaccgaggtttcaatgaaatcgtccagaaggaacggcagtaccacatgcagctgcgcaccgcgatcgagcagcgcttcggcaaagaggatgtctgcacctgaggcgagcgaaccatagccgaagcccgctgcgtgctcgtccagtgtctcaccgatggcggcggcgatcgtcgcttcggccgcggccgggaagcgacccgggactccgggtgcggcgatcatgtgacccgtgtagtggatcaccgcgggcggcgtcagggacgccacccacgatggcggcagacccttggcctcggtcgcgtgcttgatcgaacgcgctgcggtggcgagcatggtgtagtcaccattgctcgcttcgcgtgcggcatcgagccttgcctcggccgacacgagatcgccattgatgatatgcgcttcgatcagggttgcgagggaccagaaccgatcttcgccctctgccgtgtccaccatcgtctcgagcgaggcgatcaggcgccgcgccactgcagccgcacgctccggctccccggcaagcagcagcaggttcgcgaaattgatcccggggtaatagtcgccgcgctcgaggtaggccgcttcgtactttgcggccgcggtgcgcagcagggcgagcctctcggcttcatcggtgctggccagggcgagatccttgtccagtcgggcatcgagttcacgcagaccgcgttcgcttcgaccttcgagtcccagtgaaacgaaccattgtcttgcctgccgcgtggcccccgagcgggcgagggcgaggacggctcggtgtttaagcctggtgctgtcgggatgttcgcccagcccgcggcgggcgatgtcgaacgcccggaacgcctcgcctgcacgctcggcttcgcgcaccagcgcataccagtccgcttcgttgcgaccgaccgtcggtgcgtggcgcagatcacccatggtgcattgtttactcgacccgggtccagatcgacttgctgtagaagaagcccctcgattgcttcacttcgagtttgcgacctcccggcagttgcaggatttcggcgcggctgagggatccggtttccggatcgagcaatatcgcctcttcccagacgttctctgcggcgttgaatcgggcgttttgcaagatcgtcagccccatgaacaactgccccttgcgcgaaccgggacagtccttgcagcgcgctgcacgctgcgccgggtcccgaacctcctcgattcgtccccagagttttcctgacagcaatgaaatgcgcacgaggaagccgcccgggtcgctctcggcttcgtgggtcagccagagtcccgtcggcggtggcggcggggtcgcgaaggaaaatgttgatacaccgatcaggaggatggaaaagagaagctttacacgcatgttccgttcacctccgccagctgtggagcgcccgcgatgcgcctgcgtcaccgatcctcaaaccgccctttcaacgcgaaccagtcgcccgacgcccgcagcccggcccgcttcgatgtcgcgctcgctgtcgccgatgaggatcgacgctgcagggtcgatgccgagctcgcggatcgcacgcaggatcattcccggtgccggcttgcgacagtcgcaggatcgcgtgaattgcgcaacggtaccctgcgggtgatgcgggcagtggtacaccgcggcgatacggatgccctgcgccgccaaggcttcgcgatagcgatccgtgagcagttcatagtccgcctcggagaagtagccccgcgcgatgccggactggttggtgatcacgaccagcagataaccctcgtcggccagccgctgcaacatcgcgacggcgtccggtgcgaacctgaagtcctcccagcgaccgacatacccggagtcgacgttgatcaccccgtcgcggtcgatgaacgcggctttgcgcaggccggacatggagcctccggtcagcgggccggatcgcccagtttcgagaggatgcgggtggtggacaggccgggcacgaggtcgaggatggccacctggccgcccgctgccgtgacacaccgtccgccggcgacttcgccggcgatgtagtccccgcctttcacgagtacctgcggcaacacctcgcagtagagatgttccggcgtgtcttcctcgaaggcgacgagatagtcgacgcactccagcatgccgaggaccgtgagtcggtgctcgagcggattgaccggccgcgtcggccccttgagccgacgtaccgaggcgtcgtcgttgacggccacgaccagcaggtcaccgagctcccgcgctcgccgcaggaggtcgacgtgtccggcgtgcagcacatcgaagcaaccgttggtcatcaccgtcgcccggcccgccgccttcgcggcggcgacgatttctttgagtgcgcgccggtcgacgaccttgcgcagcaggcccgaagcgggtgatgaggatctcgcgtggagaatctccgctacggtggtggtggccgttcccgacttggcgacgacgagaccggcagcgatgttcgcccagtcgaccgcctcgcgcagcggtacgcccgaccccagcgccgccgccagagtcgcgaccaccgtgtcgccggcaccggtgacatcgaagacctcgcgggcgcgactggccagatgcagcggctccgcattgcgctcgagcagggtcatgccatgttcgccgcgggtgacgagcagagcttcgagacccagccggtcgcgcaggttgacgccgcgttcgacgatgctgcgttcgtccgcgcagcgacccaccaccgcctcgaactcggcgagattcggcgtgatcaccgtggcgccgcaatagcgcatgaagtccgttcccttcgggtcgaccaccacgggtttgccgagagcgcgggcagcctcgatcatctgcggcgtctcgctgccgaggaagcccttcgcgtaatccgagagcaccagcacgtcggcaccttcgagacgagcgcggatgccatcgaccttgctcgcgcccgaaagacccgccagaccgtgctcgaagtcgagtcgtaccagttgttgccggcgcgacatcacccgcagtttgcggatggtctgcgcgcctgcgacctgcatcaggccgtgggcgatgccgcgctggtcgaggagccgtccgagttccgcgcctgctgcatcgtcaccgatgagtccgaccagcgtcgcccgcgcgcccagcgccacgatgttgagcgccacattggccgcgccgccgggacgtgtctcctcgaagtcgaccagcaccaccggcac

SEQ ID NO: 90 - DNA, 15893 bp, Artificial Sequence
  Synthetic Oligonucleotide
  misc_feature (1)..(5208): n is a, c, g, or t
nnnnnnnnnnnnnnnnnnnnnnnnnnnnnnnnnnnnnnnnnnnnnnnnnnnnnnnnnnnnnnnnnnnnnnnnnnnnnnnnnnnnnnnnnnnnnnnnnnnnnnnnnnnnnnnnnnnnnnnnnnnnnnnnnnnnnnnnnnnnnnnnnnnnnnnnnnnnnnnnnnnnnnnnnnnnnnnnnnnnnnnnnnnnnnnnnnnnnnnnnnnnnnnnnnnnnnnnnnnnnnnnnnnnnnnnnnnnnnnnnnnnnnnnnnnnnnnnnnnnnnnnnnnnnnnnnnnnnnnnnnnnnnnnnnnnnnnnnnnnnnnnnnnnnnnnnnnnnnnnnnnnnnnnnnnnnnnnnnnnnnnnnnnnnnnnnnnnnnnnnnnnnnnnnnnnnnnnnnnnnnnnnnnnnnnnnnnnnnnnnnnnnnnnnnnnnnnnnnnnnnnnnnnnnnnnnnnnnnnnnnnnnnnnnnnnnnnnnnnnnnnnnnnnnnnnnnnnnnnnnnnnnnnnnnnnnnnnnnnnnnnnnnnnnnnnnnnnnnnnnnnnnnnnnnnnnnnnnnnnnnnnnnnnnnnnnnnnnnnnnnnnnnnnnnnnnnnnnnnnnnnnnnnnnnnnnnnnnnnnnnnnnnnnnnnnnnnnnnnnnnnnnnnnnnnnnnnnnnnnnnnnnnnnnnnnnnnnnnnnnnnnnnnnnnnnnnnnnnnnnnnnnnnnnnnnnnnnnnnnnnnnnnnnnnnnnnnnnnnnnnnnnnnnnnnnnnnnnnnnnnnnnnnnnnnnnnnnnnnnnnnnnnnnnnnnnnnnnnnnnnnnnnnnnnnnnnnnnnnnnnnnnnnnnnnnnnnnnnnnnnnnnnnnnnnnnnnnnnnnnnnnnnnnnnnnnnnnnnnnnnnnnnnnnnnnnnnnnnnnnnnnnnnnnnnnnnnnnnnnnnnnnnnnnnnnnnnnnnnnnnnnnnnnnnnnnnnnnnnnnnnnnnnnnnnnnnnnnnnnnnnnnnnnnnnnnnnnnnnnnnnnnnnnnnnnnnnnnnnnnnnnnnnnnnnnnnnnnnnnnnnnnnnnnnnnnnnnnnnnnnnnnnnnnnnnnnnnnnnnnnnnnnnnnnnnnnnnnnnnnnnnnnnnnnnnnnnnnnnnnnnnnnnnnnnnnnnnnnnnnnnnnnnnnnnnnnnnnnnnnnnnnnnnnnnnnnnnnnnnnnnnnnnnnnnnnnnnnnnnnnnnnnnnnnnnnnnnnnnnnnnnnnnnnnnnnnnnnnnnnnnnnnnnnnnnnnnnnnnnnnnnnnnnnnnnnnnnnnnnnnnnnnnnnnnnnnnnnnnnnnnnnnnnnnnnnnnnnnnnnnnnnnnnnnnnnnnnnnnnnnnnnnnnnnnnnnnnnnnnnnnnnnnnnnnnnnnnnnnnnnnnnnnnnnnnnnnnnnnnnnnnnnnnnnnnnnnnnnnnnnnnnnnnnnnnnnnnnnnnnnnnnnnnnnnnnnnnnnnnnnnnnnnnnnnnnnnnnnnnnnnnnnnnnnnnnnnnnnnnnnnnnnnnnnnnnnnnnnnnnnnnnnnnnnnnnnnnnnnnnnnnnnnnnnnnnnnnnnnnnnnnnnnnnnnnnnnnnnnnnnnnnnnnnnnnnnnnnnnnnnnnnnnnnnnnnnnnnnnnnnnnnnnnnnnnnnnnnnnnnnnnnnnnnnnnnnnnnnnnnnnnnnnnnnnnnnnnnnnnnnnnnnnnnnnnnnnnnnnnnnnnnnnnnnnnnnnnnnnnnnnnnnnnnnnnnnnnnnnnnnnnnnnnnnnnnnnnnnnnnnnnnnnnnnnnnnnnnnnnnnnnnnnnnnnnnnnnnnnnnnnnnnnnnnnnnnnnnnnnnnnnnnnnnnnnnnnnnnnnnnnnnnnnnnnnnnnnnnnnnnnnnnnnnnnnnnnnnnnnnnnnnnnnnnnnnnnnnnnnnnnnnnnnnnnnnnnnnnnnnnnnnnnnnnnnnnnnnnnnnnnnnnnnnnnnnnnnnnnnnnnnnnnnnnnnnnnnnnnnnnnnnnnnnnnnnnnnnnnnnnnnnnnnnnnnnnnnnnnnnnnnnnnnnnnnnnnnnnnnnnnnnnnnnnnnnnnnnnnnnnnnnnnnnnnnnnnnnnnnnnnnnnnnnnnnnnnnnnnnnnnnnnnnnnnnnnnnnnnnnnnnnnnnnnnnnnnnnnnnnnnnnnnnnnnnnnnnnnnnnnnnnnnnnnnnnnnnnnnnnnnnnnnnnnnnnnnnnnnnnnnnnnnnnnnnnnnnnnnnnnnnnnnnnnnnnnnnnnnnnnnnnnnnnnnnnnnnnnnnnnnnnnnnnnnnnnnnnnnnnnnnnnnnnnnnnnnnnnnnnnnnnnnnnnnnnnnnnnnnnnnnnnnnnnnnnnnnnnnnnnnnnnnnnnnnnnnnnnnnnnnnnnnnnnnnnnnnnnnnnnnnnnnnnnnnnnnnnnnnnnnnnnnnnnnnnnnnnnnnnnnnnnnnnnnnnnnnnnnnnnnnnnnnnnnnnnnnnnnnnnnnnnnnnnnnnnnnnnnnnnnnnnnnnnnnnnnnnnnnnnnnnnnnnnnnnnnnnnnnnnnnnnnnnnnnnnnnnnnnnnnnnnnnnnnnnnnnnnnnnnnnnnnnnnnnnnnnnnnnnnnnnnnnnnnnnnnnnnnnnnnnnnnnnnnnnnnnnnnnnnnnnnnnnnnnnnnnnnnnnnnnnnnnnnnnnnnnnnnnnnnnnnnnnnnnnnnnnnnnnnnnnnnnnnnnnnnnnnnnnnnnnnnnnnnnnnnnnnnnnnnnnnnnnnnnnnnnnnnnnnnnnnnnnnnnnnnnnnnnnnnnnnnnnnnnnnnnnnnnnnnnnnnnnnnnnnnnnnnnnnnnnnnnnnnnnnnnnnnnnnnnnnnnnnnnnnnnnnnnnnnnnnnnnnnnnnnnnnnnnnnnnnnnnnnnnnnnnnnnnnnnnnnnnnnnnnnnnnnnnnnnnnnnnnnnnnnnnnnnnnnnnnnnnnnnnnnnnnnnnnnnnnnnnnnnnnnnnnnnnnnnnnnnnnnnnnnnnnnnnnnnnnnnnnnnnnnnnnnnnnnnnnnnnnnnnnnnnnnnnnnnnnnnnnnnnnnnnnnnnnnnnnnnnnnnnnnnnnnnnnnnnnnnnnnnnnnnnnnnnnnnnnnnnnnnnnnnnnnnnnnnnnnnnnnnnnnnnnnnnnnnnnnnnnnnnnnnnnnnnnnnnnnnnnnnnnnnnnnnnnnnnnnnnnnnnnnnnnnnnnnnnnnnnnnnnnnnnnnnnnnnnnnnnnnnnnnnnnnnnnnnnnnnnnnnnnnnnnnnnnnnnnnnnnnnnnnnnnnnnnnnnnnnnnnnnnnnnnnnnnnnnnnnnnnnnnnnnnnnnnnnnnnnnnnnnnnnnnnnnnnnnnnnnnnnnnnnnnnnnnnnnnnnnnnnnnnnnnnnnnnnnnnnnnnnnnnnnnnnnnnnnnnnnnnnnnnnnnnnnnnnnnnnnnnnnnnnnnnnnnnnnnnnnnnnnnnnnnnnnnnnnnnnnnnnnnnnnnnnnnnnnnnnnnnnnnnnnnnnnnnnnnnnnnnnnnnnnnnnnnnnnnnnnnnnnnnnnnnnnnnnnnnnnnnnnnnnnnnnnnnnnnnnnnnnnnnnnnnnnnnnnnnnnnnnnnnnnnnnnnnnnnnnnnnnnnnnnnnnnnnnnnnnnnnnnnnnnnnnnnnnnnnnnnnnnnnnnnnnnnnnnnnnnnnnnnnnnnnnnnnnnnnnnnnnnnnnnnnnnnnnnnnnnnnnnnnnnnnnnnnnnnnnnnnnnnnnnnnnnnnnnnnnnnnnnnnnnnnnnnnnnnnnnnnnnnnnnnnnnnnnnnnnnnnnnnnnnnnnnnnnnnnnnnnnnnnnnnnnnnnnnnnnnnnnnnnnnnnnnnnnnnnnnnnnnnnnnnnnnnnnnnnnnnnnnnnnnnnnnnnnnnnnnnnnnnnnnnnnnnnnnnnnnnnnnnnnnnnnnnnnnnnnnnnnnnnnnnnnnnnnnnnnnnnnnnnnnnnnnnnnnnnnnnnnnnnnnnnnnnnnnnnnnnnnnnnnnnnnnnnnnnnnnnnnnnnnnnnnnnnnnnnnnnnnnnnnnnnnnnnnnnnnnnnnnnnnnnnnnnnnnnnnnnnnnnnnnnnnnnnnnnnnnnnnnnnnnnnnnnnnnnnnnnnnnnnnnnnnnnnnnnnnnnnnnnnnnnnnnnnnnnnnnnnnnnnnnnnnnnnnnnnnnnnnnnnnnnnnnnnnnnnnnnnnnnnnnnnnnnnnnnnnnnnnnnnnnnnnnnnnnnnnnnnnnnnnnnnnnnnnnnnnnnnnnnnnnnnnnnnnnnnnnnnnnnnnnnnnnnnnnnnnnnnnnnnnnnnnnnnnnnnnnnnnnnnnnnnnnnnnnnnnnnnnnnnnnnnnnnnnnnnnnnnnnnnnnnnnnnnnnnnnnnnnnnnnnnnnnnnnnnnnnnnnnnnnnnnnnnnnnnnnnnnnnnnnnnnnnnnnnnnnnnnnnnnnnnnnnnnnnnnnnnnnnnnnnnnnnnnnnnnnnnnnnnnnnnnnnnnnnnnnnnnnnnnnnnnnnnnnnnnnnnnnnnnnnnnnnnnnnnnnnnnnnnnnnnnnnnnnnnnnnnnnnnnnnnnnnnnnnnnnnnnnnnnnnnnnnnnnnnnnnnnnnnnnnnnnnnnnnnnnnnnnnnnnnnnnnnnnnnnnnnnnnnnnnnnnnnnnnnnnnnnnnnnnnnnnnnnnnnnnnnnnnnnnnnnnnnnnnnnnnnnnnnnnnnnnnnnnnnnnnnnnnnnnnnnnnnnnnnnnnnnnnnnnnnnnnnnnnnnnnnnnnnnnnnnnnnnnnnnnnnnnnnnnnnnnnnnnnnnnnnnnnnnnnnnnnnnnnnnnnnnnnnnnnnnnnnnnnnnnnnnnnnnnnnnnnnnnnnnnnnnnnnnnnnnnnnnnnnnnnnnnnnnnnnnnnnnnnnnnnnnnnnnnnnnnnnnnnnnnnnnnnnnnnnnnnnnnnnnnnnnnnnnnnnnnnnnnnnnnnnnnnnnnnnnnnnnnnnnnnnnnnnnnnnnnnnnnnnnnnnnnnnnnnnnnnnnnnnnnnnnnnnnnnnnnnnnnnnnnnnnnnnnnnnnnnnnnnnnnnnnnnnnnnnnnnnnnnnnnnnnnnnnnnnnnnnnnnnnnnnnnnnnnnnnnnnnnnnnnnnnnnnnnnnnnnnnnnnnnnnnnnnnnnnnnnnnnnnnnnnnnnnnnnnnnnnnnnnnnnnnnnnnnnnnnnnnnnnnnnnnnnnnnnnnnnnnnnnnnnnnnnnnnnnnnnnnnnnnnnnnnnnnnnnnnnnnnnnnncaaatccttggacgaaattaagttgcttccaccagataggattaccgagctcgccaagatgggaaacccagatgctcagtactggcttggggaattaatttacaatggtgccatatcaaattggcacgacttaaggcatttaatgatgccctattgggaggatgcgatgcggcaggggcatgcaatggctacctacagattacttgagtgggtcaggggcggtgctgtgccagatgatatggctaaacttaagtcatcagagattaaattatatctcagtaaactcgctaatgcaggtgaagccaaagctaacatgatattgtttcgggatacgttatccgattttgtaaataaacgaaatacttctggtgagactgataatcttttaaaaagaactgcagataaatatctaattcgtgcttacgaaattggatcgagagacgctgcatatcggtatgcgatcatgttgtcttatggcagcatatctataccgcaggatcattctttagctgtaacaatttttgaagaagcctacgcaatggagccagatgaaccaaaaagagacgatggcagtttatcctgttcaatattaattatactttctgattattatggaggtcagtttctagttgatggtgaaaattactctggcgaagcggacgatgcatcttaccttcatacattatctaaaagcgtgaaagattcttgtccgatcttgatgttccgttactccacttacttaatggaaaacggggaggctgatgattatttcgacgcttatctcgtagctctagatgctttagatatcgctaaagctgatcatcttgctaccgattatatgtacgatttactgggaacgctagctctgaaactaaatgagccgctcaaagcgaaagagcatttttcaaaaatgaaagatgagcagtatattgaatggttatttaatgaatatttgggtggtggtctaaaactttgtagcgcgctggatgtttcaaaaaatgagtgcagggcttttatttttaattgagaaattcagcatagttatttttgtgtaaaaaatttcaaacaaagatgttaaacatttaaatgaaatattagacgtagtcgtattttaatctaattgctctgctagttgtgaagtgaagggtgccagtaaatattagatcctttacacgggtaactccgatatcgcggtggatggggctggggttcgttagggaaaaattactttggcagattctcaatggtagagggggggcaaaaaacagccgcccctttctagtgatgggtgttgctctcacatttttgactgagaatgctctatgaaataattaatacgattttcaaataaatttttagtagatttctagtatcttgtcgatactctctaataacctgagcaccagctgtaacaatcaaatcttgcggtgaattttatttatgtttgaacaagtgaaaattgaggcaacccttcgtactccgattattattcaggggtatatgacatttgatgcgctattaggtgcattactgtttgagcggctacaggatgtcgacaaaacgcactccagcattccaattcaatgtgatgatgggctgttttatgcttctgcagctcaggttgaagtcattgatcgtggtggtttggcaattgctgctaatctgagggcccagcatgacttgaacccaaatcatgtaaagaaaagtcgtgatggctcaaaactgcacaaaagtttaggattgaagcgccgtagacagtttggagcagttctaaataaatacagaacaatcactgtaaattctatcagttgggatgtgactggcgatattaaccagattgaagacttgcttaatgatgctttttttatcggcaaaaaaagaacagcaggttatggtgaagttataagttgggacttcaagaacagtgaaacagacggtctcatagatgcgcaaggacaggcactaaggcctattccggtagaacgttttaatggtgataagtctttgccaataattgataccgcttggaagcctgcttattggaatcctgagaacaggtcagcctgttatgctcctgagcctgtctcatgaatacatttgtttttctccgggagcattttgctagatatgttttgcctgatcttagcaatgacgcagtcgcagactgcaaacgtgcactcacgatgaaccatctccttgttaccggaaagtcggggaggttaagcggttgggtaatggttaaaaaagataaaacctatatccaagccaaaattgcagcaaagcatgcaaaccttataaccgccgatccacgtacccggtatgaagcatggtatgaggagctcgaaaatttttcaggacctacctgctttatagaatttacaaagagtacctttaatattggcaatatctttttgacccatgatgcgcgagttgtaaaaatttgtgggccagcttcgtctcaaacattcaattataccgatgaaccaaacgaagcttctggtgtagcacataaagtgctcgccaagatgcggagaaaaaatgctgtttgattataaaatattaaaatctgatgcaaaaaatgcctatgacttgcatcagcttgtcgctgccacctttaagggtgagagtggcagaaatttgttctgtgattacggcgaccacatacgtgtgcggagcacaaagcacactctaaatgcgaaacaaggtgtcgccgttactgtgcctgccgtcggcgcaatagctttcattgaattgcgagcatcctgttatgtgtctgggggaggaaaaaaatatttcctgatgcaaggtgattggagagccaggcatacctggcttgaaaaaaagagcgcccaaagtggcttttcggttttaaatgtaacctgtcaatcagaactgatgaaaatcccaaagccaggtgcacagttcacgcttgattgcaccgactttgctgcaaccatcaagatcaatgacatagaaaaattcgaaactgccttgcgcgatggaattggatcgaaaggcagagcgtttggttttggaatgcttgttttatgaataatatggagacaatgaaatggtaaatacgatctttaatatggttctaacatctgagcagcctttgagtatcacgctacccgtggccgagtacactcgggcaaataaatttgctaactctccagttatgacccgagggctcgacgcggaaggtgcgaagcaagaaacatgttacattcctgctacgacttttcgcggaatgctcaggcgtcatgtggttgtcccgctgatggaggagcgagccagaaacggtgatcactatactttggatgaagcctaccgtgatttgattgggcaggatgctgccagcgaacaacagccagatgaaattgatctgatggctttaaaaaatatgcgtgcacaaaatccaattgtcgatttgtttggtctcggtttgggtgttcaatcacgcctaaaagtcagtcactttcttccagagcataatattttgccagaggtatttaccaccgctcgaaaggacttaggcgatgcagacgatggtgcaatactggacttggttcgcgatgaagagagagaaaaatatctcaaaagagccaacgcaaattcaaagagatctgctgcagaaagccttctggcgcggctggtgaagcagaagaaaaaggacggttcatcagcagacttggatgctcaaatagttgcgacagaaagtaaggttgaagagtaccgtgatgcgatggatggcatgaccaattcttctcggaccatacttacgcattacgccatgcctgcgggtgtacagtggacgggacgtttaattattacaaactccactgaaaaagatatcgatgctctgtgtggagccttagatcgtttcagtagctatccgatgattggtgcccagcatgcccgtggatgcggtgagattagtggtattgctaatatagaaacagatagaaggctggttaaaagaattagttttggtggctttgcgccagcacaaatagacaacgtagcctaggatgaaggagctaatcatacattttttatattggaaatgcggttaaagttaacttttctaaatggttatgaaaactctgttgtggcccccattaatttgtggggcaactgaaactcgaaggtctgtattgtacggtcatagaaggttgtggcccccatttatttgtggggcaactgaaaccataaccctgacaccttctattggactaatgctgcggcccccagtagtttgaggggcaactgaaacatggagcaacaactaataaaaacactactggttgtggcccccattaatttgtggggcaactgaaacaagtcggtggccagttgggtgttgtaggatgttgtggcccccattaatttgtggggcaactgaaacgatggcttcacgcaagttatagcagccgatgttgtggcccccattaatttgtggggcaactgaaactctgcaccgaagcggatcttttgccgccccgttgtggcccccattaatttgtggggcaactgaaaccgccgcgtacccggccttatttctgcgatgttgtggcccccattaatttgtggggcaactgaaacaagatggcttgcccaggtgcgccagcctgccgttgtggcccccatcgatatgtggggcaaaataaagagagccaagcatgctagttttggctctctttaacgtaacgcaccatatgaagttggatttaactagtgtttaattcacacttttggttaggtttactgattcaaagtggaaaatgggggatgatcagaatttttagatcggaagagcaagatcagttttttaagctgatccaaaaacatatagaaacccctgatgcacctttactgctggaaggagccactggactgggtaaaacgctgccgttccttgttgccgcagcggtaagtggtaaaaaggttgcgatagttttcccaacccatcagctgatcaatcaggctttggatagctgggacttaaaagcaacacttgcggcctatcccgcagtgattgtgaaggcctttagacctaggtcatatttcgaagcctcacctgcagattacgcggcacacaaacaagaagcgttagacgcagacataatgttctgcacctcggtatccgtgatcatagaccaaagactcaatggcgattataatggctcaacagacagagatgtgattatctttgatgaggcagatcagcttcctcaatttgctgctttgacctctgatatttcactcagcagaattgatctaagaagcctcagaattaatgaatcttcgccaaaagagaccattgatgcaatcttcaaaaagaagacattgccgtcagaaatcagggcaaaggcgcgcttgatagaagaagcgttaggccttggcgatgtttggtttattaaggtgggttttgcggatgatggagccttagaggtgcgctcacgcttgcctggaaggctgttaaaacgcgtatccaaccgagcatcgacaatttttataagcgcaaccctgtctgtaaatggtacatttaaagacttttgtcgtgcgatgggaatagaagagaagagtagactgtctgcaatagttgagcccaagaaacatggggacctacaatttgattttataactgatgaagagcttggaagcgatgcttggctggacgcagtttgtgaagcaattgaatatgccgatcatcctgtactggtcgctacaccgtcgcattctttagctcaacagattgcaagtaatgctactcaggcgaccttaagagccgcggatgaaacaacgtcgcaagctgctgcgcgtatgggagatacaaaggttctcatagcagcgggtgcatgggcagggcttgatacgccggtacaatggaaaacggttgtggtacctagaataccctacactgggccaaacaatctcagagagttttggtatgatgatgaagaggactttggcgtccagaagccagatccgatgtcatcttttatagattcaaaaaatgctgcggctcgtaggctgaagcaggtctttggcagaggcttaagaacacccgatgccgaatgctcaataatactttgcgacccgcgaattgatcgttttaataagattgcaccagccagatttcagaaaacgtattttgagggaatggccatttcagttaatgcaacaaaatctgaacgttcgcctctgcttagaaaagcagcactcgctcattatggtgaaacctgcatggcctgtgactttattcctgagtctttaaggcaattagaaatccaccatcttgagccccttgctgatcgtgggccaagccacacgaccctgaatgacgtcgtggtattgtgcagaaactgccacggtttggcacatgacactaatccgcccatacagttgccagagcttaaattacgatctcaaaagttgaaaaagaaaagacctggattgtccatgatttaaagatttcgattttcctgtacgctggtatccattaagttaaccagtcaatttggctgatcccaaacaacaattgtttgatgaatagccccagttttttgccgtactgacataccactgacacgtgactgcgcatacgcactggctaagtaactaggttttaacgaaattggatagaattttgttaaaacggaatgtcgtcgttatcaaacgaattaatatccgcaattggtggagtgttggcgttttggaaattaactgactgcgagctgttagcgtcgttaccattgcgtgaaactttccacgccttaacatccgtgtaccaacgcccattatattctcggctctccagatcgattgaaacctcaacggtttctccctgctggatattaaactgatcaatcttatcaccccaagccatgaagcagactttcttggggtattgggcctcagtctccagaacatactcttgcttgcgccattctccattcgctgactgtccggatttaacttccaatatttcaacaatcttccctgaaatttccaaagtcattacctttcctgcatccattgtccctagttactttcgtatcaaactaggcgatctgaataaaaggccaagcgtattcttctgaatcttgtggattgagttgaagctacgcatgtgcagtaaattgtaggtatggatattcagtttgccaaatacaaagagcttatcgagcagcaattagaggggcttactgcagaggatgtgctgggccagagcgcacagaagactgtcgagttggaccagcagtccgttggaaggctttcgcgcatggacgcgctgcaatcccaagccatggcacaggcacagcagagacgcagggatgcacacaaacggtctctgcaagccgctcttcgcagattagctgaagacgagtttggttattgtatggagtgcggagaagagattgaggaagcaaggttgctagctaacccagctgtcttgaagtgcattggctgcctcaacggatagcatgcgttctcaatcttgtgtggacctgtggagcatgtggagcttcgtaacaataggctgcttacttggaatcttacagtgatacttgatgaactttagcctatatggttgagtatttggatgaagattctagatcacatgtttcgctgtgtagtagctgtgctgttagctgttggttctggagcagctattgcgaaagagcgtttgtgttgacccaaagaagctttcacattgcttttgcgaaacaactattcccgcctatgccaagccgtatgccatttatttttcccgcgctgtttcgatttaggcttgcattataattgtgcgtcgtttggttaaatccaaacttggcactcttcaaatttatatgtgaaaaataaaaccataagctgactaatccatcgagcttgaatacagctctcgagttgttctgtttttggactttcaaagttccaagctgcttccctctgcagctataatgatacacagaataaaagccagccttggctcgttttggtttagggcaaaaatttgagggtgctactttcagttgttcgatgaagttagtgcttattaaatcgttctttttagttgaaagctttgcttgtctagcaaatgcaactgctgccgcttgagttttgcgcccccatattccgtcggcactgcccgcattgcagcccgcagcattgagcagtttctgaattttgataactgctaaccttaaccgttcttcatcattgatcgaaggttccttttcttcttcagcctgtttctgttctttagctgatgcgtcgagatatttcataaatttggtgatgaaagtattaattttatgaaaattttcggagctaatttccttggtgcgagcatttagtttctctttctcctcattatcaaagacatagaattcacgacttctaaacattttctcaaagacccacggaggcgtttcaaattcattcaggaagcctattatttcagacactgtgaattgagtattttgctgtgtttcactgacctttgcattagctttatcgctatctgaaccatatgtgccagcttgatgaactgccaagatcccatcggcttgtcgtatctttccaccaaagaacatgaacgaacatgctgaataacatcctagttgctcgggaagctttgggacataagtagcaatccctttatcatgaatgatgcccgccatgttgagaccttcccaaacactgccaccatcactcgccagaacaactatattaatgtcatggtttctgatggcacggcgcaattcaaagctgtcatattcctcgatatcattgaggaagaacaatgcatttgggacagttcctgtatgcaagaaggaaccgtaaacagtaatatcaaatgggtcttttttctccgcactgactgcggttgtcaaaactagggagaaaagacctaataatttcacgaataagttatgcatacctttaacataacgctgcgagagattaattgtagtctgaaattgagttatgggtgaagttatctaaaaagccgattaccctgatgatttgatatcagaggcattttttaatgctttaggtgatgcacaagaaggtttttgtccgaagttagtagttgaagcaaatcaagtaagaagttttgctcgcgcttatcaagccagaaattcatgtcaaaacacgaaacatcgatttcggtggcttgtatcttataaacctggctccaaaagatttagttatcaaatttcttgggaaggtaactcatcaaagagctctactatgttggcagaatttcaaaggaacaggattaaattctacggttcaagtggacgtctttcgataaaccgaaacggttttgtttctaaaatgacaataggaaaatgtttatatctcacagcaatttaaaaattaataactaattattataaaatcagtatgtcttgataacctccacatggtccactggtccacacccgttagcgcagaccagtgactaaatgttagggcaggtacctcgcaaatgcctcctgtaacttacccacttcatagacattagcatgtcttctacgctccgtataaacaccgtatccttgaagcattcttgataaccacttctgagtaataggcttgccgctgtaattatgctgaaaccattcgctgtcttgcttcatcacaagatagctaaggagttcggcagcgggtatctcagtcgacttgtgactctcgatcagcaatcgaatgtcagtcaacaactcggtcccctccgacagcgggttactctctttgttgtttacctctagttcgttgaatgccacttgcactctattaggccaatcatcccccaaaaaattggcgatttgaaacattggcttccaattatctactacgcggtctgaagctgtgcgaggaattctgacttctaattgtccaagacttttgccttcgtcgtctgcccaagaccttaaacattgtcgaagctcttcgttcttttcgaagtaatctattggtgttgtagccacggtttctgtaaccatctttctacgcatcttgattttgattgaacgactgagcaaagtatctttttgcgttcctatgcctgcaaatgcttgtggcgaccacactgatatttcgatggttttatgttttccgtcgtccgttggctctgtccttagtacgactgcggttctacgtgtatgccctgcattgatgatgccgtttagcgggtcattcccacgaattgtgatatcggcttcgtcaatcaatagggtcggcttatcgctctcgattatcctgtagaatgcagctggtgttatagaagcagccatccgtgcgttgtaagaaaatgcctccactaagcatagcaagctggtcttcccgcattccctctcaggggagttgatgtagagctttggataaagcgtccagttgtccattaagtaggtgccaacaatccataaggctattgcatcaggatgggtttcattctcaaaaacaatatgccgcctcagctcctgagctatgtagtcgactgtttgggagacgtttttagaagagtgttccattatgagttacctccactgcggtgcttccgcacgcattctgaaatccatgcttgaacgtcttcttctaaccagccgcttctgcactgactgatttttatggatttgggaaagttaccttcacgagccatgcgatgtagg

SEQ ID NO: 91 - DNA, 15871 bp, Artificial Sequence
  Synthetic Oligonucleotide
gtgcgagcaccggcgtcggggtcggtcctgacgttgacaacggcggcctgtccagcgcgtacggcggcggcggcccgctctaaagcagggcgaatctcatcgggcgcctcgacgtattcgccgtggcagccgagtgcctcggccataaggtcatagcggacatacccaaggtgacggccgggcttgacggactgcgggtcggcagtccagccgccgttcaggctgatgacgaccagcaccgcaagcttgtggcgaatagcggtgtctagctccatggcgttgaaaccaaaagagccgtcgccgtgcaccaccaccacctgcgtatctggccgcgcggccttggcgccgagtgcgaacggtaggccgacccccatcgtgccgaaggggccggagttgaggcggtgccctggcttgaaagtcgggatggactgccgcgcgaagttgagaatttcctggccgtcaaccaccagcacagcatcccggtcgatgaagtcacgaacttccttgcacaggcgttgcgggtggatcggcacggcttcggttgcgagcgccgcttccgccttggcgagcttgggctggtttgacgccgcgagctcgctcgtccaggcagcgtaacggccggcagacgacgatcccagcgcttcggaccactggcgcagcactgaggcgcaatcggcggtgatgcccagcgccaggcgcggcgcgatcatggcttcggcggggtcgatgtccacacgcacgaactgcgcatcggcggaaaagcggggcgcttcgccatggttccagatgtagttgagccgggtgccaaggacgatcacgagatcggcatccttgagagcgcgtgtgcggaccgcggggaacgacagcgcgtggtcgtcgggcaccacgccgcggccctgcggcgtcgtgtagaacggtatgccagccttctcgacaaaggcgcgcatcggagccgacgcacccgaccagataacgccgctgcctgaaataatgaccgggcgccgcgcttgagccagcaactccatcatgcgctcgacgctgtcctgcgtggcggcgggcgctgccaatgccatgaccgcatcaccgggccagacgatggcggcctcatccacatctttatagagcacatctcccggcaggtcgaggtaggcaggtccgcgcttaccgctcatggcctggaggtaagcggcggcgatcatttcgggaattcgcagagggttggtaacacgctcggcccatttcgttgcgggcttcatcaccgctacctggtcgatgtcctggaaggcacccttgccggactggccgatggggctggcaccgccgatcgcgataatgggcgcgcaatcaacgagggcgttcatcaggccagcggcaaggttgaccatgccggggcccgacgcggccatacagaatcccggcttgccggagacgcgggcataggcttgagccatgtatgcagcggcctgttcgtggcgcacatcgatcaggcgcatgccattggctatgcaggcgttgcctgcgccgtgggtcggcccacccatgaggaagaatccggtgtccaccccgaggcgggcgagggtgcgtcccacgagttcataggctttgatgatggtcatggtttcttcatgtggcgttgcattcacgtaatgtgcggatctcgtcctcgcccatgccgagcagctgctcgaaaacatagttattgtcggagcctagcaagggagccgccgtgactttcacattcgagtccgacatgcgcactggccagcctggcatggtgaaggtgccgcgcgtcgggtggtcgactgtggcgaaggcgcctcgattgcgcaggtcctcatcattgatgagctcctgcgtatcgaaggccgcgccggccggcacgccggcgtcgcccagagttttcattaccgtggccttatcgtgcctgagagtccattcgcgcacgatgggatcgatcacgtctcgatgcgcgaagcgcatgtcggcagtccctaggcgcgggtcgacggcgagctcggtcttgccgatgacctcgagcagcctcttccactggcggtcaccagcgcgagagacgtaaatgaagcagtagtcgttcgggccgccgcccttgcaggggtagagttcgctcggcgaggtgccgcccagcaagctctggttcccgttgcgcggcgtagtcttgtcgaacattagctgggcggcgaatgccatccgacaaaaattgatgacggcctcttgcatcgccacctgcacgcgctgaccgcggccggtgcgcatgcgctggtacaacgcggcgatgatgccgatactgcagtgcagtccagtgccggtgtcgccgatcgtcggcccgggcttgagcgggcggccgtcggattcaccggtaatcgacactgcgccgccgcaggcctgcgcgatcatgtcaaaggcagggtactcgccataagggctctcgggcgcgaagcccttgatctgcgcgtagacgatgcgcggattgatgcgcgccacctcctcgtaggagaagcccagtcgctcgatggtgccgggcgcgaaattctcaatgaagacgtccgagcgctcgataagccgcgtaaggattgccttgccttgcgggctcttaaggttcagcgtcatgctgcgcttgttggcattcagcaccatgaagaagtaggagtcagtgccgaacttggcggcggatgcgttgcgtgcttgctcgccggtgccaggcggctcgaccttgatgacttcagcgcccagccatgccaggctttgggtgcacgaggtgccggcctcgaactgggttaggtctagcacgcgcactccggcgagcgctgggtcggaatcaggaaggtcatcggcttgcggtgccgcagcggctgggtctcgtgcggtcatgaaaagtctccgacaatactggtaagtctgggttgcgggtcggcgtggatcatttctgcggctcggccttgatgttcgcttcagtgacgatcgcggtccacttggtgatgtctgacgcgacggtatcgcgcaagtcctcgggcgttccatgtgaaggcaccaggccgacctcgcggaacttcttctgcactgcggggctttcgagcacggtcttcatctcgcggttgagcgtgtcaatgatcgaccgcggcgtcccggctggtgcgaacagcccgaaccaggacacaaggtccagccccggaaggccttcctcgcgcagcgtgggcacgtcgggcagggacaggctgcggcgcggcgaggcgaccgccagggctcgcagcttgccggcggcgacgtgcggcgacgcaacggacacggagatgaaggtcgacggggtcgtgccggccaccacgtccatgatggccttgccgctgccgctgccgtagggaatgtgggtccaatccaggcccgccttcagtcgcaacagttcgctttgcaggtgggtggtgctaccgattccggtggaggcgtaagacagcttgcccgggtttgccttggtgtactggatcagctctttcatgttgcgtgcagggacggtcgggtgcaacgcgatgacgtactccacgtcggcgtaacgcgcgataggcgcgaagtccaggcgcgggttaaacggcagcggctgaagcaccggcaggatggaaaaagtgccgtcgtagctcgccacgagggtatagccgtcgggggccgcgcgggcagctatctgagcaccgatgctaccggttgcgccggggcggttgtcgacaacaaactgcgtcttgagccgctcgccgaggccttcggccaagatgcgcgtcgcggtgtcgatggagccgccggctccgaacggcacgatgaggcgcaccggcttgttcgggtaggcgccctgggctgacgcaaggcccgtagcgagcgtcgtagcaacaagcgccgcaagacccgtgaaaagcacgcggcggcggacggatggggtaaagggtttcaaatttatctccttgagttgttcgcctgtattaatcagttcacttcgacggctggcgttcgccagcaaacgccgtgtaaaggttggtctattgctccaccttgatgttggcgtccttgaccacctgggtccatttggcaaattccgacttgatgatggtgtcgaactcatctacgctgcccggagtcggctcgagagccaatgcctgcaggcggacgaccacgtcgggattgcgaatgacttcattggcggccttgttgaggcggtccaccaacgggcggggcgtgccggccggcgcgacgagaccgagccatgaggacgcttcgatacccccaataccggcctcctggaaagtcgggacgtcgggaagcagcagcgcgcgtttatcgctgaaaacacctatgcctttgagccgcccgtccctgatcatcggccccgcaactgacactgacaaaatcgctgagttgataaatccgccagccaaatcggtcagcgtctttgcgcctccgctggcgtagggcacgtgagtccaggccatgccggcccttgtacgtagcagctcaccggctaggtgcatggtattgcccacgccggtcgtgccgtaggtaatctcgcccggcttgaacttggactggtcgatgaattccttgatgttgttcgccttcaccgacgggtgggcgaccaccatgatgggtaggttcaccagcttggcgacgggttggaagtccttcactgggtgaaaggtaatcgacttgacaagggtcggcgccactaccaggttgccgtcgaatgcgagtagcagtgtatagccatcgggcttggcgcgagccaactctgtggtaccgatcgcgccgccggcgccgggcttgttctctatgaggatagttgcgttattcagcatcggacggaggcgttcagccataagtcgtgccacggcgtcacccgcaccaccagggccgaaaggcacgatcagccgaatcggcttgttgggatagctggcgatgtcgtcctgggcttggatgcctgccgaaagacaggaaagcaagatagcagccaggtgaggtaaccttttgagcggtgaagtaacatccatggctttgcccctctttattaacatgtacgtacaactatatcaactaaactaagttacataaaatagagtaaacccgcatataaaccaaacacccgtagttatacgtatcaataactcaagcagctcagccgcggaggattttggactgggccaggtagccggacgggtcgactctcgcgtcgatgagcgtcgggccacgcgtcgccagtgcagcggccagggcctcgcgaagctcctgcggcgtctcggcagaccatgcctgcaggccgaagccccgggcgattgcggcaaagtccggccgcggccagctgactccgttgcgcgaaagtttgcgtgactgttgcttgatgtcgatgagcgaaagggcggcgtcgttaaaaaccacgacacaaagccaggtgttgtactgcgctgcggtcgacagctcgccaacgcacatcatcagcccgccgtctccggtgaatgcaatgacggggcggtcgggcgagcggagcgcgcgggcgatgccagccggcagcgcgtagcccatcgtagagagcccgttggagatcagagtgtcgccttggcgctgcgtctgccagaatgccatcgccgaaaacatatgggcgccggcgtccaccgtcatcgccgcgtccagcaggccagcagccttgagcgcggcgcgcaccacctgctctggcgtcagcccgctgccgtcgccttcgtacgccaagcgcgtctcgaccgacgaacgcaggcgtttgaagtcgtcaagttgccactcgctttcagcgcgaactcccgccaccgccgcaagcgaggcatcaagcggtccgtggagcaccgcggccatttcaacgtagtgcaccgggtggcgcacgagagcgatttctaccacgggcgcggcgtagccccaaggcctgccgataagttccaccgggtccatgccgcacagtacgataaggtccgctgcgcacaagcactcgcgctcgaccgcgccgccagtgaacaagcccacgacatagggcgacgtgtcgggcagcacgcctttggccttataggttggcacaacggggcagcgccaccgcttggccaatgcctgcagttgtaacgcgacctccggagtgcgcgtttccagcccggcaacaatgactggcttgcgggcggcggttagcagttctcgcatgcgaacggaaggggggctgattaggggggccggcggcatggtggcgattcctgtgacggaaacctgccggcgggcgttttccccggtcagctcgatgaagccgggaccccagggggctgtgcgcatttttacaaccatgctttcgagctcggcttcaacgtcgtcagactcaaggcgcgacatggcacgcgtaagtgggcgcatcagggcctgctggtcgatgacttggtgcgtatcgaacatcgcctgccgcgccgaccagccatctgtcaagagcagcactggtgcgcgctcaaggtgtgcggttgccataccattggttgcgctcgctaggccaggtccctgtgtggcgatcaccacgccgatggagccggtggattctgcgtcagccgctgccattatggcagccgccgtctcggagcgcgctaggatgaagggcacgccaagcgcgcggaacgcctcgatcaggtctaagctgctgcccccgcccggcacgccgaacacccgcgccaccccatagcgcaggcatacccgcgcaatcacatccgccacactgttctctgtattttgcatggattgtattgttgtacgtacatgtattgcagtcaacatgcacaagggataataccgagatcaaaaaaataggttttagcgtcaaatctaatcgatgttctgcttatgatagaacaacttgtacgtactaattattccggtctaaacgaacaaccatgccaaacgcaactgccttgaacttccagaactacattgccggtcagcacgtcgcgcccacctcagcgcgcagctttgtctcgaccaacccgaccactggaaaaccttacggcaccttcgccgaatcgggtctggccgacgtcgacactgctgtgcgcgccgctgtggaggcaggtaatgggccttggggtaagctgtcgccaacgcggcgcggccgcctgatgatggcctggggagataagatcgcggaaaacgctgagggcatcgcccgcatggagagcgagcagaacggcaagctcgtcgctgagatgcgcgcccaggccaccgtggtgaaggagtggctgtattactttggcgggctggccgacaagatcgaaggccgtgtcatccccgtcgagcgacagagcgtgctgaactacacgctgcgcgagccgctgggtgtggtggcggtgattgtgccgtggaactcgccgaccttcctcaccatcatgagcgtagcgccggccctcgcggcgggcaacacgatcgtcatcaagccgtccgaagtaacctcggcatccgccttcgagttggtgcggctggccgaggaagcgggtatcccgcccggcgtgctcaacgtcgtcacaggcggccgcgaggcgggcgaggcgctcgtcgggcacgaaaaggtagccaaaatctcattcaccggcagcgagggggcgggccgcgccatcgccgcgcaggctggcggccggctcgccagctgcaccctcgagctcggcggcaagagtccaaacatcgtcttcggcgacgcgacggttgaaaatgccgtggttggcatactctcaggcatattcgcggctgcaggacagacctgcattgccggctcgcgtgcttacgtgcatgcaagcatctacgaggaagtggccgacaggctggccaagcgggcccgtgcaatcaagctaggtgacccgttgctagcggacacacagatggggccaatcgcgacacaggcacagctcgccaaggacgaggcgatggtgcagcgcgcggtgctcgaaggcgccgagctgctcacaggcggtaaccgcgtaagcgttccaggccttgagggtggctatttcttccagcccactatcctgcataacgtaaaacgagaaaattacatcatgcaggaggaggtgttcggcccggtgctgagcatcactcgcttcaacgacgacgacgaagtcctggcgctggccaacggcacgcgattcggcctagccgcggggctgtggacgcgcgacatccgccgcgcccaccagatggcaaagcgtctccaggctggcacagtgtggataaacacctaccgggcgctggccttcaattctccgttcggcggctacaagaacagcgggctgggccgggtcaacggcatcgagtcactcgagcagttcctgcaaaccaaaagcgtctggtgcgagatgagcgaggatatacaggacccgtttgtgattaaggtctgagcggcgtaatgcaaactcaggcaagcggtgtcctgcgccgcagtttcattgctagcgtgaagcggtcggctggatactggttgacggcgacctcggcgattttacgggtggttgtgaggtaggtacgccgaacttcgacgatcaccgcatccagctcaagcgcaagttcgacagccacgttctcgggcacgctgtaggcgttgatgacctgctcgacctccgcgattttctccccatacagatcttctatcagctcgtagatggcactgttgcgccggccaaccaatcggccgacgccggcgaagtcggtgtgaacgtagaccaccgtgcggcagaccggcttgttgttgttgtcctcataccgcaggccctctatgcgcagccagttttggccagcgataccgccaatgtttgtggctaacgtcgcgtcggccgctataacttcgctgctctccaccttatagcggatcgacgcagcgtactggatcaggtcattgatggattcgatctcctgtacgtaggtgctggccgcgctcggccgcgcaacggttgtgccagcaccctggcgggacgaaaccaggccatcgctgcgcagataacgcaacgcctctcgaactgtgtgtcgactaaccgaaaactgctgggatagcacgccctccgtcggcaactggctgcccacaggatatttgccacgcaaaatctcgtcgcgcaatgcgtctacgacctgctggtaaaggggtttgaaggatggaagattcaaccgcataaactaattcattataggtttttaacttgacccagcgctagggtatttttttagtttcgaacttgactaatggattagattttttaaaaactattatcaattcaaggacttaagcttacaagttgaaagcgctgaacaagctgacagagatattataaaaaaaagaaggatttagaacctgagctaaaagcagccgccttaatgatacttgaggcaatagatgattctgcttggtactacaaagcaggatttactgatgatggcagcgcaatgctttttcacaaaatgccgggcagattattaaagaaggtggcaaacagaaaagtagttgcatttataagtgctactttgtctatatctaacagctttgatgatttcaaccgagcaacggttatacaacaccaaagcaaactttctacaatcattgagcctttgcaccacggtaagctagggttttatgtgtcagatgttttagttaatacgtctgaatggttagatgtaattcaaaatatcatatctactgctagtgcgccaatcttagttgttactccaagccatgagcttgccaaaacactaggcgctgttatagaaaactcaacaataaggggcgcagaagagacggctagtcaagcagcatttcgtatgtgtgaaagtaaagtcttgattgctgctggtgcatgggcgggattagatactccaattccgtgggcatcaattgttattcctcgtgtaccgcatgataggccggtagtaattgagggaaatcacgaaagcagttttttagatatatgaaatactgctttgaggaggatgcgtcaagttattggacgcgggttacgatcgccagaagctgaatgtgacatctatatttgtgatgatcgatttaaaaacattgagtcatttgtgccaactagatttcgtactgcatgggttcacaaaggatttcttgaaggtagtcggcgtgaggttctactttccaaaattgagcgtgatgcttcagttcgtaaggaggctttaaagcagtttggtcatcaatgcatgtcctgcgtattcaagccaaaagtcatatctcagttggatgttcatcacttgtttccattgcatgagggagcgagccggactgaatttaatcatctagctgttttgtgtgccaactgtcaccggttcgctcactcaattgaaccgccactaacggttcaagctatgaagtcttttgaccctaaatgttaacttctctccgattggccttttagaaaatgctaacgatctaactactgtgcagcttggatcctcaagtggcttgtgtaagctcgtattactttatttatacgaaccatatgagatacgacacttagtatttgattgaggccaaaggtcgcaagctcgtttggttgaaccagtaactctaaacccaaaaaacatattttgttaaaatcagcacctaagcttagtagacaattaaggggtgttatgagcgacaaagtatcggtaaaacgagtcaaagaagagtgctccgctgagggtaaagctcagtaccttcaaactgccaacggaaagatcaaatgcctgcgctgcacagcccaatcaagcaggacaaaactacaatgcggcaggccagcaatcaaatcatcccgcacgcagaagtgccaatttcatggtggcaaacctcactctgaggagaccctgaaacgcatctcagaagcgaacaccatccacggtcaatccaccaaagcagcaaaagaacagaacagacatgacagtgccctaatgcatgagttggaggatgcaatcgcagtactaaagatgggtgaggggccgcggattagaggcccaaaacccaagggttacaagccggtaaggacacaggccgatgtggtgaggatgattcaggagcggttgttgcatatagtgtgatcgctcaaacgatgagctaaattttgtttaatagctaaccccatcatccagcaattctcacgcaagagtggtttgttgaaactaaatattcaatccatcgctttaaagccatcacaccgctgaagtagcatgacccaatcggttccgatataggcatctcgctcgcggatgcacaccttagattgctgccaatttttgcagtaccaaccattgacattaaccaaatgtctgcattcaaggcaactaattcggtcatcagcgccttgttcacggtctcgtatcaaaagcttgtcagccaatgcctctgacttctctgcgtccagcccacgacttttgtaccgagaaacccgtgcttgaaaaattgcaatttcatcggtattcattgcgctgctgttgggataacaccaaaggtttgaatagctttgtaaaccatcttgatcgctggaattgatcttctggctcaaaaaatcttcaattagctcctgattctgtactgacgaaactgacgaaagtcccgaatcaggggtttcgtcagttttgacagtacggttttgcacctcttttgcaaaaatcttaactgctcgatcagtccacgatttcatttacttgcgtccaacaaacgtggattgatgtaataacggactgttggtcgcccacttggtggagtgtcctcaaaactatgtacgtggttgtgttcttctaggattgcaagagcgccttcagcatcattaactgttgtagcgccagaccattgtttacgttgcaagtcacgcgcggtaaatccatctttcaatttcccctgaattagcctcttacttattctcctagccgtagcaacttttgctacttcaatcaatccataaatacgtcgcgcatgcccagccaagtattcacaccacgaagctgctctgatggcgcagaaagcactgactgcccctatggatccctctgcaaggtgcagtatcaatgctatggagcagaacagtttttcaaatttcccgaaatgctgttgcatcatcggatcttcttctttggctatataaattttgtgtagatcctcgcaccactcaataaagatggtttgtgcatcatcactaaagtaaaaatgcggcaatttcacaaaatcattggctggtgtagcaccatcctgaatgggatcaaagcttgcaagtcggctgaacatatccctaacggcttctcttgctcctttaacagggtatctatcgcgccattcccaagggactgcatttggatacaccatgacttggaaccgttgaatacgaccgtcgttatccaaggaattggaaatgctagtcaagtacctctgcattagctctggttgtatgcccccaaaaactgacaggcaaagattcttgataaatagactgcctcgtccaatacggtcgatgttgaatccggcagtgccgttccaaccctcaaggtaaaaagctttgtcagcctctcgaccttctttttcccatgatgccaataacccaatcaactcgtctcggtagaccagcataccttctggattattgaccagcatatcgccgagcttttcaattgttgagtcgtttgatttaaagcgtctgacgattggtttctctggaggctctaagtcttgcatcgcagttatggcatcagccatttttacgccatccttcttccctcttgcggcagttttcatggtacttttaaccgccccttgatgagcctcaaatgcagccaattcggcttcatatgtctttagtgcaatcgttagtttttcagcttcaagcgcttcaagtcgatcaaggaagcgagtcacggtgctcagtgcaggtgatttcttggaagaaggatcgcccacaataccgccgaataaattgggggtcacaatccaatcgtcttttcttttcggttttaacgcacatcgtgcaccaatcactgagccaagtgcaactatcaatgcagcagcaatgtagtccggggcacatggcattctgtcagcttcatccaaaacaaattcttccattgacttcggtagcagggcagatgaaataaattttggtgcttcgggaagctctgacttaatttctgtcggataagcccatccttcatgcttgtcatcgctatccgttaataaattcgtggctgcaataggcggctctaaaggctcttggtgtgaatcaaaattagtcatggcagtgctctttttttaaaaatgttctgtaacgcttcaaagtcgttggcgttgaatacgtgtccatctatccatgcaatgaagctgccgtccaaaaggatttggattggatagcctgcaaagaagaggccatgtttttcgttggcggaatatttacaacgcgggagaatgctgagataatttgcgatgtgatgtgtgtttccgaggcctcttgcgtgtccagcgcagggggctttttcgtatgggtggttcatttagactcagccttgtctaatgaatttgattgctcaataagccacgccctaaccaaacctacattccaagcggaaatgttcgggcctaatttttgaggtgggggaaatcgacccgctttaaccattctccaaagagttgcacggctgatgggaatcagcttccgactgttaggatctttgggattaccaataagctgacgttcgcgcagaaatccgcaatctgggcattcattgaaccaatttggcgagacggcttgtgtcatgaagactccttttgaaatagctttgcgctattaaaaatgagtcctatagcaaagtctaagtagagtgcgcgcgcactacttgccgtttgatttttcttttaggtacatggtgatcattttgcgaatttgatcaaaacccaaagggacaatctgattttcgcaagcttcatacgccgcatcatcaagtgttttgtgatttttgagattaaagtcaagccattgaaataacttattttttttctcaagcgacgattttttttgtatgtcattacttgcatatgctctgccacttgcaaatatggtctcccatttttcttcattaagtattgcggtagtgcatgcttgtaaattaagatttttaacatcttctgtgatcgtattgttctcaacaagaatatctagaactgcaacagccttactttcagccgccatccaaattgcaagctttttaacaccctccgaattctttttgggttttctcatgctgcagatttgaaggttaatactttgccaccaattgctaactgatccagataattagcccatctctgcatcatttttttccgctcttctaagtgagaggtcctgttgtacgccctcccatttacgtcttttactgcgtgtgcaagttgatgctcaataagatgcgctgggaatccaagttgctcatcaagcatggttcttgcactagcccgaaagccgtgtgctctgtgcaaacttccatcgtagccaattgagttaagtgcagcattcagcgtgttttcactgattggcctaccttcgccctttgttgatggaaaagctagtttatggtgacctgtaatcaaactaagttgggtcaataagacaactgcctgagtgctgaggggcacgatgtggtcatttgacattttcatgcgatgcccgggaatcgaccaagtggccttttctagatctacctctgtccactccattgcccgcagttcacccggcctcacaaacaccattggcgaaagttgcagagccgctttggtaaccaagtgaccttcatagccagcaattgcacgaagtaatccaccaaatacttttgggtcggttatggcggcgtggtgtttggttggcttactcttaaatgtgtctgggccttgcagttcataagttgggtctctttctactaaagcctctctgacggcaaacttcatgatcctagaaatgatttgctttaccctgagtacagagtcatataccccccgagcctccatcttacgaagcgcaaccaatatgtcagtagtcttgatttcactaataggtaggttacctaattgaggcattacgtcacgactaagccaacttttaagtttggcatctgtattggccttacgttgtgaggctgtagtctctagccacttttgtgcgactgattgaaacgtattgtcatgtttctgcttggcaacggcctttgccttgcgtttggcaaccgatgggtcttgatcgtttgctagtagtgttcttgcttcagcgcgtttgcttcgggccattgccaaagttgtgtcgggaaatacgccaagagcaagtgttttgtattttcctagaaagcggtagtcaaagcgccaatatttttgccctgcatccgtaacaagtaaatacatcccctcgccatcggagtgtcttccgggcttggcatttttgactgctgttgctgttaatttcatctcgcccccgaagtgtcggtatgtccgcattcagtagaagttcatgccgacatttgtaccgacaaaatgtcggtatgtactgatccaagatgatacagcttgaaatagaagaaaagctaaaatctcaataaaaacaatgatcttaagacggcgtgagacgtgttaaggatgctttctggtgcctccgacaggaatcgaacctgtatctagcgcttaggaggcgctcgttctatccattgaactacggcggcggaggctgaattttagccttcaaacccgtccacaatggcaatgtgaccttccgaattgttgattcgatcgggcaagatggcttggtattcgggactgtggtgccaagtttctgcagcttcgcgactc

SEQ ID NO: 92 - DNA, 15746 bp, Artificial Sequence
  Synthetic Oligonucleotide
  misc_feature (1)..(8507): n is a, c, g, or t
nnnnnnnnnnnnnnnnnnnnnnnnnnnnnnnnnnnnnnnnnnnnnnnnnnnnnnnnnnnnnnnnnnnnnnnnnnnnnnnnnnnnnnnnnnnnnnnnnnnnnnnnnnnnnnnnnnnnnnnnnnnnnnnnnnnnnnnnnnnnnnnnnnnnnnnnnnnnnnnnnnnnnnnnnnnnnnnnnnnnnnnnnnnnnnnnnnnnnnnnnnnnnnnnnnnnnnnnnnnnnnnnnnnnnnnnnnnnnnnnnnnnnnnnnnnnnnnnnnnnnnnnnnnnnnnnnnnnnnnnnnnnnnnnnnnnnnnnnnnnnnnnnnnnnnnnnnnnnnnnnnnnnnnnnnnnnnnnnnnnnnnnnnnnnnnnnnnnnnnnnnnnnnnnnnnnnnnnnnnnnnnnnnnnnnnnnnnnnnnnnnnnnnnnnnnnnnnnnnnnnnnnnnnnnnnnnnnnnnnnnnnnnnnnnnnnnnnnnnnnnnnnnnnnnnnnnnnnnnnnnnnnnnnnnnnnnnnnnnnnnnnnnnnnnnnnnnnnnnnnnnnnnnnnnnnnnnnnnnnnnnnnnnnnnnnnnnnnnnnnnnnnnnnnnnnnnnnnnnnnnnnnnnnnnnnnnnnnnnnnnnnnnnnnnnnnnnnnnnnnnnnnnnnnnnnnnnnnnnnnnnnnnnnnnnnnnnnnnnnnnnnnnnnnnnnnnnnnnnnnnnnnnnnnnnnnnnnnnnnnnnnnnnnnnnnnnnnnnnnnnnnnnnnnnnnnnnnnnnnnnnnnnnnnnnnnnnnnnnnnnnnnnnnnnnnnnnnnnnnnnnnnnnnnnnnnnnnnnnnnnnnnnnnnnnnnnnnnnnnnnnnnnnnnnnnnnnnnnnnnnnnnnnnnnnnnnnnnnnnnnnnnnnnnnnnnnnnnnnnnnnnnnnnnnnnnnnnnnnnnnnnnnnnnnnnnnnnnnnnnnnnnnnnnnnnnnnnnnnnnnnnnnnnnnnnnnnnnnnnnnnnnnnnnnnnnnnnnnnnnnnnnnnnnnnnnnnnnnnnnnnnnnnnnnnnnnnnnnnnnnnnnnnnnnnnnnnnnnnnnnnnnnnnnnnnnnnnnnnnnnnnnnnnnnnnnnnnnnnnnnnnnnnnnnnnnnnnnnnnnnnnnnnnnnnnnnnnnnnnnnnnnnnnnnnnnnnnnnnnnnnnnnnnnnnnnnnnnnnnnnnnnnnnnnnnnnnnnnnnnnnnnnnnnnnnnnnnnnnnnnnnnnnnnnnnnnnnnnnnnnnnnnnnnnnnnnnnnnnnnnnnnnnnnnnnnnnnnnnnnnnnnnnnnnnnnnnnnnnnnnnnnnnnnnnnnnnnnnnnnnnnnnnnnnnnnnnnnnnnnnnnnnnnnnnnnnnnnnnnnnnnnnnnnnnnnnnnnnnnnnnnnnnnnnnnnnnnnnnnnnnnnnnnnnnnnnnnnnnnnnnnnnnnnnnnnnnnnnnnnnnnnnnnnnnnnnnnnnnnnnnnnnnnnnnnnnnnnnnnnnnnnnnnnnnnnnnnnnnnnnnnnnnnnnnnnnnnnnnnnnnnnnnnnnnnnnnnnnnnnnnnnnnnnnnnnnnnnnnnnnnnnnnnnnnnnnnnnnnnnnnnnnnnnnnnnnnnnnnnnnnnnnnnnnnnnnnnnnnnnnnnnnnnnnnnnnnnnnnnnnnnnnnnnnnnnnnnnnnnnnnnnnnnnnnnnnnnnnnnnnnnnnnnnnnnnnnnnnnnnnnnnnnnnnnnnnnnnnnnnnnnnnnnnnnnnnnnnnnnnnnnnnnnnnnnnnnnnnnnnnnnnnnnnnnnnnnnnnnnnnnnnnnnnnnnnnnnnnnnnnnnnnnnnnnnnnnnnnnnnnnnnnnnnnnnnnnnnnnnnnnnnnnnnnnnnnnnnnnnnnnnnnnnnnnnnnnnnnnnnnnnnnnnnnnnnnnnnnnnnnnnnnnnnnnnnnnnnnnnnnnnnnnnnnnnnnnnnnnnnnnnnnnnnnnnnnnnnnnnnnnnnnnnnnnnnnnnnnnnnnnnnnnnnnnnnnnnnnnnnnnnnnnnnnnnnnnnnnnnnnnnnnnnnnnnnnnnnnnnnnnnnnnnnnnnnnnnnnnnnnnnnnnnnnnnnnnnnnnnnnnnnnnnnnnnnnnnnnnnnnnnnnnnnnnnnnnnnnnnnnnnnnnnnnnnnnnnnnnnnnnnnnnnnnnnnnnnnnnnnnnnnnnnnnnnnnnnnnnnnnnnnnnnnnnnnnnnnnnnnnnnnnnnnnnnnnnnnnnnnnnnnnnnnnnnnnnnnnnnnnnnnnnnnnnnnnnnnnnnnnnnnnnnnnnnnnnnnnnnnnnnnnnnnnnnnnnnnnnnnnnnnnnnnnnnnnnnnnnnnnnnnnnnnnnnnnnnnnnnnnnnnnnnnnnnnnnnnnnnnnnnnnnnnnnnnnnnnnnnnnnnnnnnnnnnnnnnnnnnnnnnnnnnnnnnnnnnnnnnnnnnnnnnnnnnnnnnnnnnnnnnnnnnnnnnnnnnnnnnnnnnnnnnnnnnnnnnnnnnnnnnnnnnnnnnnnnnnnnnnnnnnnnnnnnnnnnnnnnnnnnnnnnnnnnnnnnnnnnnnnnnnnnnnnnnnnnnnnnnnnnnnnnnnnnnnnnnnnnnnnnnnnnnnnnnnnnnnnnnnnnnnnnnnnnnnnnnnnnnnnnnnnnnnnnnnnnnnnnnnnnnnnnnnnnnnnnnnnnnnnnnnnnnnnnnnnnnnnnnnnnnnnnnnnnnnnnnnnnnnnnnnnnnnnnnnnnnnnnnnnnnnnnnnnnnnnnnnnnnnnnnnnnnnnnnnnnnnnnnnnnnnnnnnnnnnnnnnnnnnnnnnnnnnnnnnnnnnnnnnnnnnnnnnnnnnnnnnnnnnnnnnnnnnnnnnnnnnnnnnnnnnnnnnnnnnnnnnnnnnnnnnnnnnnnnnnnnnnnnnnnnnnnnnnnnnnnnnnnnnnnnnnnnnnnnnnnnnnnnnnnnnnnnnnnnnnnnnnnnnnnnnnnnnnnnnnnnnnnnnnnnnnnnnnnnnnnnnnnnnnnnnnnnnnnnnnnnnnnnnnnnnnnnnnnnnnnnnnnnnnnnnnnnnnnnnnnnnnnnnnnnnnnnnnnnnnnnnnnnnnnnnnnnnnnnnnnnnnnnnnnnnnnnnnnnnnnnnnnnnnnnnnnnnnnnnnnnnnnnnnnnnnnnnnnnnnnnnnnnnnnnnnnnnnnnnnnnnnnnnnnnnnnnnnnnnnnnnnnnnnnnnnnnnnnnnnnnnnnnnnnnnnnnnnnnnnnnnnnnnnnnnnnnnnnnnnnnnnnnnnnnnnnnnnnnnnnnnnnnnnnnnnnnnnnnnnnnnnnnnnnnnnnnnnnnnnnnnnnnnnnnnnnnnnnnnnnnnnnnnnnnnnnnnnnnnnnnnnnnnnnnnnnnnnnnnnnnnnnnnnnnnnnnnnnnnnnnnnnnnnnnnnnnnnnnnnnnnnnnnnnnnnnnnnnnnnnnnnnnnnnnnnnnnnnnnnnnnnnnnnnnnnnnnnnnnnnnnnnnnnnnnnnnnnnnnnnnnnnnnnnnnnnnnnnnnnnnnnnnnnnnnnnnnnnnnnnnnnnnnnnnnnnnnnnnnnnnnnnnnnnnnnnnnnnnnnnnnnnnnnnnnnnnnnnnnnnnnnnnnnnnnnnnnnnnnnnnnnnnnnnnnnnnnnnnnnnnnnnnnnnnnnnnnnnnnnnnnnnnnnnnnnnnnnnnnnnnnnnnnnnnnnnnnnnnnnnnnnnnnnnnnnnnnnnnnnnnnnnnnnnnnnnnnnnnnnnnnnnnnnnnnnnnnnnnnnnnnnnnnnnnnnnnnnnnnnnnnnnnnnnnnnnnnnnnnnnnnnnnnnnnnnnnnnnnnnnnnnnnnnnnnnnnnnnnnnnnnnnnnnnnnnnnnnnnnnnnnnnnnnnnnnnnnnnnnnnnnnnnnnnnnnnnnnnnnnnnnnnnnnnnnnnnnnnnnnnnnnnnnnnnnnnnnnnnnnnnnnnnnnnnnnnnnnnnnnnnnnnnnnnnnnnnnnnnnnnnnnnnnnnnnnnnnnnnnnnnnnnnnnnnnnnnnnnnnnnnnnnnnnnnnnnnnnnnnnnnnnnnnnnnnnnnnnnnnnnnnnnnnnnnnnnnnnnnnnnnnnnnnnnnnnnnnnnnnnnnnnnnnnnnnnnnnnnnnnnnnnnnnnnnnnnnnnnnnnnnnnnnnnnnnnnnnnnnnnnnnnnnnnnnnnnnnnnnnnnnnnnnnnnnnnnnnnnnnnnnnnnnnnnnnnnnnnnnnnnnnnnnnnnnnnnnnnnnnnnnnnnnnnnnnnnnnnnnnnnnnnnnnnnnnnnnnnnnnnnnnnnnnnnnnnnnnnnnnnnnnnnnnnnnnnnnnnnnnnnnnnnnnnnnnnnnnnnnnnnnnnnnnnnnnnnnnnnnnnnnnnnnnnnnnnnnnnnnnnnnnnnnnnnnnnnnnnnnnnnnnnnnnnnnnnnnnnnnnnnnnnnnnnnnnnnnnnnnnnnnnnnnnnnnnnnnnnnnnnnnnnnnnnnnnnnnnnnnnnnnnnnnnnnnnnnnnnnnnnnnnnnnnnnnnnnnnnnnnnnnnnnnnnnnnnnnnnnnnnnnnnnnnnnnnnnnnnnnnnnnnnnnnnnnnnnnnnnnnnnnnnnnnnnnnnnnnnnnnnnnnnnnnnnnnnnnnnnnnnnnnnnnnnnnnnnnnnnnnnnnnnnnnnnnnnnnnnnnnnnnnnnnnnnnnnnnnnnnnnnnnnnnnnnnnnnnnnnnnnnnnnnnnnnnnnnnnnnnnnnnnnnnnnnnnnnnnnnnnnnnnnnnnnnnnnnnnnnnnnnnnnnnnnnnnnnnnnnnnnnnnnnnnnnnnnnnnnnnnnnnnnnnnnnnnnnnnnnnnnnnnnnnnnnnnnnnnnnnnnnnnnnnnnnnnnnnnnnnnnnnnnnnnnnnnnnnnnnnnnnnnnnnnnnnnnnnnnnnnnnnnnnnnnnnnnnnnnnnnnnnnnnnnnnnnnnnnnnnnnnnnnnnnnnnnnnnnnnnnnnnnnnnnnnnnnnnnnnnnnnnnnnnnnnnnnnnnnnnnnnnnnnnnnnnnnnnnnnnnnnnnnnnnnnnnnnnnnnnnnnnnnnnnnnnnnnnnnnnnnnnnnnnnnnnnnnnnnnnnnnnnnnnnnnnnnnnnnnnnnnnnnnnnnnnnnnnnnnnnnnnnnnnnnnnnnnnnnnnnnnnnnnnnnnnnnnnnnnnnnnnnnnnnnnnnnnnnnnnnnnnnnnnnnnnnnnnnnnnnnnnnnnnnnnnnnnnnnnnnnnnnnnnnnnnnnnnnnnnnnnnnnnnnnnnnnnnnnnnnnnnnnnnnnnnnnnnnnnnnnnnnnnnnnnnnnnnnnnnnnnnnnnnnnnnnnnnnnnnnnnnnnnnnnnnnnnnnnnnnnnnnnnnnnnnnnnnnnnnnnnnnnnnnnnnnnnnnnnnnnnnnnnnnnnnnnnnnnnnnnnnnnnnnnnnnnnnnnnnnnnnnnnnnnnnnnnnnnnnnnnnnnnnnnnnnnnnnnnnnnnnnnnnnnnnnnnnnnnnnnnnnnnnnnnnnnnnnnnnnnnnnnnnnnnnnnnnnnnnnnnnnnnnnnnnnnnnnnnnnnnnnnnnnnnnnnnnnnnnnnnnnnnnnnnnnnnnnnnnnnnnnnnnnnnnnnnnnnnnnnnnnnnnnnnnnnnnnnnnnnnnnnnnnnnnnnnnnnnnnnnnnnnnnnnnnnnnnnnnnnnnnnnnnnnnnnnnnnnnnnnnnnnnnnnnnnnnnnnnnnnnnnnnnnnnnnnnnnnnnnnnnnnnnnnnnnnnnnnnnnnnnnnnnnnnnnnnnnnnnnnnnnnnnnnnnnnnnnnnnnnnnnnnnnnnnnnnnnnnnnnnnnnnnnnnnnnnnnnnnnnnnnnnnnnnnnnnnnnnnnnnnnnnnnnnnnnnnnnnnnnnnnnnnnnnnnnnnnnnnnnnnnnnnnnnnnnnnnnnnnnnnnnnnnnnnnnnnnnnnnnnnnnnnnnnnnnnnnnnnnnnnnnnnnnnnnnnnnnnnnnnnnnnnnnnnnnnnnnnnnnnnnnnnnnnnnnnnnnnnnnnnnnnnnnnnnnnnnnnnnnnnnnnnnnnnnnnnnnnnnnnnnnnnnnnnnnnnnnnnnnnnnnnnnnnnnnnnnnnnnnnnnnnnnnnnnnnnnnnnnnnnnnnnnnnnnnnnnnnnnnnnnnnnnnnnnnnnnnnnnnnnnnnnnnnnnnnnnnnnnnnnnnnnnnnnnnnnnnnnnnnnnnnnnnnnnnnnnnnnnnnnnnnnnnnnnnnnnnnnnnnnnnnnnnnnnnnnnnnnnnnnnnnnnnnnnnnnnnnnnnnnnnnnnnnnnnnnnnnnnnnnnnnnnnnnnnnnnnnnnnnnnnnnnnnnnnnnnnnnnnnnnnnnnnnnnnnnnnnnnnnnnnnnnnnnnnnnnnnnnnnnnnnnnnnnnnnnnnnnnnnnnnnnnnnnnnnnnnnnnnnnnnnnnnnnnnnnnnnnnnnnnnnnnnnnnnnnnnnnnnnnnnnnnnnnnnnnnnnnnnnnnnnnnnnnnnnnnnnnnnnnnnnnnnnnnnnnnnnnnnnnnnnnnnnnnnnnnnnnnnnnnnnnnnnnnnnnnnnnnnnnnnnnnnnnnnnnnnnnnnnnnnnnnnnnnnnnnnnnnnnnnnnnnnnnnnnnnnnnnnnnnnnnnnnnnnnnnnnnnnnnnnnnnnnnnnnnnnnnnnnnnnnnnnnnnnnnnnnnnnnnnnnnnnnnnnnnnnnnnnnnnnnnnnnnnnnnnnnnnnnnnnnnnnnnnnnnnnnnnnnnnnnnnnnnnnnnnnnnnnnnnnnnnnnnnnnnnnnnnnnnnnnnnnnnnnnnnnnnnnnnnnnnnnnnnnnnnnnnnnnnnnnnnnnnnnnnnnnnnnnnnnnnnnnnnnnnnnnnnnnnnnnnnnnnnnnnnnnnnnnnnnnnnnnnnnnnnnnnnnnnnnnnnnnnnnnnnnnnnnnnnnnnnnnnnnnnnnnnnnnnnnnnnnnnnnnnnnnnnnnnnnnnnnnnnnnnnnnnnnnnnnnnnnnnnnnnnnnnnnnnnnnnnnnnnnnnnnnnnnnnnnnnnnnnnnnnnnnnnnnnnnnnnnnnnnnnnnnnnnnnnnnnnnnnnnnnnnnnnnnnnnnnnnnnnnnnnnnnnnnnnnnnnnnnnnnnnnnnnnnnnnnnnnnnnnnnnnnnnnnnnnnnnnnnnnnnnnnnnnnnnnnnnnnnnnnnnnnnnnnnnnnnnnnnnnnnnnnnnnnnnnnnnnnnnnnnnnnnnnnnnnnnnnnnnnnnnnnnnnnnnnnnnnnnnnnnnnnnnnnnnnnnnnnnnnnnnnnnnnnnnnnnnnnnnnnnnnnnnnnnnnnnnnnnnnnnnnnnnnnnnnnnnnnnnnnnnnnnnnnnnnnnnnnnnnnnnnnnnnnnnnnnnnnnnnnnnnnnnnnnnnnnnnnnnnnnnnnnnnnnnnnnnnnnnnnnnnnnnnnnnnnnnnnnnnnnnnnnnnnnnnnnnnnnnnnnnnnnnnnnnnnnnnnnnnnnnnnnnnnnnnnnnnnnnnnnnnnnnnnnnnnnnnnnnnnnnnnnnnnnnnnnnnnnnnnnnnnnnnnnnnnnnnnnnnnnnnnnnnnnnnnnnnnnnnnnnnnnnnnnnnnnnnnnnnnnnnnnnnnnnnnnnnnnnnnnnnnnnnnnnnnnnnnnnnnnnnnnnnnnnnnnnnnnnnnnnnnnnnnnnnnnnnnnnnnnnnnnnnnnnnnnnnnnnnnnnnnnnnnnnnnnnnnnnnnnnnnnnnnnnnnnnnnnnnnnnnnnnnnnnnnnnnnnnnnnnnnnnnnnnnnnnnnnnnnnnnnnnnnnnnnnnnnnnnnnnnnnnnnnnnnnnnnnnnnnnnnnnnnnnnnnnnnnnnnnnnnnnnnnnnnnnnnnnnnnnnnnnnnnnnnnnnnnnnnnnnnnnnnnnnnnnnnnnnnnnnnnnnnnnnnnnnnnnnnnnnnnnnnnnnnnnnnnnnnnnnnnnnnnnnnnnnnnnnnnnnnnnnnnnnnnnnnnnnnnnnnnnnnnnnnnnnnnnnnnnnnnnnnnnnnnnnnnnnnnnnnnnnnnnnnnnnnnnnnnnnnnnnnnnnnnnnnnnnnnnnnnnnnnnnnnnnnnnnnnnnnnnnnnnnnnnnnnnnnnnnnnnnnnnnnnnnnnnnnnnnnnnnnnnnnnnnnnnnnnnnnnnnnnnnnnnnnnnnnnnnnnnnnnnnnnnnnnnnnnnnnnnnnnnnnnnnnnnnnnnnnnnnnnnnnnnnnnnnnnnnnnnnnnnnnnnnnnnnnnnnnnnnnnnnnnnnnnnnnnnnnnnnnnnnnnnnnnnnnnnnnnnnnnnnnnnnnnnnnnnnnnnnnnnnnnnnnnnnnnnnnnnnnnnnnnnnnnnnnnnnnnnnnnnnnnnnnnnnnnnnnnnnnnnnnnnnnnnnnnnnnnnnnnnnnnnnnnnnnnnnnnnnnnnnnnnnnnnnnnnnnnnnnnnnnnnnnnnnnnnnnnnnnnnnnnnnnnnnnnnnnnnnnnnnnnnnnnnnnnnnnnnnnnnnnnnnnnnnnnnnnnnnnnnnnnnnnnnnnnnnnnnnnnnnnnnnnnnnnnnnnnnnnnnnnnnnnnnnnnnnnnnnnnnnnnnnnnnnnaggtggcaggcagctttgacgtgctgcgcgacggcgtgctgatccggcgcatcagcgtgggcggctggaagccggcgcagatgaccgagttcgccgctgcggcgtgaggaaaattgcgacttcttgcgggcgcgaagagccgattgcgctaggcaatcagaggcttgcagcgcctcgggtcaagccacccctcgtttgggtggctactggaactccctgcaaaggactcccgcatcatggacaggtcaagccacccctcgtttgggtggctactggaacaacttctggaaacgaacggacacgttgcggggtcaagccacccctcgtttgggtggctactggaaccggatgccgaaggtccaagtgcccgccgccggtcaagccacctcgttcgggtggctactggaactcgccgcgtcttgctgcctgccgtctctggggtcaagccacccctcgtttgggtggctactggaacgacgccgaggtgcagtccctcatcctcaccggtcaagccacccctcgtttgggtggctactggaacaagctggctagcgaggaatggttgaagaacggtcaagccacccctcgtttgggtggctactggaaccgcgagcggatcgtccacggttcggcagcgggtcaagccacccctcgtttgggtggctactggaaccagttattgaagcgggtccgtggctcgcgcaatcaagccacctctcgtttaggtggctactggaactccatcaggccgacgtgcgtgaccgtgcccgatcaagccacccctcgtttgggtggctactggaactcgtcggcgagaatgacggtgatgctgttgagtcaagccacccctcgtttgggtggctactggaactacctgcaagaccgcaccgaggccccggccagtcaagccacccctcgtttgggtggctactggaactgggcgtactgaaacgcctcttgcgcctcgggtcaagccacccctcgtttgggtggctactggaacgacaagctcgccgccgccgctgaagcgcagggtcaagccacccctcgtttgggtggttactggaactgcacgatgcgttgccgctgctcttgctcgggtcaagccacccctcgtttgggtggctacttgaagttcgcttcggcgtcttcgtcggaggcatccgctcaagccacccctcgtttgggtggctactggaacgaggccaacgaactcatgcgtcacgtcgagggtcaagccacccctcgtttgggtggctactggaagaagggcgtcaactggttgcgccgcgcgaccgcctaagccaccgcattggtgcgtggctactgtgcacgtccggcttgctaacaggtgttagcaagtccgaaggcatcgctaggacgacgcccccgtgggcgcaccgcgcggtgatcactggccagccctacaacggccggcatgatcgggtagcgcaggacgctgcgcgatcaagggcaaggagactgggcatccgtgtttcgcaccactgagcaggccaacttcgcaaacgtgatggcggcgcatctgcccgcgcccgatgcacccctgctgctcgaagggggcgtgggcatcggcaagacgcgcgcctacctgcacgctgccgtgcagtcgggccagcggattgcggtcgtcgtgcccacgcaccagctcatcgaccagttgctcgcctcggccgacctgacagccgtgcgcggcgaggccacagtggcggccttccggccggcgcggatgttcgagcggcggcgcgagtacgaagagcagcgcgaggccgccgcccacgcgcagatcatggtgtgcacggcggcctcggtggtgatcgatcagcgcctcgccggcgaatacaacggctcgaccaccgcgcgcgactacctgatcttcgacgaggccgaccagttgcccgacatggcggcgctgcagtcggatctggcaatcagtcgcgccgacctcgacgccgccggcatccgctttaccacggtggaagacacactgcgccgcctggccgacaaggcgccgcgcaccgtcgagcccgaggtgcgcgccgcggcgcgcgtgatgatcgaggttctggccgagcctcgctggttccagaaggtggggctggacgaggacggcgccatcgtgctcacgcacaagctgccgggtcgcctgctcaagaaggtggccaaccggccgggcgtggcctttgtgtcggccacgctcacggtggcgggtcgcttcgacgacttccgcaacaccatgggcatcgggccgatctcgcggctctcgacggtgatcgagccgcagcagcacgggcgcctgagctttcgcatcgatccgcagaccgtggacacgcccgagtggatcgaggccacggtggcggccatcaaggcggcaccgcggccctgcctggtggcgaccaccagccacgacctgtcggcacggctaggggagagggtgcccggcgccatcgtgcgcgacgccgatgttcccgcccgcaccgccgccgagcaggccgagggcggggtgctgatcagcgccggcgcctgggcggggctggatacgccaacccgctggcgggccatcgtcgtgccgcgcgtgccctacggccagccggtggtcatcgatgggcagatcgagtcaagctacctcgacgcccgcaacaccgccgtgcgccggctaaggcaggtgatcggccgcggactgcgcacccccgatgcggtgtgcgaggtcaccctgctcgacgcgcgcgccgagcgcctgcccgagttcgtgccggtgcggttccgggcggcgtggagcactagagtgttcattgagggcgctcgcactgaggtcatgctcagcaaggccgagcgtgacccggcactgcgtcgggccgcgctgagtcggtacggccaccgttgtcaggcctgcagtttcgttcccaccgttctgggacagcttgacgtgcaccacaagagtcccatcaaggagggggaacgcaagacgcgccttgaggatgtggctgtgctgtgcgccaactgccaccggctggcgcatgctgaggatccccctgttccggtcgagaggcttgccgagttgacgcgagacacgcgctagcggtgtgtgctcgttaggcttggctggcaagagacgtgccttagagaaagctcgcttgaccaagtggagtcatggttgggcgccttggtctcggccagcctcggctagatcccatcgaacactcacctgaagtgctctcagagatgaatgaacttgacctgcaaggcgctgattcgaaggttggtgacaccgaagaagcgcgaggaatcgaactgcgctttgaggccgacccgacagtcaattacgcatcagtgcagaacagtgttccgatcggcaggcgcctggatatccagaacaagaccgaccacgccgcggtgaacgtcttggtgaccgtgaagccggccacaccattcgcgcaatcaaaaaagttcctgttcgagcaccttgcccctggggagacgcggcgcgtagatgtcgtcaaccttccgccggagccggcttatctcgctgcgctcgtggacgcagagcgctcccacatcgattgcgtggcaaccgaaggggagggcggacggacgctcgcgaccgcgcgagtcgatgtggacgtgctcgctgccaatcagtgggcaggcctgcgcgccttgccgtctctgctggcggccttcagccagccgaacattcctctcatcgagggcatcctgcgggatgcgtccgagcggctaaggaaagtgagcagcggcgcgtccctgaacgcctaccagtcgagtaaccgggaggccgtctggctgcagttgtcggccatctactccgctgtcgccgcgctcgacgtccagtacagccaggcgccggccagcttcgaggccgaagggcagaaaatccgcggcagcgagcagatcctgcaaagccgactagccaactgcctggacctgagcatgctgctcgcagcatgcctggagcaagccgggctgcacccggtggtgctgctgagcaagggccacgcgtggctggggtgctggctgaccgatacctacttcgccacgaccgttgtcgatgacgctcaggcggtccgcaagcggatagacactggggagttcattaccttcgagtgcaccggcgtcacgactcagcccaagctccggctcaagacggcggtgaacaagggcgccgagaacctcgccagcgaggagtttggctacgccatcgacgttcgacgctgcagggaggagcaggttcgtcccctgccttcccgctcggaattcttgcagtccgtgactgccaatgtcgacaccgaggaactggaggtcgagcctgctcccgcgctgccgccactagaggtcggtgaaccgattgtcattggagacgacacgccgcaggggcgcctggcgcgttggaaggcgaagctcctggacatgacgctgcgcaatcgcctgctgaacttcaagaaatcaaagagcaatctggaacttgtcgttcacgacgttgcggcgctcgaggatcgcctagctagcgggaaagagttgagcttcaagccctacccgaaggtgatggagggcgccgacccgcgcgatgcgaccgtctatgccagtcgacacggcgcggaggcaatcgccaatttcgtgcgtgacgctcttgacaagggcgagttggtcacgcgagcttccgaggagaagttcgagaaccaactgctggatctgtttcgggcggccagaaccgggatcgaggagagcggcgcgaacgcgcttcacctggcgatcggcatgctgcagtggacggagaccgacacggcggagcgaaagctcatggcaccgatactgatgttgcctgtgagcttgactcggtcctcggtgcgttctggcttcaagctcggcagcactgacgacgagccgttcatcaatccgaccttgctgcagttactggccgagcagttcgacattcggatcgatgtggcgaggttgctgcctcaagacgccgcaggaatcgacgtggagcgcgtcctgcaggcgtttcgcctggccatcagggagtacaagggctgggaggtcaaggccgaggttcaccttggcatgttctcgttcgctaagttcgtgatgtggcgggacttggagtcgcgcttggatgacctgaccaggaatcgggtggtcaagcacctgctgcacactcccggccaagaattcgcgggagagcgcgcagacatcacagagaccgatctggacgacaggttttcacctagccagatccttgcacccttgctcgcggactcgtcccagctggcggccctcgccaaggcaggggcagggatggatctcgtcatcatcggccctcccggctgcggcaagacccaggttctggccaacgcagtggcacatctcatcgcggagggtaagaaggttctggtgtgctccgagaaggcggctgcactcgaagttcttcagaggcgcctggtacagatcggcctggggccctttgtgctcgaactccactcgtcgaaggccaacaaggttggcgtgctgaagcagctcgaggaggcgctccatcaagccggtcagcttccgacggaccgctggcaggccgaggctgaacacttggcgggactgcgcgacactctcaacggcgttgtcagggcactgcacaagcgccgtcgctcgggactgacagtgttcgaggcgaccgggactgtggttgctgccggtcagcgcaagccctcgcagttcgactggcctgatgccgagatgcatgacgcggtggggttcgcgcaccttcgcgagtgcgccaagcgcgcccaggcggtggcctgtgcattaccgacaatcaaggatcacgcgctcagccaggtctacgcggcggagtggtcgttcgcgtggcaagacgacctactgcaatcagcacagcgtctgatgcgcctcgctgccgacctcgaagtcgctgcgggacccgtgttcaggacggtcggcctgccagagaagggcggttctttggccaactacctggcgctggatcgtctggctgacgtcttgctcgacgcgaccggcgtccccggcccagtcgcccgggcaggacacaaccctgacatcacgcgaaggctcgagagtctccaaaggcacggtgcgcttcggcaggaggccgccgggaaattggcgaccggctacaagccttcgattgaagggctgagtgctgaggacatcgcgcaacggtggcgcacggctagcgcgaagtggatcgtcccgcggaggcttgctcagcgcgccgttctccgggagctgcagccgcatcgccaggatggcgaggttccaacggctggcgaagtgcccggactgatcgatgccctcggaatcctcaacaccgaagacgccgagatccgcaccctttccgccgggcaggagagtgtgctcggggccgcgtggcctagcgtaaatgagcggctcgataccctgggacggtgcgcggcgtggagccaacgctatcgggaggcgctcgcacagctcgtggatgcgagccgatcggttgacgacatggccgcccgcctccagatcctggtgggcgaacagcagcacctattgaaggtggacgcggttgtcggtcagcagctggtccgcgtgcgcgaactgatggtcgccttgagcgcggaacttgagcgcgcccggaaactttctcaaaacacggacttcgcaggcgggccacacagcgcgggatttctggttcgcctggcagcgaccgcacaacactggcttggatcggcgcgcgacctgaaggattggtgcagttggcgacgggctcgtgccgacgcgatctcggcaggattggcgcccctggtggcggacatcgaggaggggaacattgcggttggatcgatagtcgagcacttcgacttcagctatcagctttggtggctcaagcgaacggtcgacagcgatccagttctgcgcaccttctccagcgctgaccatgccaggaagattgaggagttccgatcggtggacagggcctttcaggacctgacgcgggactacatcaaagccaaggtcgcagcgaacatcccggagcaacgcagcctacagcccgccagcgagtctgagatgggtaggctgcgccgggagctacagaagcagcggggtcatcaatcgatccgtcgcttgatcgagggaatgccgacccttctgactcggctgaagccgtgcgtgctgatgtcgcccctctcggtggccacc

SEQ ID NO: 93 - DNA, 15746 bp, Artificial Sequence; identical to SEQ ID NO: 92
  Synthetic Oligonucleotide
  misc_feature (1)..(8507): n is a, c, g, or t

SEQ ID NO: 94 - DNA, 15490 bp, Artificial Sequence
  Synthetic Oligonucleotide
  misc_feature (1)..(9977): n is a, c, g, or t
nnnnnnnnnnnnnnnnnnnnnnnnnnnnnnnnnnnnnnnnnnnnnnnnnnnnnnnnnnnnnnnnnnnnnnnnnnnnnnnnnnnnnnnnnnnnnnnnnnnnnnnnnnnnnnnnnnnnnnnnnnnnnnnnnnnnnnnnnnnnnnnnnnnnnnnnnnnnnnnnnnnnnnnnnnnnnnnnnnnnnnnnnnnnnnnnnnnnnnnnnnnnnnnnnnnnnnnnnnnnnnnnnnnnnnnnnnnnnnnnnnnnnnnnnnnnnnnnnnnnnnnnnnnnnnnnnnnnnnnnnnnnnnnnnnnnnnnnnnnnnnnnnnnnnnnnnnnnnnnnnnnnnnnnnnnnnnnnnnnnnnnnnnnnnnnnnnnnnnnnnnnnnnnnnnnnnnnnnnnnnnnnnnnnnnnnnnnnnnnnnnnnnnnnnnnnnnnnnnnnnnnnnnnnnnnnnnnnnnnnnnnnnnnnnnnnnnnnnnnnnnnnnnnnnnnnnnnnnnnnnnnnnnnnnnnnnnnnnnnnnnnnnnnnnnnnnnnnnnnnnnnnnnnnnnnnnnnnnnnnnnnnnnnnnnnnnnnnnnnnnnnnnnnnnnnnnnnnnnnnnnnnnnnnnnnnnnnnnnnnnnnnnnnnnnnnnnnnnnnnnnnnnnnnnnnnnnnnnnnnnnnnnnnnnnnnnnnnnnnnnnnnnnnnnnnnnnnnnnnnnnnnnnnnnnnnnnnnnnnnnnnnnnnnnnnnnnnnnnnnnnnnnnnnnnnnnnnnnnnnnnnnnnnnnnnnnnnnnnnnnnnnnnnnnnnnnnnnnnnnnnnnnnnnnnnnnnnnnnnnnnnnnnnnnnnnnnnnnnnnnnnnnnnnnnnnnnnnnnnnnnnnnnnnnnnnnnnnnnnnnnnnnnnnnnnnnnnnnnnnnnnnnnnnnnnnnnnnnnnnnnnnnnnnnnnnnnnnnnnnnnnnnnnnnnnnnnnnnnnnnnnnnnnnnnnnnnnnnnnnnnnnnnnnnnnnnnnnnnnnnnnnnnnnnnnnnnnnnnnnnnnnnnnnnnnnnnnnnnnnnnnnnnnnnnnnnnnnnnnnnnnnnnnnnnnnnnnnnnnnnnnnnnnnnnnnnnnnnnnnnnnnnnnnnnnnnnnnnnnnnnnnnnnnnnnnnnnnnnnnnnnnnnnnnnnnnnnnnnnnnnnnnnnnnnnnnnnnnnnnnnnnnnnnnnnnnnnnnnnnnnnnnnnnnnnnnnnnnnnnnnnnnnnnnnnnnnnnnnnnnnnnnnnnnnnnnnnnnnnnnnnnnnnnnnnnnnnnnnnnnnnnnnnnnnnnnnnnnnnnnnnnnnnnnnnnnnnnnnnnnnnnnnnnnnnnnnnnnnnnnnnnnnnnnnnnnnnnnnnnnnnnnnnnnnnnnnnnnnnnnnnnnnnnnnnnnnnnnnnnnnnnnnnnnnnnnnnnnnnnnnnnnnnnnnnnnnnnnnnnnnnnnnnnnnnnnnnnnnnnnnnnnnnnnnnnnnnnnnnnnnnnnnnnnnnnnnnnnnnnnnnnnnnnnnnnnnnnnnnnnnnnnnnnnnnnnnnnnnnnnnnnnnnnnnnnnnnnnnnnnnnnnnnnnnnnnnnnnnnnnnnnnnnnnnnnnnnnnnnnnnnnnnnnnnnnnnnnnnnnnnnnnnnnnnnnnnnnnnnnnnnnnnnnnnnnnnnnnnnnnnnnnnnnnnnnnnnnnnnnnnnnnnnnnnnnnnnnnnnnnnnnnnnnnnnnnnnnnnnnnnnnnnnnnnnnnnnnnnnnnnnnnnnnnnnnnnnnnnnnnnnnnnnnnnnnnnnnnnnnnnnnnnnnnnnnnnnnnnnnnnnnnnnnnnnnnnnnnnnnnnnnnnnnnnnnnnnnnnnnnnnnnnnnnnnnnnnnnnnnnnnnnnnnnnnnnnnnnnnnnnnnnnnnnnnnnnnnnnnnnnnnnnnnnnnnnnnnnnnnnnnnnnnnnnnnnnnnnnnnnnnnnnnnnnnnnnnnnnnnnnnnnnnnnnnnnnnnnnnnnnnnnnnnnnnnnnnnnnnnnnnnnnnnnnnnnnnnnnnnnnnnnnnnnnnnnnnnnnnnnnnnnnnnnnnnnnnnnnnnnnnnnnnnnnnnnnnnnnnnnnnnnnnnnnnnnnnnnnnnnnnnnnnnnnnnnnnnnnnnnnnnnnnnnnnnnnnnnnnnnnnnnnnnnnnnnnnnnnnnnnnnnnnnnnnnnnnnnnnnnnnnnnnnnnnnnnnnnnnnnnnnnnnnnnnnnnnnnnnnnnnnnnnnnnnnnnnnnnnnnnnnnnnnnnnnnnnnnnnnnnnnnnnnnnnnnnnnnnnnnnnnnnnnnnnnnnnnnnnnnnnnnnnnnnnnnnnnnnnnnnnnnnnnnnnnnnnnnnnnnnnnnnnnnnnnnnnnnnnnnnnnnnnnnnnnnnnnnnnnnnnnnnnnnnnnnnnnnnnnnnnnnnnnnnnnnnnnnnnnnnnnnnnnnnnnnnnnnnnnnnnnnnnnnnnnnnnnnnnnnnnnnnnnnnnnnnnnnnnnnnnnnnnnnnnnnnnnnnnnnnnnnnnnnnnnnnnnnnnnnnnnnnnnnnnnnnnnnnnnnnnnnnnnnnnnnnnnnnnnnnnnnnnnnnnnnnnnnnnnnnnnnnnnnnnnnnnnnnnnnnnnnnnnnnnnnnnnnnnnnnnnnnnnnnnnnnnnnnnnnnnnnnnnnnnnnnnnnnnnnnnnnnnnnnnnnnnnnnnnnnnnnnnnnnnnnnnnnnnnnnnnnnnnnnnnnnnnnnnnnnnnnnnnnnnnnnnnnnnnnnnnnnnnnnnnnnnnnnnnnnnnnnnnnnnnnnnnnnnnnnnnnnnnnnnnnnnnnnnnnnnnnnnnnnnnnnnnnnnnnnnnnnnnnnnnnnnnnnnnnnnnnnnnnnnnnnnnnnnnnnnnnnnnnnnnnnnnnnnnnnnnnnnnnnnnnnnnnnnnnnnnnnnnnnnnnnnnnnnnnnnnnnnnnnnnnnnnnnnnnnnnnnnnnnnnnnnnnnnnnnnnnnnnnnnnnnnnnnnnnnnnnnnnnnnnnnnnnnnnnnnnnnnnnnnnnnnnnnnnnnnnnnnnnnnnnnnnnnnnnnnnnnnnnnnnnnnnnnnnnnnnnnnnnnnnnnnnnnnnnnnnnnnnnnnnnnnnnnnnnnnnnnnnnnnnnnnnnnnnnnnnnnnnnnnnnnnnnnnnnnnnnnnnnnnnnnnnnnnnnnnnnnnnnnnnnnnnnnnnnnnnnnnnnnnnnnnnnnnnnnnnnnnnnnnnnnnnnnnnnnnnnnnnnnnnnnnnnnnnnnnnnnnnnnnnnnnnnnnnnnnnnnnnnnnnnnnnnnnnnnnnnnnnnnnnnnnnnnnnnnnnnnnnnnnnnnnnnnnnnnnnnnnnnnnnnnnnnnnnnnnnnnnnnnnnnnnnnnnnnnnnnnnnnnnnnnnnnnnnnnnnnnnnnnnnnnnnnnnnnnnnnnnnnnnnnnnnnnnnnnnnnnnnnnnnnnnnnnnnnnnnnnnnnnnnnnnnnnnnnnnnnnnnnnnnnnnnnnnnnnnnnnnnnnnnnnnnnnnnnnnnnnnnnnnnnnnnnnnnnnnnnnnnnnnnnnnnnnnnnnnnnnnnnnnnnnnnnnnnnnnnnnnnnnnnnnnnnnnnnnnnnnnnnnnnnnnnnnnnnnnnnnnnnnnnnnnnnnnnnnnnnnnnnnnnnnnnnnnnnnnnnnnnnnnnnnnnnnnnnnnnnnnnnnnnnnnnnnnnnnnnnnnnnnnnnnnnnnnnnnnnnnnnnnnnnnnnnnnnnnnnnnnnnnnnnnnnnnnnnnnnnnnnnnnnnnnnnnnnnnnnnnnnnnnnnnnnnnnnnnnnnnnnnnnnnnnnnnnnnnnnnnnnnnnnnnnnnnnnnnnnnnnnnnnnnnnnnnnnnnnnnnnnnnnnnnnnnnnnnnnnnnnnnnnnnnnnnnnnnnnnnnnnnnnnnnnnnnnnnnnnnnnnnnnnnnnnnnnnnnnnnnnnnnnnnnnnnnnnnnnnnnnnnnnnnnnnnnnnnnnnnnnnnnnnnnnnnnnnnnnnnnnnnnnnnnnnnnnnnnnnnnnnnnnnnnnnnnnnnnnnnnnnnnnnnnnnnnnnnnnnnnnnnnnnnnnnnnnnnnnnnnnnnnnnnnnnnnnnnnnnnnnnnnnnnnnnnnnnnnnnnnnnnnnnnnnnnnnnnnnnnnnnnnnnnnnnnnnnnnnnnnnnnnnnnnnnnnnnnnnnnnnnnnnnnnnnnnnnnnnnnnnnnnnnnnnnnnnnnnnnnnnnnnnnnnnnnnnnnnnnnnnnnnnnnnnnnnnnnnnnnnnnnnnnnnnnnnnnnnnnnnnnnnnnnnnnnnnnnnnnnnnnnnnnnnnnnnnnnnnnnnnnnnnnnnnnnnnnnnnnnnnnnnnnnnnnnnnnnnnnnnnnnnnnnnnnnnnnnnnnnnnnnnnnnnnnnnnnnnnnnnnnnnnnnnnnnnnnnnnnnnnnnnnnnnnnnnnnnnnnnnnnnnnnnnnnnnnnnnnnnnnnnnnnnnnnnnnnnnnnnnnnnnnnnnnnnnnnnnnnnnnnnnnnnnnnnnnnnnnnnnnnnnnnnnnnnnnnnnnnnnnnnnnnnnnnnnnnnnnnnnnnnnnnnnnnnnnnnnnnnnnnnnnnnnnnnnnnnnnnnnnnnnnnnnnnnnnnnnnnnnnnnnnnnnnnnnnnnnnnnnnnnnnnnnnnnnnnnnnnnnnnnnnnnnnnnnnnnnnnnnnnnnnnnnnnnnnnnnnnnnnnnnnnnnnnnnnnnnnnnnnnnnnnnnnnnnnnnnnnnnnnnnnnnnnnnnnnnnnnnnnnnnnnnnnnnnnnnnnnnnnnnnnnnnnnnnnnnnnnnnnnnnnnnnnnnnnnnnnnnnnnnnnnnnnnnnnnnnnnnnnnnnnnnnnnnnnnnnnnnnnnnnnnnnnnnnnnnnnnnnnnnnnnnnnnnnnnnnnnnnnnnnnnnnnnnnnnnnnnnnnnnnnnnnnnnnnnnnnnnnnnnnnnnnnnnnnnnnnnnnnnnnnnnnnnnnnnnnnnnnnnnnnnnnnnnnnnnnnnnnnnnnnnnnnnnnnnnnnnnnnnnnnnnnnnnnnnnnnnnnnnnnnnnnnnnnnnnnnnnnnnnnnnnnnnnnnnnnnnnnnnnnnnnnnnnnnnnnnnnnnnnnnnnnnnnnnnnnnnnnnnnnnnnnnnnnnnnnnnnnnnnnnnnnnnnnnnnnnnnnnnnnnnnnnnnnnnnnnnnnnnnnnnnnnnnnnnnnnnnnnnnnnnnnnnnnnnnnnnnnnnnnnnnnnnnnnnnnnnnnnnnnnnnnnnnnnnnnnnnnnnnnnnnnnnnnnnnnnnnnnnnnnnnnnnnnnnnnnnnnnnnnnnnnnnnnnnnnnnnnnnnnnnnnnnnnnnnnnnnnnnnnnnnnnnnnnnnnnnnnnnnnnnnnnnnnnnnnnnnnnnnnnnnnnnnnnnnnnnnnnnnnnnnnnnnnnnnnnnnnnnnnnnnnnnnnnnnnnnnnnnnnnnnnnnnnnnnnnnnnnnnnnnnnnnnnnnnnnnnnnnnnnnnnnnnnnnnnnnnnnnnnnnnnnnnnnnnnnnnnnnnnnnnnnnnnnnnnnnnnnnnnnnnnnnnnnnnnnnnnnnnnnnnnnnnnnnnnnnnnnnnnnnnnnnnnnnnnnnnnnnnnnnnnnnnnnnnnnnnnnnnnnnnnnnnnnnnnnnnnnnnnnnnnnnnnnnnnnnnnnnnnnnnnnnnnnnnnnnnnnnnnnnnnnnnnnnnnnnnnnnnnnnnnnnnnnnnnnnnnnnnnnnnnnnnnnnnnnnnnnnnnnnnnnnnnnnnnnnnnnnnnnnnnnnnnnnnnnnnnnnnnnnnnnnnnnnnnnnnnnnnnnnnnnnnnnnnnnnnnnnnnnnnnnnnnnnnnnnnnnnnnnnnnnnnnnnnnnnnnnnnnnnnnnnnnnnnnnnnnnnnnnnnnnnnnnnnnnnnnnnnnnnnnnnnnnnnnnnnnnnnnnnnnnnnnnnnnnnnnnnnnnnnnnnnnnnnnnnnnnnnnnnnnnnnnnnnnnnnnnnnnnnnnnnnnnnnnnnnnnnnnnnnnnnnnnnnnnnnnnnnnnnnnnnnnnnnnnnnnnnnnnnnnnnnnnnnnnnnnnnnnnnnnnnnnnnnnnnnnnnnnnnnnnnnnnnnnnnnnnnnnnnnnnnnnnnnnnnnnnnnnnnnnnnnnnnnnnnnnnnnnnnnnnnnnnnnnnnnnnnnnnnnnnnnnnnnnnnnnnnnnnnnnnnnnnnnnnnnnnnnnnnnnnnnnnnnnnnnnnnnnnnnnnnnnnnnnnnnnnnnnnnnnnnnnnnnnnnnnnnnnnnnnnnnnnnnnnnnnnnnnnnnnnnnnnnnnnnnnnnnnnnnnnnnnnnnnnnnnnnnnnnnnnnnnnnnnnnnnnnnnnnnnnnnnnnnnnnnnnnnnnnnnnnnnnnnnnnnnnnnnnnnnnnnnnnnnnnnnnnnnnnnnnnnnnnnnnnnnnnnnnnnnnnnnnnnnnnnnnnnnnnnnnnnnnnnnnnnnnnnnnnnnnnnnnnnnnnnnnnnnnnnnnnnnnnnnnnnnnnnnnnnnnnnnnnnnnnnnnnnnnnnnnnnnnnnnnnnnnnnnnnnnnnnnnnnnnnnnnnnnnnnnnnnnnnnnnnnnnnnnnnnnnnnnnnnnnnnnnnnnnnnnnnnnnnnnnnnnnnnnnnnnnnnnnnnnnnnnnnnnnnnnnnnnnnnnnnnnnnnnnnnnnnnnnnnnnnnnnnnnnnnnnnnnnnnnnnnnnnnnnnnnnnnnnnnnnnnnnnnnnnnnnnnnnnnnnnnnnnnnnnnnnnnnnnnnnnnnnnnnnnnnnnnnnnnnnnnnnnnnnnnnnnnnnnnnnnnnnnnnnnnnnnnnnnnnnnnnnnnnnnnnnnnnnnnnnnnnnnnnnnnnnnnnnnnnnnnnnnnnnnnnnnnnnnnnnnnnnnnnnnnnnnnnnnnnnnnnnnnnnnnnnnnnnnnnnnnnnnnnnnnnnnnnnnnnnnnnnnnnnnnnnnnnnnnnnnnnnnnnnnnnnnnnnnnnnnnnnnnnnnnnnnnnnnnnnnnnnnnnnnnnnnnnnnnnnnnnnnnnnnnnnnnnnnnnnnnnnnnnnnnnnnnnnnnnnnnnnnnnnnnnnnnnnnnnnnnnnnnnnnnnnnnnnnnnnnnnnnnnnnnnnnnnnnnnnnnnnnnnnnnnnnnnnnnnnnnnnnnnnnnnnnnnnnnnnnnnnnnnnnnnnnnnnnnnnnnnnnnnnnnnnnnnnnnnnnnnnnnnnnnnnnnnnnnnnnnnnnnnnnnnnnnnnnnnnnnnnnnnnnnnnnnnnnnnnnnnnnnnnnnnnnnnnnnnnnnnnnnnnnnnnnnnnnnnnnnnnnnnnnnnnnnnnnnnnnnnnnnnnnnnnnnnnnnnnnnnnnnnnnnnnnnnnnnnnnnnnnnnnnnnnnnnnnnnnnnnnnnnnnnnnnnnnnnnnnnnnnnnnnnnnnnnnnnnnnnnnnnnnnnnnnnnnnnnnnnnnnnnnnnnnnnnnnnnnnnnnnnnnnnnnnnnnnnnnnnnnnnnnnnnnnnnnnnnnnnnnnnnnnnnnnnnnnnnnnnnnnnnnnnnnnnnnnnnnnnnnnnnnnnnnnnnnnnnnnnnnnnnnnnnnnnnnnnnnnnnnnnnnnnnnnnnnnnnnnnnnnnnnnnnnnnnnnnnnnnnnnnnnnnnnnnnnnnnnnnnnnnnnnnnnnnnnnnnnnnnnnnnnnnnnnnnnnnnnnnnnnnnnnnnnnnnnnnnnnnnnnnnnnnnnnnnnnnnnnnnnnnnnnnnnnnnnnnnnnnnnnnnnnnnnnnnnnnnnnnnnnnnnnnnnnnnnnnnnnnnnnnnnnnnnnnnnnnnnnnnnnnnnnnnnnnnnnnnnnnnnnnnnnnnnnnnnnnnnnnnnnnnnnnnnnnnnnnnnnnnnnnnnnnnnnnnnnnnnnnnnnnnnnnnnnnnnnnnnnnnnnnnnnnnnnnnnnnnnnnnnnnnnnnnnnnnnnnnnnnnnnnnnnnnnnnnnnnnnnnnnnnnnnnnnnnnnnnnnnnnnnnnnnnnnnnnnnnnnnnnnnnnnnnnnnnnnnnnnnnnnnnnnnnnnnnnnnnnnnnnnnnnnnnnnnnnnnnnnnnnnnnnnnnnnnnnnnnnnnnnnnnnnnnnnnnnnnnnnnnnnnnnnnnnnnnnnnnnnnnnnnnnnnnnnnnnnnnnnnnnnnnnnnnnnnnnnnnnnnnnnnnnnnnnnnnnnnnnnnnnnnnnnnnnnnnnnnnnnnnnnnnnnnnnnnnnnnnnnnnnnnnnnnnnnnnnnnnnnnnnnnnnnnnnnnnnnnnnnnnnnnnnnnnnnnnnnnnnnnnnnnnnnnnnnnnnnnnnnnnnnnnnnnnnnnnnnnnnnnnnnnnnnnnnnnnnnnnnnnnnnnnnnnnnnnnnnnnnnnnnnnnnnnnnnnnnnnnnnnnnnnnnnnnnnnnnnnnnnnnnnnnnnnnnnnnnnnnnnnnnnnnnnnnnnnnnnnnnnnnnnnnnnnnnnnnnnnnnnnnnnnnnnnnnnnnnnnnnnnnnnnnnnnnnnnnnnnnnnnnnnnnnnnnnnnnnnnnnnnnnnnnnnnnnnnnnnnnnnnnnnnnnnnnnnnnnnnnnnnnnnnnnnnnnnnnnnnnnnnnnnnnnnnnnnnnnnnnnnnnnnnnnnnnnnnnnnnnnnnnnnnnnnnnnnnnnnnnnnnnnnnnnnnnnnnnnnnnnnnnnnnnnnnnnnnnnnnnnnnnnnnnnnnnnnnnnnnnnnnnnnnnnnnnnnnnnnnnnnnnnnnnnnnnnnnnnnnnnnnnnnnnnnnnnnnnnnnnnnnnnnnnnnnnnnnnnnnnnnnnnnnnnnnnnnnnnnnnnnnnnnnnnnnnnnnnnnnnnnnnnnnnnnnnnnnnnnnnnnnnnnnnnnnnnnnnnnnnnnnnnnnnnnnnnnnnnnnnnnnnnnnnnnnnnnnnnnnnnnnnnnnnnnnnnnnnnnnnnnnnnnnnnnnnnnnnnnnnnnnnnnnnnnnnnnnnnnnnnnnnnnnnnnnnnnnnnnnnnnnnnnnnnnnnnnnnnnnnnnnnnnnnnnnnnnnnnnnnnnnnnnnnnnnnnnnnnnnnnnnnnnnnnnnnnnnnnnnnnnnnnnnnnnnnnnnnnnnnnnnnnnnnnnnnnnnnnnnnnnnnnnnnnnnnnnnnnnnnnnnnnnnnnnnnnnnnnnnnnnnnnnnnnnnnnnnnnnnnnnnnnnnnnnnnnnnnnnnnnnnnnnnnnnnnnnnnnnnnnnnnnnnnnnnnnnnnnnnnnnnnnnnnnnnnnnnnnnnnnnnnnnnnnnnnnnnnnnnnnnnnnnnnnnnnnnnnnnnnnnnnnnnnnnnnnnnnnnnnnnnnnnnnnnnnnnnnnnnnnnnnnnnnnnnnnnnnnnnnnnnnnnnnnnnnnnnnnnnnnnnnnnnnnnnnnnnnnnnnnnnnnnnnnnnnnnnnnnnnnnnnnnnnnnnnnnnnnnnnnnnnnnnnnnnnnnnnnnnnnnnnnnnnnnnnnnnnnnnnnnnnnnnnnnnnnnnnnnnnnnnnnnnnnnnnnnnnnnnnnnnnnnnnnnnnnnnnnnnnnnnnnnnnnnnnnnnnnnnnnnnnnnnnnnnnnnnnnnnnnnnnnnnnnnnnnnnnnnnnnnnnnnnnnnnnnnnnnnnnnnnnnnnnnnnnnnnnnnnnnnnnnnnnnnnnnnnnnnnnnnnnnnnnnnnnnnnnnnnnnnnnnnnnnnnnnnnnnnnnnnnnnnnnnnnnnnnnnnnnnnnnnnnnnnnnnnnnnnnnnnnnnnnnnnnnnnnnnnnnnnnnnnnnnnnnnnnnnnnnnnnnnnnnnnnnnnnnnnnnnnnnnnnnnnnnnnnnnnnnnnnnnnnnnnnnnnnnnnnnnnnnnnnnnnnnnnnnnnnnnnnnnnnnnnnnnnnnnnnnnnnnnnnnnnnnnnnnnnnnnnnnnnnnnnnnnnnnnnnnnnnnnnnnnnnnnnnnnnnnnnnnnnnnnnnnnnnnnnnnnnnnnnnnnnnnnnnnnnnnnnnnnnnnnnnnnnnnnnnnnnnnnnnnnnnnnnnnnnnnnnnnnnnnnnnnnnnnccccctttagtgaggggttattttggaggtaggcatgtatcgcagcaaagagcagacgagctatgccaagttgatcggcagcgcaatcgcctctggcgcgccgctcctcgctggtgcggctgccggccttggcaagacgcacggctacacgatcccgctggtcacatccggcaagcgcgttgcgatctgcatgtcaacccgtcagttgatcgcgcagtacatggaatcggatgcactcaaggcggcgctggagatgtcgccatcgaccacggttgccgtgctgcgttcgcgccgcgaattcgacagcagcaaggactaccgcgaacacaaggaacaggcgttggcggcgcaagtgctggtggtgacccatgccgccgccctgatcgatagcttcaaccccgactatgccgatcttcgcgcccgtgatgtcgtactgatcgatgaggcggatttgctggccgacgccgccgatctgcgttcgacgttcagcatcgatgcccagggcgacacggatcgcaatgaagtgctgcgccgtgcatcgaagtctgatgacccggaggagcgtgccgccgcgagggccatacagtacgccatcgagcatccggccttctacaaggtggtcgggttcgatgatgatggcgacctgatgctcaagcaccggatgccgggacggatgctcaagccattggtcgcagactgtaagcgtgtgatcttcaccagcggtacgctgccggtcaacgggcgcttcgattacttcatccgtgccatcggcctgaccagcatcgatccgtcgagccgccacattgatccggtgaagcacggcaacctgaccgttgagattgccggcgaggaaatgagcgacgaacaaaaggcacaggacatcgcgtcagccgaacgtccatgtctggtgctgacgacaagccacgccgacaccgagcgcctcggtgccttgataaagggcgcagtagtccggcagaagggcgaagcattgacggatgcggtggcgcgctgtccggctgatgccattctggttgccgccggtgcgtggtcgggactcgactcaccggcgctgcgctggaaaaccgtggtgataccgaaagcgccttacggtgcgccggtcgagatcgacagccggcagatcacgcactacatcgacagcaaggtgaccgcgacccgtcgcatcaatcagggtctgcaccggggtctgcggacgcaggatgcggtctgcaaactgctgctgctcgacccgcgctgcaaccgtcctgagttgttgacggcgattccggctcgtttccctgtgcagtcgttcgatgaaggactgcggggcgtcgtggtgctgtcaaaagcggagcgcgatcctgccctgcggagcgcggccctgaaatatcacggggcgaagtgcagggactgcgaggagacggcattgcaccgacttgatgttcaccacctcgacccgattgccgaaggtcagcgcaagacgacggtcaaggatgttgtcgtcctctgcaagaaccaccatgctgacgcgcatctcttactaacgaacctccgaaagtagataaggttcggtgatgtgccaacgggtagatgtcagccggatcagcaggaggccgcgattgaaccgatcttgcagtaggcgcaggcgttgggtgaggcgtgggcgtagcgttactgcgttcgcgtagcttcaacctgccgcagcaccttgaccccatccaccccaactgccgcgcagacctccaagaattccacgacatccagtcggcgctcaccgccctcgtactttgacacgaacgactgagggcgacagaggtggccccggaaattagttctggtagataagtgaaggctctgctctgatgggcgacgcaatcgcccgaaaaaggagcagcaatgagaagaccgagaaggaaccacaccgccgcgttcaaggcgaaagtcgcggtagccgccctgaagggcgacaagacgctggccgaactggcggagaagttcgatgttcacgccaaccagatcacgcaatggaagacgcaattgctggaagcggcgacaaacgtcttcctgacaccggccgagaaacgcgagtcggtcggccccagcgtcaaggacatgcaggccaagatcgggcagcttgccttggagaatgattttttggccggcgcgctcggtcgcatcggcgatgcgagcgcaaagaaatgatcgacaccacgcacgacctgccgatccgtcgccaagccgagctgcttgaggtttctcgctcaaatgtctattacctgcccaggccggcctccgaggccgatctggcggtgatgcgccgaatcgacgaactgcatctgaactatcccttcgccggcgcccgtatgctgcgtgacatgctcaatcgggaaggcatccagatcgggcgcaagcatgtcggcacgctcatgggcaagatgggcattgcggcgatctaccgcaagcgcaacaccagcgcgccgcatccgaagcatccggtctatccgtatcttctgaagaatctggtcatcgacaggccgaaccatgtgtgggcgactgacattacctacatccccatgaagcggggcttcgtctatctggtcgccattctcgattgggcgacgcgcaaggttctggcgcatcgggtgtcgatcagcatgaccacggacttctgtgtggaggcactggaagaggcgattgccaggtacggaccaccggagatcttcaataccgaccagggcagccagttcaccagtgccgacttcaccagagtgctgaccgacaacgccatcaggatcagcatggacggcaagggccgctggctcgataacgtcttcgtcgagcggctctggcgcagcgtcaagtacgagcacgtctatctgcatgcctatgagagcgtcaccgaagcgcacgagcaactggcgggctacttcgagttctacaacggggagcgtccgcactcatcgctcggcgctcggacacccgatgcggcatacttcgattcgacggcagtaaagttggcagcatgagctacgtgagttacccaccgtgctgctcgcctacggtctagagggaccttcggcaagccgccccgtggataactcgtaaccgcagagagttcacttaagaaaccggcaaattctgtcctaaggaacggggccacctctttccgctttgtggtggatgccgacctacgaaacgcatgcccatggcatcgctagtgacggcaacggctgcatactgggcatacgtctaggcgcccacaacaacctttcccggaaaacctgcgaccccgtatcgaggcagcgagcaccaccagttcggcgaagttcggcgacccgccataccgaggtcggccaagttcagcgcccagcatacgcactgtgttgaaccggctcgatattccgcccgcgccaaccggaatagcccactttggttcggtagcaggttcggtgagcccgccaagtcgaccagcgagacagggaaaactgttacgcttcttcgcactacccaacgaagaacatgccggtgtcatggactgaaaatccgtgtgtcggcagttcgattctgcccctggccaccagtaacaccaaggccccgctcgtcttatgacctgcggggcctttgcttttgctgcgggctgccgctggacaggatcagctggtcgggggcgccatgaggctttgtggagacatggcgtcggcgccataaaaaaacccgatgctttgtgggcaccgggtcttagaccagcccctttggagggccggaggaggagacgttgaaagtaacttatgcggccttctttaccttcgcggctgcagaaccaactgcattgacaacggcgttggtagcggctgtcacattggcttcggcgatttcgccggcttgctttgccgccttggtcatgctgtcgtaggccgagttagcggcggcgattgcagactttacggacgacatggcgacatctgagcctgcgggggcattcttgagggccttatcgatcacagtttcgacgttcttgttgaggtcagaaacctgcgcttcgactaccttggacagttctccgtgtgtttcggaagcgatcacatacacgctgcgcgaataggcaacaaccttttccatggacggctgggcaagcgtagtttgaaccgcgatcacttcttttgcatccttggcgccgagcagagccttgacgttggcagcactgtcttccaagaaggagcgggcggtattgaggttcagagcggcaaggcgctcggcactggcgaaagccgtattggcgatagtcagcatggtttctacgttggccttgttggcgctggcgaacttttcggtaatggctttcatgaggaatctccgtaatattgatagggctagtaggtgtctggttgcactgccaaccctgaattcagggatatgttgcagtgcaccatgaagcgaagtatagagatcaaactgtgcctgtcaaggaatatttgttgcagtgcaccaatctcgttcatcgagtccgtcacgtcgcccatccagactttcgcaatgtgttgctgcgcgcttcattttgaccatcgtccgcgaacttcactgaccaacacctgccagcccgcttccaagtcgaaatgcgcccttgcgcaagctcgctttgatcactggaagatgcgcgcactggtcaatcgacgccgcgcatgcaacactcatgggacattcaccctttgtcataggattccgatgagaaccttagtctgcttcgtgttgccggcagttgcctgtttctttccgctggccgcttacgcgggcggcagttgcagtgcatcggtcggcaagtccagaatttgcatggatttctccaaaatcagtggatctgccgcatcaatctgtccgccgaatttccagtccagcagcagtggttgcaacacgacgggagcgagtggttcgtgcagcgtaggccctatggtgacttactactgggattcaacgtccaatccaaaagacgtttgcaacatgtccggtggtgcttggctgtcggggtcgggcgtgccgactggcaacacatccggcgcccctccagcatctttggggtcatcgcccaacaataaatcgaataccagcaaaggtgattccgacaaaggcccttccagaagttcagcgcaagcctccaccagtggagcggggcgttcggcagacgccccccgggaacccaccggatctgctaccgggcgttcgagtagcaattcctcaggcaataacgcaggcaaatccacagacagttgctgggatgcgcctagtaattgtgtagtcgttaagagtagtcgctggaaaaaggatcaatttattattgtctatgagaacgtctgcgacaagagggtctacgttggaaaatgcctggaacaaaagggcggcaaatcatcttgtggtgctgatggaattccggcgggcaagaccaaccattgggatacctataacgcaaccggaagaagctttgtcaaatggataggcgtggagaatccggccgatgactggct

SEQ ID NO: 95 - DNA, 15478 bp, Artificial Sequence
  Synthetic Oligonucleotide
  misc_feature (1)..(9965): n is a, c, g, or t
nnnnnnnnnnnnnnnnnnnnnnnnnnnnnnnnnnnnnnnnnnnnnnnnnnnnnnnnnnnnnnnnnnnnnnnnnnnnnnnnnnnnnnnnnnnnnnnnnnnnnnnnnnnnnnnnnnnnnnnnnnnnnnnnnnnnnnnnnnnnnnnnnnnnnnnnnnnnnnnnnnnnnnnnnnnnnnnnnnnnnnnnnnnnnnnnnnnnnnnnnnnnnnnnnnnnnnnnnnnnnnnnnnnnnnnnnnnnnnnnnnnnnnnnnnnnnnnnnnnnnnnnnnnnnnnnnnnnnnnnnnnnnnnnnnnnnnnnnnnnnnnnnnnnnnnnnnnnnnnnnnnnnnnnnnnnnnnnnnnnnnnnnnnnnnnnnnnnnnnnnnnnnnnnnnnnnnnnnnnnnnnnnnnnnnnnnnnnnnnnnnnnnnnnnnnnnnnnnnnnnnnnnnnnnnnnnnnnnnnnnnnnnnnnnnnnnnnnnnnnnnnnnnnnnnnnnnnnnnnnnnnnnnnnnnnnnnnnnnnnnnnnnnnnnnnnnnnnnnnnnnnnnnnnnnnnnnnnnnnnnnnnnnnnnnnnnnnnnnnnnnnnnnnnnnnnnnnnnnnnnnnnnnnnnnnnnnnnnnnnnnnnnnnnnnnnnnnnnnnnnnnnnnnnnnnnnnnnnnnnnnnnnnnnnnnnnnnnnnnnnnnnnnnnnnnnnnnnnnnnnnnnnnnnnnnnnnnnnnnnnnnnnnnnnnnnnnnnnnnnnnnnnnnnnnnnnnnnnnnnnnnnnnnnnnnnnnnnnnnnnnnnnnnnnnnnnnnnnnnnnnnnnnnnnnnnnnnnnnnnnnnnnnnnnnnnnnnnnnnnnnnnnnnnnnnnnnnnnnnnnnnnnnnnnnnnnnnnnnnnnnnnnnnnnnnnnnnnnnnnnnnnnnnnnnnnnnnnnnnnnnnnnnnnnnnnnnnnnnnnnnnnnnnnnnnnnnnnnnnnnnnnnnnnnnnnnnnnnnnnnnnnnnnnnnnnnnnnnnnnnnnnnnnnnnnnnnnnnnnnnnnnnnnnnnnnnnnnnnnnnnnnnnnnnnnnnnnnnnnnnnnnnnnnnnnnnnnnnnnnnnnnnnnnnnnnnnnnnnnnnnnnnnnnnnnnnnnnnnnnnnnnnnnnnnnnnnnnnnnnnnnnnnnnnnnnnnnnnnnnnnnnnnnnnnnnnnnnnnnnnnnnnnnnnnnnnnnnnnnnnnnnnnnnnnnnnnnnnnnnnnnnnnnnnnnnnnnnnnnnnnnnnnnnnnnnnnnnnnnnnnnnnnnnnnnnnnnnnnnnnnnnnnnnnnnnnnnnnnnnnnnnnnnnnnnnnnnnnnnnnnnnnnnnnnnnnnnnnnnnnnnnnnnnnnnnnnnnnnnnnnnnnnnnnnnnnnnnnnnnnnnnnnnnnnnnnnnnnnnnnnnnnnnnnnnnnnnnnnnnnnnnnnnnnnnnnnnnnnnnnnnnnnnnnnnnnnnnnnnnnnnnnnnnnnnnnnnnnnnnnnnnnnnnnnnnnnnnnnnnnnnnnnnnnnnnnnnnnnnnnnnnnnnnnnnnnnnnnnnnnnnnnnnnnnnnnnnnnnnnnnnnnnnnnnnnnnnnnnnnnnnnnnnnnnnnnnnnnnnnnnnnnnnnnnnnnnnnnnnnnnnnnnnnnnnnnnnnnnnnnnnnnnnnnnnnnnnnnnnnnnnnnnnnnnnnnnnnnnnnnnnnnnnnnnnnnnnnnnnnnnnnnnnnnnnnnnnnnnnnnnnnnnnnnnnnnnnnnnnnnnnnnnnnnnnnnnnnnnnnnnnnnnnnnnnnnnnnnnnnnnnnnnnnnnnnnnnnnnnnnnnnnnnnnnnnnnnnnnnnnnnnnnnnnnnnnnnnnnnnnnnnnnnnnnnnnnnnnnnnnnnnnnnnnnnnnnnnnnnnnnnnnnnnnnnnnnnnnnnnnnnnnnnnnnnnnnnnnnnnnnnnnnnnnnnnnnnnnnnnnnnnnnnnnnnnnnnnnnnnnnnnnnnnnnnnnnnnnnnnnnnnnnnnnnnnnnnnnnnnnnnnnnnnnnnnnnnnnnnnnnnnnnnnnnnnnnnnnnnnnnnnnnnnnnnnnnnnnnnnnnnnnnnnnnnnnnnnnnnnnnnnnnnnnnnnnnnnnnnnnnnnnnnnnnnnnnnnnnnnnnnnnnnnnnnnnnnnnnnnnnnnnnnnnnnnnnnnnnnnnnnnnnnnnnnnnnnnnnnnnnnnnnnnnnnnnnnnnnnnnnnnnnnnnnnnnnnnnnnnnnnnnnnnnnnnnnnnnnnnnnnnnnnnnnnnnnnnnnnnnnnnnnnnnnnnnnnnnnnnnnnnnnnnnnnnnnnnnnnnnnnnnnnnnnnnnnnnnnnnnnnnnnnnnnnnnnnnnnnnnnnnnnnnnnnnnnnnnnnnnnnnnnnnnnnnnnnnnnnnnnnnnnnnnnnnnnnnnnnnnnnnnnnnnnnnnnnnnnnnnnnnnnnnnnnnnnnnnnnnnnnnnnnnnnnnnnnnnnnnnnnnnnnnnnnnnnnnnnnnnnnnnnnnnnnnnnnnnnnnnnnnnnnnnnnnnnnnnnnnnnnnnnnnnnnnnnnnnnnnnnnnnnnnnnnnnnnnnnnnnnnnnnnnnnnnnnnnnnnnnnnnnnnnnnnnnnnnnnnnnnnnnnnnnnnnnnnnnnnnnnnnnnnnnnnnnnnnnnnnnnnnnnnnnnnnnnnnnnnnnnnnnnnnnnnnnnnnnnnnnnnnnnnnnnnnnnnnnnnnnnnnnnnnnnnnnnnnnnnnnnnnnnnnnnnnnnnnnnnnnnnnnnnnnnnnnnnnnnnnnnnnnnnnnnnnnnnnnnnnnnnnnnnnnnnnnnnnnnnnnnnnnnnnnnnnnnnnnnnnnnnnnnnnnnnnnnnnnnnnnnnnnnnnnnnnnnnnnnnnnnnnnnnnnnnnnnnnnnnnnnnnnnnnnnnnnnnnnnnnnnnnnnnnnnnnnnnnnnnnnnnnnnnnnnnnnnnnnnnnnnnnnnnnnnnnnnnnnnnnnnnnnnnnnnnnnnnnnnnnnnnnnnnnnnnnnnnnnnnnnnnnnnnnnnnnnnnnnnnnnnnnnnnnnnnnnnnnnnnnnnnnnnnnnnnnnnnnnnnnnnnnnnnnnnnnnnnnnnnnnnnnnnnnnnnnnnnnnnnnnnnnnnnnnnnnnnnnnnnnnnnnnnnnnnnnnnnnnnnnnnnnnnnnnnnnnnnnnnnnnnnnnnnnnnnnnnnnnnnnnnnnnnnnnnnnnnnnnnnnnnnnnnnnnnnnnnnnnnnnnnnnnnnnnnnnnnnnnnnnnnnnnnnnnnnnnnnnnnnnnnnnnnnnnnnnnnnnnnnnnnnnnnnnnnnnnnnnnnnnnnnnnnnnnnnnnnnnnnnnnnnnnnnnnnnnnnnnnnnnnnnnnnnnnnnnnnnnnnnnnnnnnnnnnnnnnnnnnnnnnnnnnnnnnnnnnnnnnnnnnnnnnnnnnnnnnnnnnnnnnnnnnnnnnnnnnnnnnnnnnnnnnnnnnnnnnnnnnnnnnnnnnnnnnnnnnnnnnnnnnnnnnnnnnnnnnnnnnnnnnnnnnnnnnnnnnnnnnnnnnnnnnnnnnnnnnnnnnnnnnnnnnnnnnnnnnnnnnnnnnnnnnnnnnnnnnnnnnnnnnnnnnnnnnnnnnnnnnnnnnnnnnnnnnnnnnnnnnnnnnnnnnnnnnnnnnnnnnnnnnnnnnnnnnnnnnnnnnnnnnnnnnnnnnnnnnnnnnnnnnnnnnnnnnnnnnnnnnnnnnnnnnnnnnnnnnnnnnnnnnnnnnnnnnnnnnnnnnnnnnnnnnnnnnnnnnnnnnnnnnnnnnnnnnnnnnnnnnnnnnnnnnnnnnnnnnnnnnnnnnnnnnnnnnnnnnnnnnnnnnnnnnnnnnnnnnnnnnnnnnnnnnnnnnnnnnnnnnnnnnnnnnnnnnnnnnnnnnnnnnnnnnnnnnnnnnnnnnnnnnnnnnnnnnnnnnnnnnnnnnnnnnnnnnnnnnnnnnnnnnnnnnnnnnnnnnnnnnnnnnnnnnnnnnnnnnnnnnnnnnnnnnnnnnnnnnnnnnnnnnnnnnnnnnnnnnnnnnnnnnnnnnnnnnnnnnnnnnnnnnnnnnnnnnnnnnnnnnnnnnnnnnnnnnnnnnnnnnnnnnnnnnnnnnnnnnnnnnnnnnnnnnnnnnnnnnnnnnnnnnnnnnnnnnnnnnnnnnnnnnnnnnnnnnnnnnnnnnnnnnnnnnnnnnnnnnnnnnnnnnnnnnnnnnnnnnnnnnnnnnnnnnnnnnnnnnnnnnnnnnnnnnnnnnnnnnnnnnnnnnnnnnnnnnnnnnnnnnnnnnnnnnnnnnnnnnnnnnnnnnnnnnnnnnnnnnnnnnnnnnnnnnnnnnnnnnnnnnnnnnnnnnnnnnnnnnnnnnnnnnnnnnnnnnnnnnnnnnnnnnnnnnnnnnnnnnnnnnnnnnnnnnnnnnnnnnnnnnnnnnnnnnnnnnnnnnnnnnnnnnnnnnnnnnnnnnnnnnnnnnnnnnnnnnnnnnnnnnnnnnnnnnnnnnnnnnnnnnnnnnnnnnnnnnnnnnnnnnnnnnnnnnnnnnnnnnnnnnnnnnnnnnnnnnnnnnnnnnnnnnnnnnnnnnnnnnnnnnnnnnnnnnnnnnnnnnnnnnnnnnnnnnnnnnnnnnnnnnnnnnnnnnnnnnnnnnnnnnnnnnnnnnnnnnnnnnnnnnnnnnnnnnnnnnnnnnnnnnnnnnnnnnnnnnnnnnnnnnnnnnnnnnnnnnnnnnnnnnnnnnnnnnnnnnnnnnnnnnnnnnnnnnnnnnnnnnnnnnnnnnnnnnnnnnnnnnnnnnnnnnnnnnnnnnnnnnnnnnnnnnnnnnnnnnnnnnnnnnnnnnnnnnnnnnnnnnnnnnnnnnnnnnnnnnnnnnnnnnnnnnnnnnnnnnnnnnnnnnnnnnnnnnnnnnnnnnnnnnnnnnnnnnnnnnnnnnnnnnnnnnnnnnnnnnnnnnnnnnnnnnnnnnnnnnnnnnnnnnnnnnnnnnnnnnnnnnnnnnnnnnnnnnnnnnnnnnnnnnnnnnnnnnnnnnnnnnnnnnnnnnnnnnnnnnnnnnnnnnnnnnnnnnnnnnnnnnnnnnnnnnnnnnnnnnnnnnnnnnnnnnnnnnnnnnnnnnnnnnnnnnnnnnnnnnnnnnnnnnnnnnnnnnnnnnnnnnnnnnnnnnnnnnnnnnnnnnnnnnnnnnnnnnnnnnnnnnnnnnnnnnnnnnnnnnnnnnnnnnnnnnnnnnnnnnnnnnnnnnnnnnnnnnnnnnnnnnnnnnnnnnnnnnnnnnnnnnnnnnnnnnnnnnnnnnnnnnnnnnnnnnnnnnnnnnnnnnnnnnnnnnnnnnnnnnnnnnnnnnnnnnnnnnnnnnnnnnnnnnnnnnnnnnnnnnnnnnnnnnnnnnnnnnnnnnnnnnnnnnnnnnnnnnnnnnnnnnnnnnnnnnnnnnnnnnnnnnnnnnnnnnnnnnnnnnnnnnnnnnnnnnnnnnnnnnnnnnnnnnnnnnnnnnnnnnnnnnnnnnnnnnnnnnnnnnnnnnnnnnnnnnnnnnnnnnnnnnnnnnnnnnnnnnnnnnnnnnnnnnnnnnnnnnnnnnnnnnnnnnnnnnnnnnnnnnnnnnnnnnnnnnnnnnnnnnnnnnnnnnnnnnnnnnnnnnnnnnnnnnnnnnnnnnnnnnnnnnnnnnnnnnnnnnnnnnnnnnnnnnnnnnnnnnnnnnnnnnnnnnnnnnnnnnnnnnnnnnnnnnnnnnnnnnnnnnnnnnnnnnnnnnnnnnnnnnnnnnnnnnnnnnnnnnnnnnnnnnnnnnnnnnnnnnnnnnnnnnnnnnnnnnnnnnnnnnnnnnnnnnnnnnnnnnnnnnnnnnnnnnnnnnnnnnnnnnnnnnnnnnnnnnnnnnnnnnnnnnnnnnnnnnnnnnnnnnnnnnnnnnnnnnnnnnnnnnnnnnnnnnnnnnnnnnnnnnnnnnnnnnnnnnnnnnnnnnnnnnnnnnnnnnnnnnnnnnnnnnnnnnnnnnnnnnnnnnnnnnnnnnnnnnnnnnnnnnnnnnnnnnnnnnnnnnnnnnnnnnnnnnnnnnnnnnnnnnnnnnnnnnnnnnnnnnnnnnnnnnnnnnnnnnnnnnnnnnnnnnnnnnnnnnnnnnnnnnnnnnnnnnnnnnnnnnnnnnnnnnnnnnnnnnnnnnnnnnnnnnnnnnnnnnnnnnnnnnnnnnnnnnnnnnnnnnnnnnnnnnnnnnnnnnnnnnnnnnnnnnnnnnnnnnnnnnnnnnnnnnnnnnnnnnnnnnnnnnnnnnnnnnnnnnnnnnnnnnnnnnnnnnnnnnnnnnnnnnnnnnnnnnnnnnnnnnnnnnnnnnnnnnnnnnnnnnnnnnnnnnnnnnnnnnnnnnnnnnnnnnnnnnnnnnnnnnnnnnnnnnnnnnnnnnnnnnnnnnnnnnnnnnnnnnnnnnnnnnnnnnnnnnnnnnnnnnnnnnnnnnnnnnnnnnnnnnnnnnnnnnnnnnnnnnnnnnnnnnnnnnnnnnnnnnnnnnnnnnnnnnnnnnnnnnnnnnnnnnnnnnnnnnnnnnnnnnnnnnnnnnnnnnnnnnnnnnnnnnnnnnnnnnnnnnnnnnnnnnnnnnnnnnnnnnnnnnnnnnnnnnnnnnnnnnnnnnnnnnnnnnnnnnnnnnnnnnnnnnnnnnnnnnnnnnnnnnnnnnnnnnnnnnnnnnnnnnnnnnnnnnnnnnnnnnnnnnnnnnnnnnnnnnnnnnnnnnnnnnnnnnnnnnnnnnnnnnnnnnnnnnnnnnnnnnnnnnnnnnnnnnnnnnnnnnnnnnnnnnnnnnnnnnnnnnnnnnnnnnnnnnnnnnnnnnnnnnnnnnnnnnnnnnnnnnnnnnnnnnnnnnnnnnnnnnnnnnnnnnnnnnnnnnnnnnnnnnnnnnnnnnnnnnnnnnnnnnnnnnnnnnnnnnnnnnnnnnnnnnnnnnnnnnnnnnnnnnnnnnnnnnnnnnnnnnnnnnnnnnnnnnnnnnnnnnnnnnnnnnnnnnnnnnnnnnnnnnnnnnnnnnnnnnnnnnnnnnnnnnnnnnnnnnnnnnnnnnnnnnnnnnnnnnnnnnnnnnnnnnnnnnnnnnnnnnnnnnnnnnnnnnnnnnnnnnnnnnnnnnnnnnnnnnnnnnnnnnnnnnnnnnnnnnnnnnnnnnnnnnnnnnnnnnnnnnnnnnnnnnnnnnnnnnnnnnnnnnnnnnnnnnnnnnnnnnnnnnnnnnnnnnnnnnnnnnnnnnnnnnnnnnnnnnnnnnnnnnnnnnnnnnnnnnnnnnnnnnnnnnnnnnnnnnnnnnnnnnnnnnnnnnnnnnnnnnnnnnnnnnnnnnnnnnnnnnnnnnnnnnnnnnnnnnnnnnnnnnnnnnnnnnnnnnnnnnnnnnnnnnnnnnnnnnnnnnnnnnnnnnnnnnnnnnnnnnnnnnnnnnnnnnnnnnnnnnnnnnnnnnnnnnnnnnnnnnnnnnnnnnnnnnnnnnnnnnnnnnnnnnnnnnnnnnnnnnnnnnnnnnnnnnnnnnnnnnnnnnnnnnnnnnnnnnnnnnnnnnnnnnnnnnnnnnnnnnnnnnnnnnnnnnnnnnnnnnnnnnnnnnnnnnnnnnnnnnnnnnnnnnnnnnnnnnnnnnnnnnnnnnnnnnnnnnnnnnnnnnnnnnnnnnnnnnnnnnnnnnnnnnnnnnnnnnnnnnnnnnnnnnnnnnnnnnnnnnnnnnnnnnnnnnnnnnnnnnnnnnnnnnnnnnnnnnnnnnnnnnnnnnnnnnnnnnnnnnnnnnnnnnnnnnnnnnnnnnnnnnnnnnnnnnnnnnnnnnnnnnnnnnnnnnnnnnnnnnnnnnnnnnnnnnnnnnnnnnnnnnnnnnnnnnnnnnnnnnnnnnnnnnnnnnnnnnnnnnnnnnnnnnnnnnnnnnnnnnnnnnnnnnnnnnnnnnnnnnnnnnnnnnnnnnnnnnnnnnnnnnnnnnnnnnnnnnnnnnnnnnnnnnnnnnnnnnnnnnnnnnnnnnnnnnnnnnnnnnnnnnnnnnnnnnnnnnnnnnnnnnnnnnnnnnnnnnnnnnnnnnnnnnnnnnnnnnnnnnnnnnnnnnnnnnnnnnnnnnnnnnnnnnnnnnnnnnnnnnnnnnnnnnnnnnnnnnnnnnnnnnnnnnnnnnnnnnnnnnnnnnnnnnnnnnnnnnnnnnnnnnnnnnnnnnnnnnnnnnnnnnnnnnnnnnnnnnnnnnnnnnnnnnnnnnnnnnnnnnnnnnnnnnnnnnnnnnnnnnnnnnnnnnnnnnnnnnnnnnnnnnnnnnnnnnnnnnnnnnnnnnnnnnnnnnnnnnnnnnnnnnnnnnnnnnnnnnnnnnnnnnnnnnnnnnnnnnnnnnnnnnnnnnnnnnnnnnnnnnnnnnnnnnnnnnnnnnnnnnnnnnnnnnnnnnnnnnnnnnnnnnnnnnnnnnnnnnnnnnnnnnnnnnnnnnnnnnnnnnnnnnnnnnnnnnnnnnnnnnnnnnnnnnnnnnnnnnnnnnnnnnnnnnnnnnnnnnnnnnnnnnnnnnnnnnnnnnnnnnnnnnnnnnnnnnnnnnnnnnnnnnnnnnnnnnnnnnnnnnnnnnnnnnnnnnnnnnnnnnnnnnnnnnnnnnnnnnnnnnnnnnnnnnnnnnnnnnnnnnnnnnnnnnnnnnnnnnnnnnnnnnnnnnnnnnnnnnnnnnnnnnnnnnnnnnnnnnnnnnnnnnnnnnnnnnnnnnnnnnnnnnnnnnnnnnnnnnnnnnnnnnnnnnnnnnnnnnnnnnnnnnnnnnnnnnnnnnnnnnnnnnnnnnnnnnnnnnnnnnnnnnnnnnnnnnnnnnnnnnnnnnnnnnnnnnnnnnnnnnnnnnnnnnnnnnnnnnnnnnnnnnnnnnnnnnnnnnnnnnnnnnnnnnnnnnnnnnnnnnnnnnnnnnnnnnnnnnnnnnnnnnnnnnnnnnnnnnnnnnnnnnnnnnnnnnnnnnnnnnnnnnnnnnnnnnnnnnnnnnnnnnnnnnnnnnnnnnnnnnnnnnnnnnnnnnnnnnnnnnnnnnnnnnnnnnnnnnnnnnnnnnnnnnnnnnnnnnnnnnnnnnnnnnnnnnnnnnnnnnnnnnnnnnnnnnnnnnnnnnnnnnnnnnnnnnnnnnnnnnnnnnnnnnnnnnnnnnnnnnnnnnnnnnnnnnnnnnnnnnnnnnnnnnnnnnnnnnnnnnnnnnnnnnnnnnnnnnnnnnnnnnnnnnnnnnnnnnnnnnnnnnnnnnnnnnnnnnnnnnnnnnnnnnnnnnnnnnnnnnnnnnnnnnnnnnnnnnnnnnnnnnnnnnnnnnnnnnnnnnnnnnnnnnnnnnnnnnnnnnnnnnnnnnnnnnnnnnnnnnnnnnnnnnnnnnnnnnnnnnnnnnnnnnnnnnnnnnnnnnnnnnnnnnnnnnnnnnnnnnnnnnnnnnnnnnnnnnnnnnnnnnnnnnnnnnnnnnnnnnnnnnnnnnnnnnnnnnnnnnnnnnnnnnnnnnnnnnnnnnnnnnnnnnnnnnnnnnnnnnnnnnnnnnnnnnnnnnnnnnnnnnnnnnnnnnnnnnnnnnnnnnnnnnnnnnnnnnnnnnnnnnnnnnnnnnnnnnnnnnnnnnnnnnnnnnnnnnnnnnnnnnnnnnnnnnnnnnnnnnnnnnnnnnnnnnnnnnnnnnnnnnnnnnnnnnnnnnnnnnnnnnnnnnnnnnnnnnnnnnnnnnnnnnnnnnnnnnnnnnnnnnnnnnnnnnnnnnnnnnnnnnnnnnnnnnnnnnnnnnnnnnnnnnnnnnnnnnnnnnnnnnnnnnnnnnnnnnnnnnnnnnnnnnnnnnnnnnnnnnnnnnnnnnnnnnnnnnnnnnnnnnnnnnnnnnnnnnnnnnnnnnnnnnnnnnnnnnnnnnnnnnnnnnnnnnnnnnnnnnnnnnnnnnnnnnnnnnnnnnnnnnnnnnnnnnnnnnnnnnnnnnnnnnnnnnnnnnnnnnnnnnnnnnnnnnnnnnnnnnnnnnnnnnnnnnnnnnnnnnnnnnnnnnnnnnnnnnnnnnnnnnnnnnnnnnnnnnnnnnnnnnnnnnnnnnnnnnnnnnnnnnnnnnnnnnnnnnnnnnnnnnnnnnnnnnnnnnnnnnnnnnccccctttagtgaggggttattttggaggtaggcatgtatcgcagcaaagagcagacgagctatgccaagttgatcggcagcgcaatcgcctctggcgcgccgctcctcgctggtgcggctgccggccttggcaagacgcacggctacacgatcccgctggtcacatccggcaagcgcgttgcgatctgcatgtcaacccgtcagttgatcgcgcagtacatggaatcggatgcactcaaggcggcgctggagatgtcgccatcgaccacggttgccgtgctgcgttcgcgccgcgaattcgacagcagcaaggactaccgcgaacacaaggaacaggcgttggcggcgcaagtgctggtggtgacccatgccgccgccctgatcgatagcttcaaccccgactatgccgatcttcgcgcccgtgatgtcgtactgatcgatgaggcggatttgctggccgacgccgccgatctgcgttcgacgttcagcatcgatgcccagggcgacacggatcgcaatgaagtgctgcgccgtgcatcgaagtctgatgacccggaggagcgtgccgccgcgagggccatacagtacgccatcgagcatccggccttctacaaggtggtcgggttcgatgatgatggcgacctgatgctcaagcaccggatgccgggacggatgctcaagccattggtcgcagactgtaagcgtgtgatcttcaccagcggtacgctgccggtcaacgggcgcttcgattacttcatccgtgccatcggcctgaccagcatcgatccgtcgagccgccacattgatccggtgaagcacggcaacctgaccgttgagattgccggcgaggaaatgagcgacgaacaaaaggcacaggacatcgcgtcagccgaacgtccatgtctggtgctgacgacaagccacgccgacaccgagcgcctcggtgccttgataaagggcgcagtagtccggcagaagggcgaagcattgacggatgcggtggcgcgctgtccggctgatgccattctggttgccgccggtgcgtggtcgggactcgactcaccggcgctgcgctggaaaaccgtggtgataccgaaagcgccttacggtgcgccggtcgagatcgacagccggcagatcacgcactacatcgacagcaaggtgaccgcgacccgtcgcatcaatcagggtctgcaccggggtctgcggacgcaggatgcggtctgcaaactgctgctgctcgacccgcgctgcaaccgtcctgagttgttgacggcgattccggctcgtttccctgtgcagtcgttcgatgaaggactgcggggcgtcgtggtgctgtcaaaagcggagcgcgatcctgccctgcggagcgcggccctgaaatatcacggggcgaagtgcagggactgcgaggagacggcattgcaccgacttgatgttcaccacctcgacccgattgccgaaggtcagcgcaagacgacggtcaaggatgttgtcgtcctctgcaagaaccaccatgctgacgcgcatctcttactaacgaacctccgaaagtagataaggttcggtgatgtgccaacgggtagatgtcagccggatcagcaggaggccgcgattgaaccgatcttgcagtaggcgcaggcgttgggtgaggcgtgggcgtagcgttactgcgttcgcgtagcttcaacctgccgcagcaccttgaccccatccaccccaactgccgcgcagacctccaagaattccacgacatccagtcggcgctcaccgccctcgtactttgacacgaacgactgagggcgacagaggtggccccggaaattagttctggtagataagtgaaggctctgctctgatgggcgacgcaatcgcccgaaaaaggagcagcaatgagaagaccgagaaggaaccacaccgccgcgttcaaggcgaaagtcgcggtagccgccctgaagggcgacaagacgctggccgaactggcggagaagttcgatgttcacgccaaccagatcacgcaatggaagacgcaattgctggaagcggcgacaaacgtcttcctgacaccggccgagaaacgcgagtcggtcggccccagcgtcaaggacatgcaggccaagatcgggcagcttgccttggagaatgattttttggccggcgcgctcggtcgcatcggcgatgcgagcgcaaagaaatgatcgacaccacgcacgacctgccgatccgtcgccaagccgagctgcttgaggtttctcgctcaaatgtctattacctgcccaggccggcctccgaggccgatctggcggtgatgcgccgaatcgacgaactgcatctgaactatcccttcgccggcgcccgtatgctgcgtgacatgctcaatcgggaaggcatccagatcgggcgcaagcatgtcggcacgctcatgggcaagatgggcattgcggcgatctaccgcaagcgcaacaccagcgcgccgcatccgaagcatccggtctatccgtatcttctgaagaatctggtcatcgacaggccgaaccatgtgtgggcgactgacattacctacatccccatgaagcggggcttcgtctatctggtcgccattctcgattgggcgacgcgcaaggttctggcgcatcgggtgtcgatcagcatgaccacggacttctgtgtggaggcactggaagaggcgattgccaggtacggaccaccggagatcttcaataccgaccagggcagccagttcaccagtgccgacttcaccagagtgctgaccgacaacgccatcaggatcagcatggacggcaagggccgctggctcgataacgtcttcgtcgagcggctctggcgcagcgtcaagtacgagcacgtctatctgcatgcctatgagagcgtcaccgaagcgcacgagcaactggcgggctacttcgagttctacaacggggagcgtccgcactcatcgctcggcgctcggacacccgatgcggcatacttcgattcgacggcagtaaagttggcagcatgagctacgtgagttacccaccgtgctgctcgcctacggtctagagggaccttcggcaagccgccccgtggataactcgtaaccgcagagagttcacttaagaaaccggcaaattctgtcctaaggaacggggccacctctttccgctttgtggtggatgccgacctacgaaacgcatgcccatggcatcgctagtgacggcaacggctgcatactgggcatacgtctaggcgcccacaacaacctttcccggaaaacctgcgaccccgtatcgaggcagcgagcaccaccagttcggcgaagttcggcgacccgccataccgaggtcggccaagttcagcgcccagcatacgcactgtgttgaaccggctcgatattccgcccgcgccaaccggaatagcccactttggttcggtagcaggttcggtgagcccgccaagtcgaccagcgagacagggaaaactgttacgcttcttcgcactacccaacgaagaacatgccggtgtcatggactgaaaatccgtgtgtcggcagttcgattctgcccctggccaccagtaacaccaaggccccgctcgtcttatgacctgcggggcctttgcttttgctgcgggctgccgctggacaggatcagctggtcgggggcgccatgaggctttgtggagacatggcgtcggcgccataaaaaaacccgatgctttgtgggcaccgggtcttagaccagcccctttggagggccggaggaggagacgttgaaagtaacttatgcggccttctttaccttcgcggctgcagaaccaactgcattgacaacggcgttggtagcggctgtcacattggcttcggcgatttcgccggcttgctttgccgccttggtcatgctgtcgtaggccgagttagcggcggcgattgcagactttacggacgacatggcgacatctgagcctgcgggggcattcttgagggccttatcgatcacagtttcgacgttcttgttgaggtcagaaacctgcgcttcgactaccttggacagttctccgtgtgtttcggaagcgatcacatacacgctgcgcgaataggcaacaaccttttccatggacggctgggcaagcgtagtttgaaccgcgatcacttcttttgcatccttggcgccgagcagagccttgacgttggcagcactgtcttccaagaaggagcgggcggtattgaggttcagagcggcaaggcgctcggcactggcgaaagccgtattggcgatagtcagcatggtttctacgttggccttgttggcgctggcgaacttttcggtaatggctttcatgaggaatctccgtaatattgatagggctagtaggtgtctggttgcactgccaaccctgaattcagggatatgttgcagtgcaccatgaagcgaagtatagagatcaaactgtgcctgtcaaggaatatttgttgcagtgcaccaatctcgttcatcgagtccgtcacgtcgcccatccagactttcgcaatgtgttgctgcgcgcttcattttgaccatcgtccgcgaacttcactgaccaacacctgccagcccgcttccaagtcgaaatgcgcccttgcgcaagctcgctttgatcactggaagatgcgcgcactggtcaatcgacgccgcgcatgcaacactcatgggacattcaccctttgtcataggattccgatgagaaccttagtctgcttcgtgttgccggcagttgcctgtttctttccgctggccgcttacgcgggcggcagttgcagtgcatcggtcggcaagtccagaatttgcatggatttctccaaaatcagtggatctgccgcatcaatctgtccgccgaatttccagtccagcagcagtggttgcaacacgacgggagcgagtggttcgtgcagcgtaggccctatggtgacttactactgggattcaacgtccaatccaaaagacgtttgcaacatgtccggtggtgcttggctgtcggggtcgggcgtgccgactggcaacacatccggcgcccctccagcatctttggggtcatcgcccaacaataaatcgaataccagcaaaggtgattccgacaaaggcccttccagaagttcagcgcaagcctccaccagtggagcggggcgttcggcagacgccccccgggaacccaccggatctgctaccgggcgttcgagtagcaattcctcaggcaataacgcaggcaaatccacagacagttgctgggatgcgcctagtaattgtgtagtcgttaagagtagtcgctggaaaaaggatcaatttattattgtctatgagaacgtctgcgacaagagggtctacgttggaaaatgcctggaacaaaagggcggcaaatcatcttgtggtgctgatggaattccggcgggcaagaccaaccattgggatacctataacgcaaccggaagaagctttgtcaaatggataggcgtggagaatccggccgatgactggct

SEQ ID NO: 96 - DNA, 15265 bp, Artificial Sequence
  Synthetic Oligonucleotide
  misc_feature (1)..(2665): n is a, c, g, or t
nnnnnnnnnnnnnnnnnnnnnnnnnnnnnnnnnnnnnnnnnnnnnnnnnnnnnnnnnnnnnnnnnnnnnnnnnnnnnnnnnnnnnnnnnnnnnnnnnnnnnnnnnnnnnnnnnnnnnnnnnnnnnnnnnnnnnnnnnnnnnnnnnnnnnnnnnnnnnnnnnnnnnnnnnnnnnnnnnnnnnnnnnnnnnnnnnnnnnnnnnnnnnnnnnnnnnnnnnnnnnnnnnnnnnnnnnnnnnnnnnnnnnnnnnnnnnnnnnnnnnnnnnnnnnnnnnnnnnnnnnnnnnnnnnnnnnnnnnnnnnnnnnnnnnnnnnnnnnnnnnnnnnnnnnnnnnnnnnnnnnnnnnnnnnnnnnnnnnnnnnnnnnnnnnnnnnnnnnnnnnnnnnnnnnnnnnnnnnnnnnnnnnnnnnnnnnnnnnnnnnnnnnnnnnnnnnnnnnnnnnnnnnnnnnnnnnnnnnnnnnnnnnnnnnnnnnnnnnnnnnnnnnnnnnnnnnnnnnnnnnnnnnnnnnnnnnnnnnnnnnnnnnnnnnnnnnnnnnnnnnnnnnnnnnnnnnnnnnnnnnnnnnnnnnnnnnnnnnnnnnnnnnnnnnnnnnnnnnnnnnnnnnnnnnnnnnnnnnnnnnnnnnnnnnnnnnnnnnnnnnnnnnnnnnnnnnnnnnnnnnnnnnnnnnnnnnnnnnnnnnnnnnnnnnnnnnnnnnnnnnnnnnnnnnnnnnnnnnnnnnnnnnnnnnnnnnnnnnnnnnnnnnnnnnnnnnnnnnnnnnnnnnnnnnnnnnnnnnnnnnnnnnnnnnnnnnnnnnnnnnnnnnnnnnnnnnnnnnnnnnnnnnnnnnnnnnnnnnnnnnnnnnnnnnnnnnnnnnnnnnnnnnnnnnnnnnnnnnnnnnnnnnnnnnnnnnnnnnnnnnnnnnnnnnnnnnnnnnnnnnnnnnnnnnnnnnnnnnnnnnnnnnnnnnnnnnnnnnnnnnnnnnnnnnnnnnnnnnnnnnnnnnnnnnnnnnnnnnnnnnnnnnnnnnnnnnnnnnnnnnnnnnnnnnnnnnnnnnnnnnnnnnnnnnnnnnnnnnnnnnnnnnnnnnnnnnnnnnnnnnnnnnnnnnnnnnnnnnnnnnnnnnnnnnnnnnnnnnnnnnnnnnnnnnnnnnnnnnnnnnnnnnnnnnnnnnnnnnnnnnnnnnnnnnnnnnnnnnnnnnnnnnnnnnnnnnnnnnnnnnnnnnnnnnnnnnnnnnnnnnnnnnnnnnnnnnnnnnnnnnnnnnnnnnnnnnnnnnnnnnnnnnnnnnnnnnnnnnnnnnnnnnnnnnnnnnnnnnnnnnnnnnnnnnnnnnnnnnnnnnnnnnnnnnnnnnnnnnnnnnnnnnnnnnnnnnnnnnnnnnnnnnnnnnnnnnnnnnnnnnnnnnnnnnnnnnnnnnnnnnnnnnnnnnnnnnnnnnnnnnnnnnnnnnnnnnnnnnnnnnnnnnnnnnnnnnnnnnnnnnnnnnnnnnnnnnnnnnnnnnnnnnnnnnnnnnnnnnnnnnnnnnnnnnnnnnnnnnnnnnnnnnnnnnnnnnnnnnnnnnnnnnnnnnnnnnnnnnnnnnnnnnnnnnnnnnnnnnnnnnnnnnnnnnnnnnnnnnnnnnnnnnnnnnnnnnnnnnnnnnnnnnnnnnnnnnnnnnnnnnnnnnnnnnnnnnnnnnnnnnnnnnnnnnnnnnnnnnnnnnnnnnnnnnnnnnnnnnnnnnnnnnnnnnnnnnnnnnnnnnnnnnnnnnnnnnnnnnnnnnnnnnnnnnnnnnnnnnnnnnnnnnnnnnnnnnnnnnnnnnnnnnnnnnnnnnnnnnnnnnnnnnnnnnnnnnnnnnnnnnnnnnnnnnnnnnnnnnnnnnnnnnnnnnnnnnnnnnnnnnnnnnnnnnnnnnnnnnnnnnnnnnnnnnnnnnnnnnnnnnnnnnnnnnnnnnnnnnnnnnnnnnnnnnnnnnnnnnnnnnnnnnnnnnnnnnnnnnnnnnnnnnnnnnnnnnnnnnnnnnnnnnnnnnnnnnnnnnnnnnnnnnnnnnnnnnnnnnnnnnnnnnnnnnnnnnnnnnnnnnnnnnnnnnnnnnnnnnnnnnnnnnnnnnnnnnnnnnnnnnnnnnnnnnnnnnnnnnnnnnnnnnnnnnnnnnnnnnnnnnnnnnnnnnnnnnnnnnnnnnnnnnnnnnnnnnnnnnnnnnnnnnnnnnnnnnnnnnnnnnnnnnnnnnnnnnnnnnnnnnnnnnnnnnnnnnnnnnnnnnnnnnnnnnnnnnnnnnnnnnnnnnnnnnnnnnnnnnnnnnnnnnnnnnnnnnnnnnnnnnnnnnnnnnnnnnnnnnnnnnnnnnnnnnnnnnnnnnnnnnnnnnnnnnnnnnnnnnnnnnnnnnnnnnnnnnnnnnnnnnnnnnnnnnnnnnnnnnnnnnnnnnnnnnnnnnnnnnnnnnnnnnnnnnnnnnnnnnnnnnnnnnnnnnnnnnnnnnnnnnnnnnnnnnnnnnnnnnnnnnnnnnnnnnnnnnnnnnnnnnnnnnnnnnnnnnnnnnnnnnnnnnnnnnnnnnnnnnnnnnnnnnnnnnnnnnnnnnnnnnnnnnnnnnnnnnnnnnnnnnnnnnnnnnnnnnnnnnnnnnnnnnnnnnnnnnnnnnnnnnnnnnnnnnnnnnnnnnnnnnnnnnnnnnnnnnnnnnnnnnnnnnnnnnnnnnnnnnnnnnnnnngtcatgaaactggtgaaaggctggctggccaggatgcccgacagcagccgcgccgaggtgccggaattgccgaggtccagcacgttccccggctcccgcccgccgccgacgccaaagccgcgcacgcgccagatccccgccccccgtcccggcccacgctccggcgcgccaggctcctggacaatggtcgccccgagttgccgcagagcggctgcggtcgagagcacgtcctcgccctccagaagccccgaaatgaccgtttcgcccagcgccagggcgccgaacatgagggcgcggtgggacaccgacttgtcgccgggggcgcgaacgcggccctccaggcgggaaaccggatgggagacaagctttcgaggggtcgaaccggtggacaaagcgaactccagatgaggccggagggggccggaggggccgccgcaacggcgcggcgctctcgtagcatggcagaatttacttttgacagggttaaagacgcgtgacatacgctgcccgcctcgcggctgcaccgtgccatggcacaatccgcaacgcatttaccgggagatccagagtggtcaaagcgacctggggcaccaagcgcacctgtcaaaattgcgcggcgcgcttctacgatctcggcaagagcccgatcaagtgcccgaagtgcgggcgcgagcatgatcgggaggacttcgtgaaggtccgccgcgggcgcggcagcgccgcggccaccgccgccgcggcagccgccgccgcggccacactggcggccgccaagctggcggcggccaaggccaagaagatcgaggacggcgacgaggatctgccggaggtcgaagccgaccccgacggtctggaggacacgacggaactggaggacgacgacatcgaggtcgtcgtcgacgacaaagaggagagctgaccgccagagcggttgcttcccggcaggcggcgaattatatctccgcccgcttctcaggatttcggggccatagctcagctgggagagcgctacaatggcattgtagaggtcaacggttcgatcccgtttggctccaccaatgatatcaagggcttagctggcaacggctaagcccttgtttttgccacggacacactacggacacggcgggcgtaatttcggtcactttcagcggcaggcagccaagcgatgcacccccctcgccatagcccaaagtacccgtcctcatgcccatattgcggcgtcacaattcagcaacggtcggacagcagcaaggatcacgtcgtgcccaagtccgcgttcgcggtagtgcctcaagatgctctgacgattcgatgctgtaacggctgcaataacgaagtgaagtctgctgacgaccaagcgttcggcggctccgtgccttgttctcgcggtctcgcacgccataatccagcaatgtgcgggcgatacactcacaagctgacgtggcagcaaatcgtgaacctctaccggctcacgctgcctgacgagccgccgccgcagttgcaaccgacgtacaacgcggcgccgacgcaggcgcttcccatcatccggcccagcggcaacggtcgcgagctggtcatggctggctggggcctaatcccgtactggttaaagatcgaggaccttggcaagcggccctatgcgacgataaacgcacgggctgagacaatccgaacttcgccaacctatcacgagccattcaagaagcggcgatgcctcgtgccggcgacgggctggtatgtgtggcaggatgtccgcaagaagaaaacgcggccgatccatatgtgcgccaaggccgaaccattcgccttcgccggtgtctgggatgcctggaagggcgacggcggcccgggcatcatcagcttcgccattgtcaccaccgcagcggcgccgagcgttagcgtctatcgctcgcgcatgcccgtcgtcctcggtgatgcgcaatttgaccaatggatgctcgggacccctgacgaagcggcaacgctcatggtgccctatgaaggcgcgatagaggcttgggaagtatcgcccgacgtcggcagcccgaaaaataaccggccggaattattggaccgcgtcggcttgctctagccggcccgggtttacgtggacaggtcttcgccgtcgccgcgtgattacttgtggcatataggatcgccatgctgtgctgcacatgggcgggattaagtcgccgctcgacgcagtgcgggcggctatcgtggcggagcatagggccaaggcctgaatgggcgacgatggggccgggcatggttcgcagcctccctcttttggatggttggcataactttgcgatttcgtctttatcacctccaaagagaaaccgaccaagacgttgcagagtgggccgaaatgaccttcggcatccctttggctgttctcggcattgggatcgcggcggcctgggttatccgcaaggctcgcaaatcaaattaggacacaatcaaccattcgtcgctcgtcgcggttgcacgttaggatcggagaattcgcctccccgtctccggtagcgctacaccgccgttggtgcccgaaccacgaacgaaccgcttggcgataaattgcgggcgatacacccacaagctgacatggccgcaaatcgtgaacctctacaggctcacgctggccaagcggttcaatagccttcaggcccgagcaaagctgcgccgccagagaaacgcggcgactatggtaatgatgggatgccacacaacgccgccgagcgcccgggccatggcgtatcccggccgggcgacctcatcgaaaagggccgcgaacaagatggattgaagcatcgtgcccaacaccgccgagagcaggccgaccaaaagggcggctagtatcagtagtcctctgcggcgaacgtgcttggcgaggtgatagccacccacaacatcgagcgcgagcgccaacatcaggtctgggatttcttggcgcgcgacttggtctcagatttagctttcggactagactcggtgagtggagtgcgcagcatactcaacgccgcacgcaatgccgcgtcacgcctttgcgtggcttcggacgggggacggacgcactggcgcgcaacttcgcgagtctaccccgcctatcctcacaatgccatgtaatactgatttttaatggcctatatggcggtgcggcactctgcggaactttgtggcaccaacccggctttcagcccgttcttacaatggcattgtagaggtcaacggtttgatcccgtttggctccaccaacgatatcaagggcttaggggccatgctcctaggccctttttattgctgggtagcactggggtagcacgcgatcggaactctcagcccggagtagccgatccaaagcgggacaatgcggaacgcaggcgagatgctggcggcccgaaggcgaccacgcctgcattcggaaccggagggatagcttcgagagggtctttcgcggctcttgtctgcacggaacacgttcggaccgtcccgaccaggcgcgccggcttagcttttaagccttcctttcggaatgaagggcacgaccacatcgcttggatttggcctaaatgcacgaaggagcgccacagagcgctcatgcatcagccgccgcgcggcttcttccgcttccgggctcagcctccgaacggctattggctttgccaacctctgaacgtcggcctcggtgattctcgcccggcgcccgcggccgacgacagcaattcgacgggcggccagcgccgcctcgagctcgactttggtcatgcgcaggcgctgagcagcttgctcgagagtaaccatcttcggtggtcgtgccatattgaccgccatcatggtcggcggcctggttcgcgcaagcgcaacatcggcgcgcttccgatcgccgcgccggcctggcctgcggccgttgcctcgctgcccgcgctgcgccctcacgttacgcgttggtggcaggaaattggtacgtcattgacctgcccatcagctggccatggtcacctccaattaaatcccgcagctagccggcattctcgtcgccgaccggaattgccccggcgcggatactgtctgtggttggccgtgacacctccctaaactccgcgcgcccggtcacccttcagtgggtggtcgctcttttttgcgcaagtgctggttgcgatgataatccgtaaccgcctggtcggccaatgcgcaggcatcagtcacggcttcgccggcctcgatatcctcgggtacagcgtcgccgggcgaattgaggtctcgaagcgcggcagcgataccgacggcgatatgatggcgccgcgcggcaaccgccacgtcgaacaggcgacagaactccttgtctcggaaaaccatcgcgcgctccttatggtcaggggaatgcgtagtataacgaaaccttagcgctcccggcagaccccgaaatcgctacccggaatttgtcgagcgccgatgcggtggcccactccggcaactgtacgaggtcatcgtacggttcaccggggtggctctttttgttgcaaccagcgctagcaatccacgttctcctaagatcggcgtcgccccacctcgccgacacggcttgtggtcaggccgtttattctgcccaaacttgagacgcccggtcgttccttcgtggatcggccgggcttttttgcgtggggcggcaacgctcgcgtgaatccgagcgttgtgatcagttcatcatgcgccgcttgcttaacaagtgcgagtggtcggatgccagaagttacgccggatgaatttaaactagtcattgaatcccagatcggcggcacggcgacgctcgctgagtctgtgcgcgtgctcgtggctcaccatggaaagcctgcatggaagggcgtggtgcatgtcttcgatctggcagggcgcagcaaggccacccgggcctatgcatggtcatctccgatagagggcacccccaaaaagcgcttcttcacggtgctgcataagggcgggatcaattcgccgctggacgcggtgcgagcggcaatcgttgcggagaaccggggttaaggaaagcgccatgaacggtccgccctgatcgtcatgccgacctcgacgtgggacgccgtcttcctgatcatgccccgaacatcattggcacaaagcccagcggcgaatgcgcgatcgttcatcagatccttggttattgtatcgtcgtcgccctcggcaaatctcagataggcaaccctcttctcgtccagcattcgcgctgcggcttcgagtgcttgcgcctgctttttggtaaacgccttcttagccatgagcttggctccatcggcagcgagcggttggaccggggtcgcgctccaacgcgacttcggtccgctgacaattgccataagtgtgcaactgtcaatagggttgatccggcattagacggcgtacaattcaaactgatgcagtgtcgaccagctggaggcggtgcgcagcagcttcattccaagcgggcgtgcattttggggtgatcggccggaccatgcttgcagggcggctatctagccgagcaaatcgggggtcaaaagccgggtttcattggctcggatggtgctgcgcacccttatttggggcgtttgcgaatcggggtgcccactcgagcagcttgagtcttgctgaaaattgctgcgggccggctaaaacatgaaccccgcccgctcggcgtagcgatcgaccagcaacagcacggcatagacagaggcgtagtcgatgtcgccgctatacagctcggtcacgagtgcggtgaccaggccaatggctgcgacgagaagcgcgatcaggcgcgttttcacgaccaatctcctatcatcgcgaaaggaatgatgcggcgtctggcaagtgcttcaaggctctgcgcgccatcccattttcaacagccgatccgcgacacccgaccaaatgaccactttgctgtgtgtcctcggcgtcggttttcgcgagtgggcgtttgtcgctctggccgcgcgaccgagcgcccatccgacgaccaggcgatgaaggaatgaatgcaactccaactcctctacgactgctgagcacatctcactcctaatcgtcgtcgcggcctccggccggatcggcgccgggtcacccccggcgtcgatacagcctggggttaggccggccgtgttctcccctaactccgcacgcccggccgctccacgaaggaacgaccgggctttttgcgtttgggggggatgccccgaaggctcggagtgacgcaagcattgcccgcgtcaaacgcatccaatgtcggcgaccagtgctggaagggcgactgaagccgcccaccggatgcccactagaactggcatcgataaaatcaggccttgaatttgataaaatcaggccttgaggtttacggctgcatctttgccgcgctctgcctgaagttcgtagctgatcttctgaccttcgttgagcccgttgagccccgagcgctcgaccgcgctgatatggacgaacacgtctttgccgccgctgtcgggttgaatgaagccgaagcccttctgggcgttgaaccactttactgtgcctgaagccatgatctgtatcctagaaaagctacgcaacagtgcgcgcgttcgccaaccgaagatgtgcaccatctccgggtggcatcccgttggcatcctcaacgcgagctcactttcttcaagccccccaaatgggctaccccatttggggggcttgcatattcgccggcgatcggagcgcatttggacgctcgactgccggtcgcccggctcgctaggtttcggccccatgagcgcccaaaatcccaatgctgaactgccacgcgacacagtccccggcgaatacgtagaactcgatgtcgatctgtttctgaaagccttctccgcgatgctcatgacagtaaagctgccgcacgccgagggcttcgctccaagccttggcgtcgcaatagaaggtctgcctcccgttgtcctggaggacacgccttcaaatcgcgccatggataccgctgcccgcctgtttgctggtgccgaccagcggctcagcttcgcctggcgcatggtcgtcgtcatgcgcatcgcaatggaggagcaataccgcagttaccgcaacgacactgcaggatcgatgcacatcgccctggcgatcaccgttgcgaaggggcgcggcagcgagcggacgacgaaggatgagcttcgggaatcgttcgacaagatgttccgtagcctgctgaagacaagtagcgacggcaaattcccgactgcggtgcgctggttgatggcgcagtcgttcgacagcgtgaggaggtcatgggtgacgctatggcacgcatgggacactcgggcatcctgatagccgccgccgcatgggctgggctggacgctccggtgaagtggcgctcgatcatcgtgcctgtcgtgcccttcgagaggccgaccgtcatcgatgaccaagtcgagagccgatacatcgacgcccgcaacacggcggttcgccggctgcgccaagtcattggccgggggctgcggtcgccggatgcgaaatgtacgatctacttcctcgaccctcgtgtgctgaagctgccggcgttctggccgacccggtttgctgcggtatgggagagcaggccgcatgatccaggcgttgtcgaaggcgtgcgcggcgaggtggttctgtccaaggcggagcgcgacccgtcactcagaaagcgcgttctcagccactatggccttgactgtcaggcgtgcggattggtgccgaaggtggccgcgcagatcgaggtccatcacctcgacccgatctcggagggagtacgccgcacgcaactaaaggacttgcggcctctctgccggaattgtcactcactggcccattccacgaacccgccaatgccggttgaacagctggcgaagatcgcagccgcgtgagggctcaccggcagcaaggaaaccggtgccgcagcgcgcttcaacgtgattcaatttgtggaggacgcactcaaggcgcggctgcctgacagcagggaagaggacgggccaacgaagccgacgctaaactgagagcgccaattgctgcccacgtcgattgatgaagatgcgacgaaggattagtccacgctgaatacccgatataggaaacccgcgatcaagaggatcgtcacagccgtcaggataagcagaaagctgcggtccctttgcggcgaagggcggaagagggattcgcctcttgaggctggcgccttgggcgtcggctggctttggcattgcgcgctttcgtttcggccgggcggcacccccgcgctggggtgcccgcccagagtggaccggatgggccacctcagtacggaaggtgaagttgctttagcgactcgttgatttcggcaacgtcgtcagaccagatatccgccggcatcgttgcgggatattgctcaccgtcggccagcaattcggttttgactccctcctgatgcccttcgggagcgcactccggccgttccgctgccgccaggtcatcgctaaaccatgaaagatggaagcggcgcgcatcgcgcgtcaacgatcaggcttgccaaggttgggggcgagggttcgaatcccttcgcccgctccaattttcctcaaagaaatcaggcggctagagcggtccttcagggccgttttttgctccccccgctctcggcgcgaaagcgcgcatatgcccgaaacagccgacgatgaggttgcggccgtcgtgcgggccacgctgcgagcctggatttccagagcgttacagtccggtgcgttccggcccgtcgtggatgccctggtagttccggtagtagtcccacttggacgaatagacgttgaagcgggtgggatagttatagctgtaagctgggtagctgtaatagtaggtcctggccggatagtaagtggtggtcgtttccggatagtacgtcgcttgcgagtagccgtagcgcgggtaataacgctcctgcgcgcagccaccaacggcgccggccagcgccgccaaagcgatgatggaactgacggatctcatgacggcctcctctgactgctgaaagaacaactcgggtttcccccggcggttccctcgttacgtcacgcgcgcgccgcctgtgccgaaactgcaccaatccgccgcaatcctgccaagttgcagcgaccagcaatagtcctgtccgacttggatcgcccgctcgggttgaatgtcacctggagagcagcaccggcaccctgcgagcgcggccgtgcgcaccgcagtggccggtatccgcgttggcatattgtcttcgagcgtggccagctccgccagcaggctctgctgcagatcggcggtgatgcagtcgccgagattcagcggaggggcctcccgccgtcccagcacccgcagcagctcgacgtcgcccgacagccgcccggccgcccaggccgcgtgggcgaggacgctgtgcgaatagaccgagccgtcgaggcaggcgacgactgagggctgcgaaagcggtgcctcgctttaattttgcgggatatcacccggccaccaccgccgccggacggcagagaatcgtgctggattggttgtgctcacctaaaatcatacccggcaggcttaatgaccgggaaatcgtctgcgatgccaccgtttccgctgctgtccgcatgtcctgcgctagcgcaatggttcaccgtcgcgcacttcacgcgagcttgagcggccgccgctagtccaattgagaaggctgtcgatatctggggcgtcaatagcttgaggccatgattctcaggatttcggggccatagctcagctgcgctcacctcaaaactgtatttgaaaaaccgtcggacggccgttctggtcggccagcgctatcgcagcttctattgcgtcggaccaccctccgccgagggtgcgaggatccgcgcatggctgcctgccctcgaaatgctcgtatagggcatattcaagccgaccttcctcgttgacccaaaggacgacgctattggcatcgacagggacaaaccaccgattggagatgagctgcactgaggccaaggcattctcctgtgctcacattacgaaacccccggattgggcgcctcccgtccgacttgttcggcaagcgagcctagctggcgctgagaatcaacggggcggccagctgcaggcggtgaacagcttcggttcaaatggggtacctctttgggtacgattgcagaccgaccgccgacggctcatagacatgttcggcagaatgccgttacccttttggacgcgcactcttgcgtactttttccaggatacggacatggcttcaggcacagtaaagtggttcaacgcccagaagggcttcggcttcattcaacccgacagcggcggcaaagacgtcttcgtccatatcagcgcggtcgagcgcgctgggctgaacggcctcaatgagggccagaagatcagctacgaggttcaggaggaacgcggcaagcaggcggccggaaacctcaaggcctgatttcatcggtacccggttctattgggcatccggcccagtaatgaatccgtcgggcgatgttagcggtagccgggacgcaataacgcatccaaggcgcgcagactggcggcaatgagcttcgctctgttggccgtagcgacgggcagtctgacgctgcgcgaggcgtgatattgcgagtcctgtttacgaaacgggtttgtttcgatgaataacgttaaattcgcgctggccggaactgcttgagcgcgtcgagctgttctagacgcggcctctacgccaaagaatgaaggtccgctagccgcgtttcctcgcgcgccaactgttctctcgcctgatcgccctctgccgagccgatggcgaggatccaggtcgcatcatggtccaacttcgcatggcctgggcgcagcccaaggagatcgacctgcatcgtccccgggacgacatgacggacgagcggcttgcggaggtgattcaattggtggaggacgcactcaaggcgcggctgcctgacagcagggaggaggacgtgccaacgaagccgacgctaaaccgagagcgccaattgctgcccctgtcgattgatgaagatgcgacgaaggattagtccacgctgaatacccgatataggaaacccgcgatcaagaggatcgtcacagccgtcaggataagcagaaaaaggatgccccggcgtcttcctgcctccaccgcagggtcgtccagcggatgtgcgtgggcggtggggtgtccggtctcaaattcacttttggaatgggtggtagttgattcgggcatgaactcgctcctcatcttcgctttccctgctttattctacaccgctgacggccaagcgctgcttggtaatctgcaagcatcgaattaatttcaggcgcgctgcctaccgcctatcttgacgaccttggcgcccttgccatcggccaaggcgtggacgatggcgccccacaaccgatcaccgccgcgcacttcgcgcgagcttgatcggccgccgctagcccaattgagaaggctgtcgatatccggggcgtcaataaatcccaaccaataaaccagcggcccggcgaaccgcgcttccatttcatctgggaagccaaagccgcgccttctgcaaatctaaacccgcaacgactcgtcccaatgcgccgtatggcgcgcgctcaacatctcgcttcgcagcttccagacacgcggcttgccagtcacgcaaacgccacggtatcgcggtcgaaccggccattgaacgcatccacggcgcccatgcgggaccgtgattttgcatcgtcgggcgccggaccgtggagactttcccaatggcgcattggcgcaatttggcctttatctcgggcgatgctcagtggcagtgaatttagggggaccggcgatgcctaacgacgtcaagaaggtcgagacgaagtcgaatcggggatggatcatcgccggaatggtcggcatcgcgattttgggctttgtctctggcgcgcaggcgggcgagggtcatgggaagaggcacaagggccacggtgagtactacgcgccgggttatgtggctgtccctccgggccacgttcattactatgcgccgccgccggtcgtgtacgcgccacgacctgtggcctatgttccggcctacccggcttacgtgccggcctatccggcctacgccgctcccagttatcccggcatgagcttcaacttgaacgtcccgctgtactagcagcgcgcggcgactcgcgggctgcaaagacgccgtccaagcacgatcgaggcttgggaggtgtcgactgatgtcggcaattccaagaacaattggccggagctcatggacgcggtggcgctgttgtagcggccatgagcacgcggtctgtccgacgtctatccaactgagatgcggcaggcgaggctcaggagtgccggcacgaaagaagtcgcggcgtattctatgtacgccgcggcaaggcgacgccgttttcgcgcaacaccttctcaagcaccggaattgccgacccgggattgtctttgcactgggagatcgcgacgctggcgtcgagagggaccgtgctaccaccacctggcgc

SEQ ID NO: 97 - DNA, 15234 bp, Artificial Sequence
  Synthetic Oligonucleotide
  misc_feature (1)..(9250): n is a, c, g, or t
nnnnnnnnnnnnnnnnnnnnnnnnnnnnnnnnnnnnnnnnnnnnnnnnnnnnnnnnnnnnnnnnnnnnnnnnnnnnnnnnnnnnnnnnnnnnnnnnnnnnnnnnnnnnnnnnnnnnnnnnnnnnnnnnnnnnnnnnnnnnnnnnnnnnnnnnnnnnnnnnnnnnnnnnnnnnnnnnnnnnnnnnnnnnnnnnnnnnnnnnnnnnnnnnnnnnnnnnnnnnnnnnnnnnnnnnnnnnnnnnnnnnnnnnnnnnnnnnnnnnnnnnnnnnnnnnnnnnnnnnnnnnnnnnnnnnnnnnnnnnnnnnnnnnnnnnnnnnnnnnnnnnnnnnnnnnnnnnnnnnnnnnnnnnnnnnnnnnnnnnnnnnnnnnnnnnnnnnnnnnnnnnnnnnnnnnnnnnnnnnnnnnnnnnnnnnnnnnnnnnnnnnnnnnnnnnnnnnnnnnnnnnnnnnnnnnnnnnnnnnnnnnnnnnnnnnnnnnnnnnnnnnnnnnnnnnnnnnnnnnnnnnnnnnnnnnnnnnnnnnnnnnnnnnnnnnnnnnnnnnnnnnnnnnnnnnnnnnnnnnnnnnnnnnnnnnnnnnnnnnnnnnnnnnnnnnnnnnnnnnnnnnnnnnnnnnnnnnnnnnnnnnnnnnnnnnnnnnnnnnnnnnnnnnnnnnnnnnnnnnnnnnnnnnnnnnnnnnnnnnnnnnnnnnnnnnnnnnnnnnnnnnnnnnnnnnnnnnnnnnnnnnnnnnnnnnnnnnnnnnnnnnnnnnnnnnnnnnnnnnnnnnnnnnnnnnnnnnnnnnnnnnnnnnnnnnnnnnnnnnnnnnnnnnnnnnnnnnnnnnnnnnnnnnnnnnnnnnnnnnnnnnnnnnnnnnnnnnnnnnnnnnnnnnnnnnnnnnnnnnnnnnnnnnnnnnnnnnnnnnnnnnnnnnnnnnnnnnnnnnnnnnnnnnnnnnnnnnnnnnnnnnnnnnnnnnnnnnnnnnnnnnnnnnnnnnnnnnnnnnnnnnnnnnnnnnnnnnnnnnnnnnnnnnnnnnnnnnnnnnnnnnnnnnnnnnnnnnnnnnnnnnnnnnnnnnnnnnnnnnnnnnnnnnnnnnnnnnnnnnnnnnnnnnnnnnnnnnnnnnnnnnnnnnnnnnnnnnnnnnnnnnnnnnnnnnnnnnnnnnnnnnnnnnnnnnnnnnnnnnnnnnnnnnnnnnnnnnnnnnnnnnnnnnnnnnnnnnnnnnnnnnnnnnnnnnnnnnnnnnnnnnnnnnnnnnnnnnnnnnnnnnnnnnnnnnnnnnnnnnnnnnnnnnnnnnnnnnnnnnnnnnnnnnnnnnnnnnnnnnnnnnnnnnnnnnnnnnnnnnnnnnnnnnnnnnnnnnnnnnnnnnnnnnnnnnnnnnnnnnnnnnnnnnnnnnnnnnnnnnnnnnnnnnnnnnnnnnnnnnnnnnnnnnnnnnnnnnnnnnnnnnnnnnnnnnnnnnnnnnnnnnnnnnnnnnnnnnnnnnnnnnnnnnnnnnnnnnnnnnnnnnnnnnnnnnnnnnnnnnnnnnnnnnnnnnnnnnnnnnnnnnnnnnnnnnnnnnnnnnnnnnnnnnnnnnnnnnnnnnnnnnnnnnnnnnnnnnnnnnnnnnnnnnnnnnnnnnnnnnnnnnnnnnnnnnnnnnnnnnnnnnnnnnnnnnnnnnnnnnnnnnnnnnnnnnnnnnnnnnnnnnnnnnnnnnnnnnnnnnnnnnnnnnnnnnnnnnnnnnnnnnnnnnnnnnnnnnnnnnnnnnnnnnnnnnnnnnnnnnnnnnnnnnnnnnnnnnnnnnnnnnnnnnnnnnnnnnnnnnnnnnnnnnnnnnnnnnnnnnnnnnnnnnnnnnnnnnnnnnnnnnnnnnnnnnnnnnnnnnnnnnnnnnnnnnnnnnnnnnnnnnnnnnnnnnnnnnnnnnnnnnnnnnnnnnnnnnnnnnnnnnnnnnnnnnnnnnnnnnnnnnnnnnnnnnnnnnnnnnnnnnnnnnnnnnnnnnnnnnnnnnnnnnnnnnnnnnnnnnnnnnnnnnnnnnnnnnnnnnnnnnnnnnnnnnnnnnnnnnnnnnnnnnnnnnnnnnnnnnnnnnnnnnnnnnnnnnnnnnnnnnnnnnnnnnnnnnnnnnnnnnnnnnnnnnnnnnnnnnnnnnnnnnnnnnnnnnnnnnnnnnnnnnnnnnnnnnnnnnnnnnnnnnnnnnnnnnnnnnnnnnnnnnnnnnnnnnnnnnnnnnnnnnnnnnnnnnnnnnnnnnnnnnnnnnnnnnnnnnnnnnnnnnnnnnnnnnnnnnnnnnnnnnnnnnnnnnnnnnnnnnnnnnnnnnnnnnnnnnnnnnnnnnnnnnnnnnnnnnnnnnnnnnnnnnnnnnnnnnnnnnnnnnnnnnnnnnnnnnnnnnnnnnnnnnnnnnnnnnnnnnnnnnnnnnnnnnnnnnnnnnnnnnnnnnnnnnnnnnnnnnnnnnnnnnnnnnnnnnnnnnnnnnnnnnnnnnnnnnnnnnnnnnnnnnnnnnnnnnnnnnnnnnnnnnnnnnnnnnnnnnnnnnnnnnnnnnnnnnnnnnnnnnnnnnnnnnnnnnnnnnnnnnnnnnnnnnnnnnnnnnnnnnnnnnnnnnnnnnnnnnnnnnnnnnnnnnnnnnnnnnnnnnnnnnnnnnnnnnnnnnnnnnnnnnnnnnnnnnnnnnnnnnnnnnnnnnnnnnnnnnnnnnnnnnnnnnnnnnnnnnnnnnnnnnnnnnnnnnnnnnnnnnnnnnnnnnnnnnnnnnnnnnnnnnnnnnnnnnnnnnnnnnnnnnnnnnnnnnnnnnnnnnnnnnnnnnnnnnnnnnnnnnnnnnnnnnnnnnnnnnnnnnnnnnnnnnnnnnnnnnnnnnnnnnnnnnnnnnnnnnnnnnnnnnnnnnnnnnnnnnnnnnnnnnnnnnnnnnnnnnnnnnnnnnnnnnnnnnnnnnnnnnnnnnnnnnnnnnnnnnnnnnnnnnnnnnnnnnnnnnnnnnnnnnnnnnnnnnnnnnnnnnnnnnnnnnnnnnnnnnnnnnnnnnnnnnnnnnnnnnnnnnnnnnnnnnnnnnnnnnnnnnnnnnnnnnnnnnnnnnnnnnnnnnnnnnnnnnnnnnnnnnnnnnnnnnnnnnnnnnnnnnnnnnnnnnnnnnnnnnnnnnnnnnnnnnnnnnnnnnnnnnnnnnnnnnnnnnnnnnnnnnnnnnnnnnnnnnnnnnnnnnnnnnnnnnnnnnnnnnnnnnnnnnnnnnnnnnnnnnnnnnnnnnnnnnnnnnnnnnnnnnnnnnnnnnnnnnnnnnnnnnnnnnnnnnnnnnnnnnnnnnnnnnnnnnnnnnnnnnnnnnnnnnnnnnnnnnnnnnnnnnnnnnnnnnnnnnnnnnnnnnnnnnnnnnnnnnnnnnnnnnnnnnnnnnnnnnnnnnnnnnnnnnnnnnnnnnnnnnnnnnnnnnnnnnnnnnnnnnnnnnnnnnnnnnnnnnnnnnnnnnnnnnnnnnnnnnnnnnnnnnnnnnnnnnnnnnnnnnnnnnnnnnnnnnnnnnnnnnnnnnnnnnnnnnnnnnnnnnnnnnnnnnnnnnnnnnnnnnnnnnnnnnnnnnnnnnnnnnnnnnnnnnnnnnnnnnnnnnnnnnnnnnnnnnnnnnnnnnnnnnnnnnnnnnnnnnnnnnnnnnnnnnnnnnnnnnnnnnnnnnnnnnnnnnnnnnnnnnnnnnnnnnnnnnnnnnnnnnnnnnnnnnnnnnnnnnnnnnnnnnnnnnnnnnnnnnnnnnnnnnnnnnnnnnnnnnnnnnnnnnnnnnnnnnnnnnnnnnnnnnnnnnnnnnnnnnnnnnnnnnnnnnnnnnnnnnnnnnnnnnnnnnnnnnnnnnnnnnnnnnnnnnnnnnnnnnnnnnnnnnnnnnnnnnnnnnnnnnnnnnnnnnnnnnnnnnnnnnnnnnnnnnnnnnnnnnnnnnnnnnnnnnnnnnnnnnnnnnnnnnnnnnnnnnnnnnnnnnnnnnnnnnnnnnnnnnnnnnnnnnnnnnnnnnnnnnnnnnnnnnnnnnnnnnnnnnnnnnnnnnnnnnnnnnnnnnnnnnnnnnnnnnnnnnnnnnnnnnnnnnnnnnnnnnnnnnnnnnnnnnnnnnnnnnnnnnnnnnnnnnnnnnnnnnnnnnnnnnnnnnnnnnnnnnnnnnnnnnnnnnnnnnnnnnnnnnnnnnnnnnnnnnnnnnnnnnnnnnnnnnnnnnnnnnnnnnnnnnnnnnnnnnnnnnnnnnnnnnnnnnnnnnnnnnnnnnnnnnnnnnnnnnnnnnnnnnnnnnnnnnnnnnnnnnnnnnnnnnnnnnnnnnnnnnnnnnnnnnnnnnnnnnnnnnnnnnnnnnnnnnnnnnnnnnnnnnnnnnnnnnnnnnnnnnnnnnnnnnnnnnnnnnnnnnnnnnnnnnnnnnnnnnnnnnnnnnnnnnnnnnnnnnnnnnnnnnnnnnnnnnnnnnnnnnnnnnnnnnnnnnnnnnnnnnnnnnnnnnnnnnnnnnnnnnnnnnnnnnnnnnnnnnnnnnnnnnnnnnnnnnnnnnnnnnnnnnnnnnnnnnnnnnnnnnnnnnnnnnnnnnnnnnnnnnnnnnnnnnnnnnnnnnnnnnnnnnnnnnnnnnnnnnnnnnnnnnnnnnnnnnnnnnnnnnnnnnnnnnnnnnnnnnnnnnnnnnnnnnnnnnnnnnnnnnnnnnnnnnnnnnnnnnnnnnnnnnnnnnnnnnnnnnnnnnnnnnnnnnnnnnnnnnnnnnnnnnnnnnnnnnnnnnnnnnnnnnnnnnnnnnnnnnnnnnnnnnnnnnnnnnnnnnnnnnnnnnnnnnnnnnnnnnnnnnnnnnnnnnnnnnnnnnnnnnnnnnnnnnnnnnnnnnnnnnnnnnnnnnnnnnnnnnnnnnnnnnnnnnnnnnnnnnnnnnnnnnnnnnnnnnnnnnnnnnnnnnnnnnnnnnnnnnnnnnnnnnnnnnnnnnnnnnnnnnnnnnnnnnnnnnnnnnnnnnnnnnnnnnnnnnnnnnnnnnnnnnnnnnnnnnnnnnnnnnnnnnnnnnnnnnnnnnnnnnnnnnnnnnnnnnnnnnnnnnnnnnnnnnnnnnnnnnnnnnnnnnnnnnnnnnnnnnnnnnnnnnnnnnnnnnnnnnnnnnnnnnnnnnnnnnnnnnnnnnnnnnnnnnnnnnnnnnnnnnnnnnnnnnnnnnnnnnnnnnnnnnnnnnnnnnnnnnnnnnnnnnnnnnnnnnnnnnnnnnnnnnnnnnnnnnnnnnnnnnnnnnnnnnnnnnnnnnnnnnnnnnnnnnnnnnnnnnnnnnnnnnnnnnnnnnnnnnnnnnnnnnnnnnnnnnnnnnnnnnnnnnnnnnnnnnnnnnnnnnnnnnnnnnnnnnnnnnnnnnnnnnnnnnnnnnnnnnnnnnnnnnnnnnnnnnnnnnnnnnnnnnnnnnnnnnnnnnnnnnnnnnnnnnnnnnnnnnnnnnnnnnnnnnnnnnnnnnnnnnnnnnnnnnnnnnnnnnnnnnnnnnnnnnnnnnnnnnnnnnnnnnnnnnnnnnnnnnnnnnnnnnnnnnnnnnnnnnnnnnnnnnnnnnnnnnnnnnnnnnnnnnnnnnnnnnnnnnnnnnnnnnnnnnnnnnnnnnnnnnnnnnnnnnnnnnnnnnnnnnnnnnnnnnnnnnnnnnnnnnnnnnnnnnnnnnnnnnnnnnnnnnnnnnnnnnnnnnnnnnnnnnnnnnnnnnnnnnnnnnnnnnnnnnnnnnnnnnnnnnnnnnnnnnnnnnnnnnnnnnnnnnnnnnnnnnnnnnnnnnnnnnnnnnnnnnnnnnnnnnnnnnnnnnnnnnnnnnnnnnnnnnnnnnnnnnnnnnnnnnnnnnnnnnnnnnnnnnnnnnnnnnnnnnnnnnnnnnnnnnnnnnnnnnnnnnnnnnnnnnnnnnnnnnnnnnnnnnnnnnnnnnnnnnnnnnnnnnnnnnnnnnnnnnnnnnnnnnnnnnnnnnnnnnnnnnnnnnnnnnnnnnnnnnnnnnnnnnnnnnnnnnnnnnnnnnnnnnnnnnnnnnnnnnnnnnnnnnnnnnnnnnnnnnnnnnnnnnnnnnnnnnnnnnnnnnnnnnnnnnnnnnnnnnnnnnnnnnnnnnnnnnnnnnnnnnnnnnnnnnnnnnnnnnnnnnnnnnnnnnnnnnnnnnnnnnnnnnnnnnnnnnnnnnnnnnnnnnnnnnnnnnnnnnnnnnnnnnnnnnnnnnnnnnnnnnnnnnnnnnnnnnnnnnnnnnnnnnnnnnnnnnnnnnnnnnnnnnnnnnnnnnnnnnnnnnnnnnnnnnnnnnnnnnnnnnnnnnnnnnnnnnnnnnnnnnnnnnnnnnnnnnnnnnnnnnnnnnnnnnnnnnnnnnnnnnnnnnnnnnnnnnnnnnnnnnnnnnnnnnnnnnnnnnnnnnnnnnnnnnnnnnnnnnnnnnnnnnnnnnnnnnnnnnnnnnnnnnnnnnnnnnnnnnnnnnnnnnnnnnnnnnnnnnnnnnnnnnnnnnnnnnnnnnnnnnnnnnnnnnnnnnnnnnnnnnnnnnnnnnnnnnnnnnnnnnnnnnnnnnnnnnnnnnnnnnnnnnnnnnnnnnnnnnnnnnnnnnnnnnnnnnnnnnnnnnnnnnnnnnnnnnnnnnnnnnnnnnnnnnnnnnnnnnnnnnnnnnnnnnnnnnnnnnnnnnnnnnnnnnnnnnnnnnnnnnnnnnnnnnnnnnnnnnnnnnnnnnnnnnnnnnnnnnnnnnnnnnnnnnnnnnnnnnnnnnnnnnnnnnnnnnnnnnnnnnnnnnnnnnnnnnnnnnnnnnnnnnnnnnnnnnnnnnnnnnnnnnnnnnnnnnnnnnnnnnnnnnnnnnnnnnnnnnnnnnnnnnnnnnnnnnnnnnnnnnnnnnnnnnnnnnnnnnnnnnnnnnnnnnnnnnnnnnnnnnnnnnnnnnnnnnnnnnnnnnnnnnnnnnnnnnnnnnnnnnnnnnnnnnnnnnnnnnnnnnnnnnnnnnnnnnnnnnnnnnnnnnnnnnnnnnnnnnnnnnnnnnnnnnnnnnnnnnnnnnnnnnnnnnnnnnnnnnnnnnnnnnnnnnnnnnnnnnnnnnnnnnnnnnnnnnnnnnnnnnnnnnnnnnnnnnnnnnnnnnnnnnnnnnnnnnnnnnnnnnnnnnnnnnnnnnnnnnnnnnnnnnnnnnnnnnnnnnnnnnnnnnnnnnnnnnnnnnnnnnnnnnnnnnnnnnnnnnnnnnnnnnnnnnnnnnnnnnnnnnnnnnnnnnnnnnnnnnnnnnnnnnnnnnnnnnnnnnnnnnnnnnnnnnnnnnnnnnnnnnnnnnnnnnnnnnnnnnnnnnnnnnnnnnnnnnnnnnnnnnnnnnnnnnnnnnnnnnnnnnnnnnnnnnnnnnnnnnnnnnnnnnnnnnnnnnnnnnnnnnnnnnnnnnnnnnnnnnnnnnnnnnnnnnnnnnnnnnnnnnnnnnnnnnnnnnnnnnnnnnnnnnnnnnnnnnnnnnnnnnnnnnnnnnnnnnnnnnnnnnnnnnnnnnnnnnnnnnnnnnnnnnnnnnnnnnnnnnnnnnnnnnnnnnnnnnnnnnnnnnnnnnnnnnnnnnnnnnnnnnnnnnnnnnnnnnnnnnnnnnnnnnnnnnnnnnnnnnnnnnnnnnnnnnnnnnnnnnnnnnnnnnnnnnnnnnnnnnnnnnnnnnnnnnnnnnnnnnnnnnnnnnnnnnnnnnnnnnnnnnnnnnnnnnnnnnnnnnnnnnnnnnnnnnnnnnnnnnnnnnnnnnnnnnnnnnnnnnnnnnnnnnnnnnnnnnnnnnnnnnnnnnnnnnnnnnnnnnnnnnnnnnnnnnnnnnnnnnnnnnnnnnnnnnnnnnnnnnnnnnnnnnnnnnnnnnnnnnnnnnnnnnnnnnnnnnnnnnnnnnnnnnnnnnnnnnnnnnnnnnnnnnnnnnnnnnnnnnnnnnnnnnnnnnnnnnnnnnnnnnnnnnnnnnnnnnnnnnnnnnnnnnnnnnnnnnnnnnnnnnnnnnnnnnnnnnnnnnnnnnnnnnnnnnnnnnnnnnnnnnnnnnnnnnnnnnnnnnnnnnnnnnnnnnnnnnnnnnnnnnnnnnnnnnnnnnnnnnnnnnnnnnnnnnnnnnnnnnnnnnnnnnnnnnnnnnnnnnnnnnnnnnnnnnnnnnnnnnnnnnnnnnnnnnnnnnnnnnnnnnnnnnnnnnnnnnnnnnnnnnnnnnnnnnnnnnnnnnnnnnnnnnnnnnnnnnnnnnnnnnnnnnnnnnnnnnnnnnnnnnnnnnnnnnnnnnnnnnnnnnnnnnnnnnnnnnnnnnnnnnnnnnnnnnnnnnnnnnnnnnnnnnnnnnnnnnnnnnnnnnnnnnnnnnnnnnnnnnnnnnnnnnnnnnnnnnnnnnnnnnnnnnnnnnnnnnnnnnnnnnnnnnnnnnnnnnnnnnnnnnnnnnnnnnnnnnnnnnnnnnnnnnnnnnnnnnnnnnnnnnnnnnnnnnnnnnnnnnnnnnnnnnnnnnnnnnnnnnnnnnnnnnnnnnnnnnnnnnnnnnnnnnnnnnnnnnnnnnnnnnnnnnnnnnnnnnnnnnnnnnnnnnnnnnnnnnnnnnnnnnnnnnnnnnnnnnnnnnnnnnnnnnnnnnnnnnnnnnnnnnnnnnnnnnnnnnnnnnnnnnnnnnnnnnnnnnnnnnnnnnnnnnnnnnnnnnnnnnnnnnnnnnnnnnnnnnnnnnnnnnnnnnnnnnnnnnnnnnnnnnnnnnnnnnnnnnnnnnnnnnnnnnnnnnnnnnnnnnnnnnnnnnnnnnnnnnnnnnnnnnnnnnnnnnnnnnnnnnnnnnnnnnnnnnnnnnnnnnnnnnnnnnnnnnnnnnnnnnnnnnnnnnnnnnnnnnnnnnnnnnnnnnnnnnnnnnnnnnnnnnnnnnnnnnnnnnnnnnnnnnnnnnnnnnnnnnnnnnnnnnnnnnnnnnnnnnnnnnnnnnnnnnnnnnnnnnnnnnnnnnnnnnnnnnnnnnnnnnnnnnnnnnnnnnnnnnnnnnnnnnnnnnnnnnnnnnnnnnnnnnnnnnnnnnnnnnnnnnnnnnnnnnnnnnnnnnnnnnnnnnnnnnnnnnnnnnnnnnnnnnnnnnnnnnnnnnnnnnnnnnnnnnnnnnnnnnnnnnnnnnnnnnnnnnnnnnnnnnnnnnnnnnnnnnnnnnnnnnnnnnnnnnnnnnnnnnnnnnnnnnnnnnnnnnnnnnnnnnnnnnnnnnnnnnnnnnnnnnnnnnnnnnnnnnnnnnnnnnnnnnnnnnnnnnnnnnnnnnnnnnnnnnnnnnnnnnnnnnnnnnnnnnnnnnnnnnnnnnnnnnnnnnnnnnnnnnnnnnnnnnnnnnnnnnnnnnnnnnnnnnnnnnnnnnnnnnnnnnnnnnnnnnnnnnnnnnnnnnnnnnnnnnnnnnnnnnnnnnnnnnnnggtaaagccgctcagtaaatgagtggctactagaacttcattagccaggccaccggattggggtgctggtaaagccgctcagtaaatgagtggctactagaacatcaccggctccatcacatgccccatttgtggtaaagccgctcagtaaatgagtggctactagaacctctactccaacatcatgcgccttgagcagggtaaagccgctcagtaaatgagtggctactagaacttcattagccaggccaccggattggggtgctggtaaagccgctcagtaaatgagtggctactagaacatcaccggctccatcacatgccccatttgtggtaaagccgctcagtaaatgagtggctactagaacctctactccaacatcatgcgccttgagcagggtaaagccgctcagtaaatgagtggctactagaacttcattagccaggccaccggattggggtgctggtaaagccgctcagtaaatgagtggctactagaaccagaacattgctgatgagtttccaagactaggtaaagccgctcagtaaatgagtggctactagaacgtacaagtttcagtagaagaatttgtacacggtaaagccgctcagtaaatgagtggctactagaacttcattagccaggccaccggattggggtgctggtaaagccgctcagtaaatgagtggctatttgagaatagcccaattcgggctaatcttgcgtgacaatgcttggactcaaaaggatgccagtgtttaggacgcaagagcaagctaacttcagtgccattgttgcaaaacatatggcagagccggacgcgcctcttttacttgaaggggccaccggccttggaaagaccagagcctacttgcaggctgtaatgaacgctgctgagtccggaaagcgtatcgcaattgccttgccaagtcatcagttgattgaccaattattagcctctagcgatttggctactacgagtctaggatctgttcgggttgcggccttcagaccagcaaggttctttcaaaataaagtagagtttgcggcgcacaagctctctgcaatgagtgcggaggtcatgctctgcaccagcgcatctgtaatcattgatcaaagattgggcggagaatataacggtgttttaagcagggatcacatcatctttgatgaggcggatcaacttcctgatgcggccgcattgcaaagcgattacgagataacagcgcagcagttcaaagacctaaagatcaaggttgagacggcgcaacaagctgcccaagaagtactgaagcgcaaggatttggagccggaagtcaaagctgctgcactcatcattcttgaagcaatacaagagcctgcttggtatcacagtgctggggttaccgatgatggcggtgtgatgctattccacaaaatgccggggcggttgttaaaaagagttacgaaccgaaaatctgtatctttcataagcgccaccttgtcgatagcggataaatttgatgatttcaaaagggcgcttggtatccaaaaagaaagcagcctatctcaaattttagaaccgatccatcatggcaacctaagattccatgcttcagatgtgcaggtgaactcgccagagtggattgatttaatacaaaagacagtactgaatgctcagcctccagtgttagtggttacacctagccaccagcttgctcagaccttgggagtacttataccaacggctgtagtcagggccacaagcgaaacctccagccaagctgctgcacgtttggatgatgctcgggtgctaattgccgctggtgcgtgggctggtcttgatacgccaattcaatgggcaaccatcgttattccccgcataccctatgagaggccagtggtgctagatgggcagcatgagagtagttttttggatacccgcaatactgcactgcgtaggatgcgtcaggtgatcggacgcggcttaagatctcctgaggctcgttgtgaaatttacgtgctggatggcaggtataagaatatagaagcctttgtacccaagcgattccgcagtggatgggcaagtaaacagtttttagagggtagtagacgtgaactagttttgtcaaaaatagagcgtgatccctcagtccgaaaagaggcgcttaagcgatatggcaatgaatgcatgtgttgcggctttcgccccaaagtaatctcccagttagatgtacatcacctgtcccccttgagtgaaggcggcgagcggcttacatcaattagcgatcttgcagttctctgcgcgaactgtcaccgattggcccactcaactgctcccccactaagtattgaggctatgaaagcattggatcctgaatgaccccacctcaaaccaatttttagtcgattggtagtttgggccagcatcccattgcggcgaattgaaaaaatgttaacttgcgcctgtttcaaataaacggctgacttgagacttagacaggtgatcgtgttcaggttagcctttcttaggctatcaaactggctactgacttgctgatcgcagcgcgtaccggcaagttgttaaaggacttggcctcattgattgtttgtggtttgttaccgctgattggcagtagccaacaatccgggtgcattccaattttttgcttgctaataaatcttttatagacttgagacccgtctgcaaaccaaagctttcttcgcctcgccggggagattctccagcagatcaactgcgagccttgatgaaacttcggtgggccaatcactttgacaatgatccccagattttcttcacatcccgggaattccccgacgatgatggcgaggtcgcccgctttgcaacgtagctgcatgtgtaactcctgtttagcggcagtgccttgatggcgggggccgcaatctggaacaaatccccccggtcattaggttgaccaagccatgaaatctttaccgtggtcagaaaaaaagcccgtcaaacaggctttgacttgcttagttgtctgtagaccacatcttttgtccaccttgcccggatatgcaggttggtgtgggcctaaatgaagttttgaaatgatggcacatcgccaacttactaggtatatcaaatagctctgtttgataccgcttagtctcatggatggcgagccttagctagcaatcacaaataaaggcagtcacctaactgctgggtttttgctacttgacgcatacttttttcattatggatgcaactgcagtatcgggaggtacatcctgccaagggcttacagatgatgtgttgtagatcagttcgccattagccatgctttcggaatgcaccgaaaatgagagagtccggtagcgttcttctttgcagtcgtattcagaccttatacgtcgggacatcccattgtcgatttgctgctgcctatagttaagcaatatccaaacttttctggtgctgccatccttgcggagggtgtcatagtcaacgttaaaagtccctgagtcggtcgcatagacaggtatccactcagaaaaaactgattccattgattgccattaggccagcaatgatgatttttttcataaagaaaccttagcaatcgttgtagttcttacgcctactgggcgttattgtgtacgttccaacctttgggccggtgaaagatcaaagaacgaaccaacatgccgcttggggatgatcagggtatgaccgggcgaaattggaaatgcatctcgcactaccaaaccgtacctactggtatcaatgatccgggcttgcggtagcgtacaaaaggcacagggctggtcgatcatgcctgcaacgatagcgcaatttagggtgactagctaccggtaatacgaacagtcatgctccagagccattaggttgtgagttaactaccgtccgagtcaccgggtcgctcaggtctgcgctccagaggggtgatgtagcagatcacttggcctgcactgtttcgcaatgagttcagggtctcagcgaagctaaggcaaggataaagtaggaatcggtttgtagccttcccctgcaaggaaatatgcgatcctgcgggccgggcaaggggtagtgtgcatgaggggcaaataatcgcttctaggcgcgtggtagatcattcataagatacctactagccttttgtatagtgccttggaacgtccgggtcataaatcccatatggcagaactctgacagcaggtcattggcaaaagtatgggaaatttgcaaagcctttccagcttggcgacaactcaagaaaaatggctctgcgccttggtgactctgtaagccagaacagagttgataaagccttgccccttgaagaccaaacgcgctgcccggattgttaggcggctctcgatcaatttcagccactatcttgtccattatcccgctcaggtacttgaccctgcgccatgatcttgtgaatccggcccacgattccataaagtcctttgtttgaatcgctggcagcacctgttgatgccactgagccacaacctcaatcatggattcaacgttcgcgttagggttcttgagctttaaatgcctcgccaatttgaaaatgcaggcgttgcgtagcccaatgtccgtgggcatggtgtcggtcgggaaggctaggtctttgacttggtcaaggcaaatcacagcagagcagagatctattgcttctgtttcttctttaacttctgtctcttctgtaaagttgagttcctcatacagctttaaatagcctgttaattggactaatggcccagactgaataacgtgacctgtcaccgttagatactggcacgtcgcgtacaactctacttgcatcccttcaaatttacgacgacggcctatcagtggtggattgtctacaaagccaaagctgcgaagaccattgccacttggtgatagttcaacgtactggcatccgagggactccataaccgccaaagcttgcgcggatggtttgccgtccacaacgcatttatctatatccaccccgacgatgccgtccccattgagaacaaagcctataccctgatagcctccgccctcgtaagcggctagggcttgactatatgtagcccaagttctcggatcattagactttgccgccttgtttggcagttttgcatctctggggcgcttagcgccaaaccacgtgacccatctgtcgcactgctttagctcagcaggaatattctcaaaaaccggtggcagataaatttttgaggaaacaacagttccgccatcttcgttaccgttcaaccccccgaaatttggtggtgaacgatgcgttcccgctttaagctcaatgttggatgggaagttaaattcactacttgcgtaagccatatctactcctcggatatgagctatgcagatgaaaaaaggcctgcatagcaattgctacacaagcctctagtacctttgacaacttgcggatttcggttgtctccattcatctccacaagtgggagtccgcctatatttaccgcattgcccgtagcggtatgacaaggagaaacggggcctgaagaccgttcccctgcgctggcaaggcgctgctgtaactatggcccaatcgtacatagctgttttgctatctgtcaatctgaaaaggtaaaactgtggcgaatttacagcgcgtttaaacgcagtgtttaacccaacttatgcgcaagctcagtggcattggggtggtagtaccgctgaagcatcttcaggctgcgatggcccgaaacggctgcaagctcaatcaggttgggtagccttttagagagttccgtaactgccatatgcctgaggtcatggaaatggaaatccgtgattccggcccgctccaatgcgcgatcaaaggctgcggaaatggtgaacccattgattgggaaaacgaccccgccaatgttcctaggcatcgattgcagtaccgcaatggcccggctggacagcggaacaactcgcttgtcaccgtttttggtctgc

SEQ ID NO: 98 - DNA, 15146 bp, Artificial Sequence
  Synthetic Oligonucleotide
  misc_feature (1)..(6224): n is a, c, g, or t
nnnnnnnnnnnnnnnnnnnnnnnnnnnnnnnnnnnnnnnnnnnnnnnnnnnnnnnnnnnnnnnnnnnnnnnnnnnnnnnnnnnnnnnnnnnnnnnnnnnnnnnnnnnnnnnnnnnnnnnnnnnnnnnnnnnnnnnnnnnnnnnnnnnnnnnnnnnnnnnnnnnnnnnnnnnnnnnnnnnnnnnnnnnnnnnnnnnnnnnnnnnnnnnnnnnnnnnnnnnnnnnnnnnnnnnnnnnnnnnnnnnnnnnnnnnnnnnnnnnnnnnnnnnnnnnnnnnnnnnnnnnnnnnnnnnnnnnnnnnnnnnnnnnnnnnnnnnnnnnnnnnnnnnnnnnnnnnnnnnnnnnnnnnnnnnnnnnnnnnnnnnnnnnnnnnnnnnnnnnnnnnnnnnnnnnnnnnnnnnnnnnnnnnnnnnnnnnnnnnnnnnnnnnnnnnnnnnnnnnnnnnnnnnnnnnnnnnnnnnnnnnnnnnnnnnnnnnnnnnnnnnnnnnnnnnnnnnnnnnnnnnnnnnnnnnnnnnnnnnnnnnnnnnnnnnnnnnnnnnnnnnnnnnnnnnnnnnnnnnnnnnnnnnnnnnnnnnnnnnnnnnnnnnnnnnnnnnnnnnnnnnnnnnnnnnnnnnnnnnnnnnnnnnnnnnnnnnnnnnnnnnnnnnnnnnnnnnnnnnnnnnnnnnnnnnnnnnnnnnnnnnnnnnnnnnnnnnnnnnnnnnnnnnnnnnnnnnnnnnnnnnnnnnnnnnnnnnnnnnnnnnnnnnnnnnnnnnnnnnnnnnnnnnnnnnnnnnnnnnnnnnnnnnnnnnnnnnnnnnnnnnnnnnnnnnnnnnnnnnnnnnnnnnnnnnnnnnnnnnnnnnnnnnnnnnnnnnnnnnnnnnnnnnnnnnnnnnnnnnnnnnnnnnnnnnnnnnnnnnnnnnnnnnnnnnnnnnnnnnnnnnnnnnnnnnnnnnnnnnnnnnnnnnnnnnnnnnnnnnnnnnnnnnnnnnnnnnnnnnnnnnnnnnnnnnnnnnnnnnnnnnnnnnnnnnnnnnnnnnnnnnnnnnnnnnnnnnnnnnnnnnnnnnnnnnnnnnnnnnnnnnnnnnnnnnnnnnnnnnnnnnnnnnnnnnnnnnnnnnnnnnnnnnnnnnnnnnnnnnnnnnnnnnnnnnnnnnnnnnnnnnnnnnnnnnnnnnnnnnnnnnnnnnnnnnnnnnnnnnnnnnnnnnnnnnnnnnnnnnnnnnnnnnnnnnnnnnnnnnnnnnnnnnnnnnnnnnnnnnnnnnnnnnnnnnnnnnnnnnnnnnnnnnnnnnnnnnnnnnnnnnnnnnnnnnnnnnnnnnnnnnnnnnnnnnnnnnnnnnnnnnnnnnnnnnnnnnnnnnnnnnnnnnnnnnnnnnnnnnnnnnnnnnnnnnnnnnnnnnnnnnnnnnnnnnnnnnnnnnnnnnnnnnnnnnnnnnnnnnnnnnnnnnnnnnnnnnnnnnnnnnnnnnnnnnnnnnnnnnnnnnnnnnnnnnnnnnnnnnnnnnnnnnnnnnnnnnnnnnnnnnnnnnnnnnnnnnnnnnnnnnnnnnnnnnnnnnnnnnnnnnnnnnnnnnnnnnnnnnnnnnnnnnnnnnnnnnnnnnnnnnnnnnnnnnnnnnnnnnnnnnnnnnnnnnnnnnnnnnnnnnnnnnnnnnnnnnnnnnnnnnnnnnnnnnnnnnnnnnnnnnnnnnnnnnnnnnnnnnnnnnnnnnnnnnnnnnnnnnnnnnnnnnnnnnnnnnnnnnnnnnnnnnnnnnnnnnnnnnnnnnnnnnnnnnnnnnnnnnnnnnnnnnnnnnnnnnnnnnnnnnnnnnnnnnnnnnnnnnnnnnnnnnnnnnnnnnnnnnnnnnnnnnnnnnnnnnnnnnnnnnnnnnnnnnnnnnnnnnnnnnnnnnnnnnnnnnnnnnnnnnnnnnnnnnnnnnnnnnnnnnnnnnnnnnnnnnnnnnnnnnnnnnnnnnnnnnnnnnnnnnnnnnnnnnnnnnnnnnnnnnnnnnnnnnnnnnnnnnnnnnnnnnnnnnnnnnnnnnnnnnnnnnnnnnnnnnnnnnnnnnnnnnnnnnnnnnnnnnnnnnnnnnnnnnnnnnnnnnnnnnnnnnnnnnnnnnnnnnnnnnnnnnnnnnnnnnnnnnnnnnnnnnnnnnnnnnnnnnnnnnnnnnnnnnnnnnnnnnnnnnnnnnnnnnnnnnnnnnnnnnnnnnnnnnnnnnnnnnnnnnnnnnnnnnnnnnnnnnnnnnnnnnnnnnnnnnnnnnnnnnnnnnnnnnnnnnnnnnnnnnnnnnnnnnnnnnnnnnnnnnnnnnnnnnnnnnnnnnnnnnnnnnnnnnnnnnnnnnnnnnnnnnnnnnnnnnnnnnnnnnnnnnnnnnnnnnnnnnnnnnnnnnnnnnnnnnnnnnnnnnnnnnnnnnnnnnnnnnnnnnnnnnnnnnnnnnnnnnnnnnnnnnnnnnnnnnnnnnnnnnnnnnnnnnnnnnnnnnnnnnnnnnnnnnnnnnnnnnnnnnnnnnnnnnnnnnnnnnnnnnnnnnnnnnnnnnnnnnnnnnnnnnnnnnnnnnnnnnnnnnnnnnnnnnnnnnnnnnnnnnnnnnnnnnnnnnnnnnnnnnnnnnnnnnnnnnnnnnnnnnnnnnnnnnnnnnnnnnnnnnnnnnnnnnnnnnnnnnnnnnnnnnnnnnnnnnnnnnnnnnnnnnnnnnnnnnnnnnnnnnnnnnnnnnnnnnnnnnnnnnnnnnnnnnnnnnnnnnnnnnnnnnnnnnnnnnnnnnnnnnnnnnnnnnnnnnnnnnnnnnnnnnnnnnnnnnnnnnnnnnnnnnnnnnnnnnnnnnnnnnnnnnnnnnnnnnnnnnnnnnnnnnnnnnnnnnnnnnnnnnnnnnnnnnnnnnnnnnnnnnnnnnnnnnnnnnnnnnnnnnnnnnnnnnnnnnnnnnnnnnnnnnnnnnnnnnnnnnnnnnnnnnnnnnnnnnnnnnnnnnnnnnnnnnnnnnnnnnnnnnnnnnnnnnnnnnnnnnnnnnnnnnnnnnnnnnnnnnnnnnnnnnnnnnnnnnnnnnnnnnnnnnnnnnnnnnnnnnnnnnnnnnnnnnnnnnnnnnnnnnnnnnnnnnnnnnnnnnnnnnnnnnnnnnnnnnnnnnnnnnnnnnnnnnnnnnnnnnnnnnnnnnnnnnnnnnnnnnnnnnnnnnnnnnnnnnnnnnnnnnnnnnnnnnnnnnnnnnnnnnnnnnnnnnnnnnnnnnnnnnnnnnnnnnnnnnnnnnnnnnnnnnnnnnnnnnnnnnnnnnnnnnnnnnnnnnnnnnnnnnnnnnnnnnnnnnnnnnnnnnnnnnnnnnnnnnnnnnnnnnnnnnnnnnnnnnnnnnnnnnnnnnnnnnnnnnnnnnnnnnnnnnnnnnnnnnnnnnnnnnnnnnnnnnnnnnnnnnnnnnnnnnnnnnnnnnnnnnnnnnnnnnnnnnnnnnnnnnnnnnnnnnnnnnnnnnnnnnnnnnnnnnnnnnnnnnnnnnnnnnnnnnnnnnnnnnnnnnnnnnnnnnnnnnnnnnnnnnnnnnnnnnnnnnnnnnnnnnnnnnnnnnnnnnnnnnnnnnnnnnnnnnnnnnnnnnnnnnnnnnnnnnnnnnnnnnnnnnnnnnnnnnnnnnnnnnnnnnnnnnnnnnnnnnnnnnnnnnnnnnnnnnnnnnnnnnnnnnnnnnnnnnnnnnnnnnnnnnnnnnnnnnnnnnnnnnnnnnnnnnnnnnnnnnnnnnnnnnnnnnnnnnnnnnnnnnnnnnnnnnnnnnnnnnnnnnnnnnnnnnnnnnnnnnnnnnnnnnnnnnnnnnnnnnnnnnnnnnnnnnnnnnnnnnnnnnnnnnnnnnnnnnnnnnnnnnnnnnnnnnnnnnnnnnnnnnnnnnnnnnnnnnnnnnnnnnnnnnnnnnnnnnnnnnnnnnnnnnnnnnnnnnnnnnnnnnnnnnnnnnnnnnnnnnnnnnnnnnnnnnnnnnnnnnnnnnnnnnnnnnnnnnnnnnnnnnnnnnnnnnnnnnnnnnnnnnnnnnnnnnnnnnnnnnnnnnnnnnnnnnnnnnnnnnnnnnnnnnnnnnnnnnnnnnnnnnnnnnnnnnnnnnnnnnnnnnnnnnnnnnnnnnnnnnnnnnnnnnnnnnnnnnnnnnnnnnnnnnnnnnnnnnnnnnnnnnnnnnnnnnnnnnnnnnnnnnnnnnnnnnnnnnnnnnnnnnnnnnnnnnnnnnnnnnnnnnnnnnnnnnnnnnnnnnnnnnnnnnnnnnnnnnnnnnnnnnnnnnnnnnnnnnnnnnnnnnnnnnnnnnnnnnnnnnnnnnnnnnnnnnnnnnnnnnnnnnnnnnnnnnnnnnnnnnnnnnnnnnnnnnnnnnnnnnnnnnnnnnnnnnnnnnnnnnnnnnnnnnnnnnnnnnnnnnnnnnnnnnnnnnnnnnnnnnnnnnnnnnnnnnnnnnnnnnnnnnnnnnnnnnnnnnnnnnnnnnnnnnnnnnnnnnnnnnnnnnnnnnnnnnnnnnnnnnnnnnnnnnnnnnnnnnnnnnnnnnnnnnnnnnnnnnnnnnnnnnnnnnnnnnnnnnnnnnnnnnnnnnnnnnnnnnnnnnnnnnnnnnnnnnnnnnnnnnnnnnnnnnnnnnnnnnnnnnnnnnnnnnnnnnnnnnnnnnnnnnnnnnnnnnnnnnnnnnnnnnnnnnnnnnnnnnnnnnnnnnnnnnnnnnnnnnnnnnnnnnnnnnnnnnnnnnnnnnnnnnnnnnnnnnnnnnnnnnnnnnnnnnnnnnnnnnnnnnnnnnnnnnnnnnnnnnnnnnnnnnnnnnnnnnnnnnnnnnnnnnnnnnnnnnnnnnnnnnnnnnnnnnnnnnnnnnnnnnnnnnnnnnnnnnnnnnnnnnnnnnnnnnnnnnnnnnnnnnnnnnnnnnnnnnnnnnnnnnnnnnnnnnnnnnnnnnnnnnnnnnnnnnnnnnnnnnnnnnnnnnnnnnnnnnnnnnnnnnnnnnnnnnnnnnnnnnnnnnnnnnnnnnnnnnnnnnnnnnnnnnnnnnnnnnnnnnnnnnnnnnnnnnnnnnnnnnnnnnnnnnnnnnnnnnnnnnnnnnnnnnnnnnnnnnnnnnnnnnnnnnnnnnnnnnnnnnnnnnnnnnnnnnnnnnnnnnnnnnnnnnnnnnnnnnnnnnnnnnnnnnnnnnnnnnnnnnnnnnnnnnnnnnnnnnnnnnnnnnnnnnnnnnnnnnnnnnnnnnnnnnnnnnnnnnnnnnnnnnnnnnnnnnnnnnnnnnnnnnnnnnnnnnnnnnnnnnnnnnnnnnnnnnnnnnnnnnnnnnnnnnnnnnnnnnnnnnnnnnnnnnnnnnnnnnnnnnnnnnnnnnnnnnnnnnnnnnnnnnnnnnnnnnnnnnnnnnnnnnnnnnnnnnnnnnnnnnnnnnnnnnnnnnnnnnnnnnnnnnnnnnnnnnnnnnnnnnnnnnnnnnnnnnnnnnnnnnnnnnnnnnnnnnnnnnnnnnnnnnnnnnnnnnnnnnnnnnnnnnnnnnnnnnnnnnnnnnnnnnnnnnnnnnnnnnnnnnnnnnnnnnnnnnnnnnnnnnnnnnnnnnnnnnnnnnnnnnnnnnnnnnnnnnnnnnnnnnnnnnnnnnnnnnnnnnnnnnnnnnnnnnnnnnnnnnnnnnnnnnnnnnnnnnnnnnnnnnnnnnnnnnnnnnnnnnnnnnnnnnnnnnnnnnnnnnnnnnnnnnnnnnnnnnnnnnnnnnnnnnnnnnnnnnnnnnnnnnnnnnnnnnnnnnnnnnnnnnnnnnnnnnnnnnnnnnnnnnnnnnnnnnnnnnnnnnnnnnnnnnnnnnnnnnnnnnnnnnnnnnnnnnnnnnnnnnnnnnnnnnnnnnnnnnnnnnnnnnnnnnnnnnnnnnnnnnnnnnnnnnnnnnnnnnnnnnnnnnnnnnnnnnnnnnnnnnnnnnnnnnnnnnnnnnnnnnnnnnnnnnnnnnnnnnnnnnnnnnnnnnnnnnnnnnnnnnnnnnnnnnnnnnnnnnnnnnnnnnnnnnnnnnnnnnnnnnnnnnnnnnnnnnnnnnnnnnnnnnnnnnnnnnnnnnnnnnnnnnnnnnnnnnnnnnnnnnnnnnnnnnnnnnnnnnnnnnnnnnnnnnnnnnnnnnnnnnnnnnnnnnnnnnnnnnnnnnnnnnnnnnnnnnnnnnnnnnnnnnnnnnnnnnnnnnnnnnnnnnnnnnnnnnnnnnnnnnnnnnnnnnnnnnnnnnnnnnnnnnnnnnnnnnnnnnnnnnnnnnnnnnnnnnnnnnnnnnnnnnnnnnnnnnnnnnnnnnnnnnnnnnnnnnnnnnnnnnnnnnnnnnnnnnnnnnnnnnnttttgtacgccgactccgggggggatatataaattttaggatcaaggatgcgaacgttcgcagactcaaatcattggaaacgatgacgatttatgcgattgcagccgattgagatgctgccccctaaagcaccacggttcggccttctgccatcctgattcaaggatacggcgcaagtggtagcagtcgagcgccattcgtgatgctggttggcggtctaattgatgtatggtgttagtgttgcacgaactttctggcggtggcatttcggctggcagactgagcgccattcgtaatgcaggtcaactggcttctggctaggacacttttcattgggatctacaaagcagcatggaaaagctaaaaatatcttttacgcttcaaagccccttggttaccaatggcggctatatgaccttggacgcgcttttggctgccttgatttttgatcaaggcggcgatctggaaaaggcacacgcagatattccacttatgaacacaaacggcctttggcacggaagtgcagccttctttgaaaaaattgatacagagaagaagggctttgtcgcgaaccttcacgccgggcatgaccttgatctcgatttggtaatgaagaacaagagcggcaacgtgcacagagctataggtcttactcgccgccgagactacggtgcggtcttcaacagttaccgcatgtacacagcaaccgaaatctcttggtacgcaactggtgaccgggagcaaattcaacgattgctttctgaggtcgagttcataggtaagcgcagagctagcggctttgggcaagtagcaaaccttgtcattgaggagtcggacaatgacggcgttgttgggctatttggcgaaccattgcgccccattcctttggaaatgttcagtggtgataaatcatcattgagggcggatgcagcatggcgacctgcctattggcatcccatgaatcgcgcagtttgttacgtgcctgcccaatgaatacatttgagttctttaaccagcactttggcaggcatcttgtctcgcaagaaggtgagccagattttgcagcttaccgtgcgctatcaagcaaccataagttagtcaaaggcactgaaagtaggcttgcatctggttgggcaattgttaggccaagcatttcaagcgttcaactaaagcttgcggctactggcctgcgttttgatgagcgcacccgaatagaagcattcatggaagagtttgagcaatgggacggcattgaacccagaatgtttttgatgtttgacaaagcaccgatcccattggagaacttgttcttaacagtagacaggagacttgttcgcatttgctcgcctgctggtgtggaaacatttgacgctaacaaagctccaactgaagagtcaggcggcattcaaaaagcgatctggaagcgtaaatgatgatcgaccatacgatcccaaagcccaatcgcatagcaggctatcaactccatcgcatggtggcagagctaacagcaggttcaagttctttgttcgtagaccaaggcgatcatctaatcgtcaggactgataagcccatcactgcaaatggtaagccagttcaaattcctgaatgtggcgcggtcatcggctttgaactccgagccagtgttgccagtcgtaaaggcggacgtaacttatatcctgaagtagacgattggcgctacagacgagcatggctggaggctgaagggaaaaaatgtggctttgagttattggccttgcacgtaaacggtgatcggcaagatgttgcctctaaaggaggcaggaaattctggatcgatgcaactcaattcacaggcgttttaaaagttgttgatctaagcaaattctctctagcccttgcaaacgggattgggcgtgtgggtaaagcttttggcatgggtatgttggttatataaggagatttcaatgaaaatcgttatcaatgcaaagataaaaactatagggcctttgtcaatcaagatgccaaagccagaggggagtcgtgagaacgagtttgaaaactttcccgtgatgacacggggaatcgatgatgacggcaacaagcttaggacaggatatttacctgctactacccttcgcggctttttacgcagagccgtgactttgcgaagtatgaaggctgctgctgaacgtggcactccttataaattgccgcaaatttattctgaaatgattggtcaggatgcagagagcgaaaagcaagccggtgacattgacctattggcaataagaaaagcgcgtgagtcaaatcctatcttggatctttttggcagtggtctggggatcaaatcaagattgaaagtgagtcactttgtgcccaatgtaaacgtagtccctgaggtgtttacgggtgttcgtaaagaccttgatgacacggaagaagctatggacttaatggatcaggctgacatggcatcatttctagggcgaagcgaaagcaacaacaagcggtctgcggcatctgctttggtaaagcagctagagaacgaaattcgccgtacggagaagaagggggaagcggtggatccggataaggcaaaggcattggaagttgcaaaagcgaatgagggaaaattcaaatctgaaatgggcgaaatgcagaacagcacccgcaccattgttcaacattttgctcttcccgctggtattgaactttcaggcagactggtagtggagaacgctcaggagcgcgacatggacttgatccaacatggcttggacgagcttagtaagaagcctgttcttggagcgcacagcgcacgaggttgtggcgaaatcgaaggcatatttcaggtcatggatggtgatggaaagattttaaaaaccatcgtcattggcgattacaaacccgccaaagtgacggaatttaatgtgtaaaaaggaggaatgatcaatcatttcaaagacttaggatatggcaggtaaagccatccagcttatgggtggctactagaacgctgtaagcatgatgtttcgtgtctctgcaggtaaagccacccagtaaatgggtggctactagaacttggcaagaatcgacaagtggctaaagtcaggtaaagccacccagtacttgggtggctactagaacgagtcggtgactttgataagctcgcgccgtggtaaagccacccagtacttgggtggctactagaacacaatcgaatctgacgacggccgcaccatgggtaaagccgcccagtacttgggtggctactagaacagcatcatgttgtcccacgcctcgtttgggggtaaagccacccagtaaatgggtggctactagaactagagccgcggtgatgctctgggcatagcgggtaaagccacccagtacttgggtggctactagaacatgatcgggaagctgtttgatgcaaggagcggtaaagccacccagtaaatgggtggctactagaacacccacggtttcttgtagacctgtgtgtcaggtaaagccatccatttaatgggtggctactagaactacaggttgccgatttcaccagtgcgaatcggtaaagccacccagtacttgggtggctactagaactctccggctgtgaggatgatctgcctctctggtaaagccactcagtacttgggtggctactagaacgatgtcaaaccggcccagcggttgtgcgctggtcaagccacccagttgatgggcggctatttgaaggaagcccaattggggctagtcttgcgtgaaaattcttagactcgaaaggatgccggtgtttagaacgcaagagcaagctaacttctgcgccattgttgcaaaacatttggcagagccggacgcgcctcttttacttgaaggggccaccggcctcggaaagaccagagcctacttgcaggccgttatgaacgctgccgaatccggaaaacgtatcgcaattgctttaccaagtcatcagttgattgaccagttattagcctctagcgatttggctattacgagtctacgatctgttcgggttgcggacttcaggccagcaagattctttcaaaacaaagcagagttcttggcgcagaagctttctgcaatgagcgcagaggtcatgctgtgtaccagcgcatctgtaatcattgaccagagattaggcggagaatataacggcgtattaagcagggatcacatcatctttgatgaggcggatcaacttcctgatgcggctgcattgcaaagcgattacgagatcacggcgcagcagtttaaagatctaaagatcaaggttgagacggcacagcaagctgcccaagaagttttgaagtgcaaggatttggagcctgaagtcaaagctgccgcgctcatcattcttgaagcaatacaagagcctgcttggtattacagtgctggcgttaccgatgatggcggtgtgaagctattccacaaaatgccgggtcggttgttgaaaaaggttgggatccggaaatcggtatctttcataagcgcaaccttgtcgatagcagataagtttgatgatttcaaaagggcgcttggaatccaaaaagaaagtagcctatcgcaaattttagaaccgatccatcatggcaacctaagattccatgcttcagacgtgcaggtgaactcgcaagagtggattgatttaatacaaaagacggtattgagtgctccgcccccggtgctagttgttacgcctagccaccagctttctcagacattgggggcactaattccaacggccgtagtcagggctacaaacgaaacttccagccaagctgctgcacgtttggatgatgctcgggtgctgattgccgctggtgcttgggctgggcttgatgcgccaatccaatgggcatccatcattattcctcgcataccgtatgagagaccagtagtgctagatgggcagcatgagagtagttttttggacacccgaaatactgcactgcgtaggatgcgtcaggtgatcggacgtggcttgcgatctccagaggctagttgcgaaatttacgttctagatggcaggtataaaaacatagaggcctttgtacccaagcgattccgtagtgggtggacaagcaaacagttcttagagggcagtagacgtgaactggtcttgtccaaaatagaacgtgatccatcagtccgtaaagaagcactaaaacgctttggtcatgaatgcatgtgttgtggctttcatccaaaggtgatctctcagttagatgtgcatcacctatcccccttgagtgaaggcggcgaaagactcacagcaattagcgatcttgcagttctctgcgctaactgtcaccgactcgcccactcaacttcaccaccgttaagtattgatgctatgaaggcgttgagatgaggtagtggccttttttcgggtcacgttaccaagttgctactggcaaacacagcgccactcgtatcgtccggttgcctgattgaagacttgcttttgagtgcactggctcgtacctaggggtggcagttgtaacgacggcattggttggattgatggcggagtcattgggcacatcccgatgcatatagcttggtcgaacttattttaattggggggttgactttttaccgcccacgagtaaaagcattactggaagtccaagtgcaacgccacttcgggctagatgtctggcgctaaagatgaagacccccatcctacttacagaaacatagtgacatacaaaataagagtaaataaatgacaaatcgtcctaagggttggttggctgcgctgctttcgctaggttttccgcctatcggctttttatacgtgggccggtggaggtgggcgatattgagtttgctgcctattggcgtatttgccggcactacttacgcgtttcctaaagtgcatttggaggaaatgtggtgggttgttgacatattttcttgggtcttttctggcatatgcgcatggattgcctataaggaggcggcccgatttggtgcagaccggatccgtcctggctatagcaaatggtatggattgcttgcaacagcaatcgtgatacctagttcagtcattggtgttcgcgcttttttattcgagccgttcagaattcccgctcgaagcatgttgccaacactagacataggggccagaataatagttaaaaaatggggatatgggaactacgcaactttcggatttcagctatttcatgctaaacccagtgttgctttgaatcgaggtgatctcattgtctttgaatacccgcccaatcgggatataaactacatcaaacggctagttggcctacctggtgatacggtggcttacctcaataagcgccttacgataaacggtcagtctgtttctataactgacttaccggattactacgatgaacaaagtatgagatatttcaaacagtttgaagaagcattaggtgatacgagatatagattgctaaatgaggtcgatcgacctgcttttgtgcctggtgctgaacaatttttggggcgcgaatggtgtcgctatacgattgatggtttcatctgcaaagtgcccttaggcaactatttcatgcttggtgacaatcgggacaattcgttggactctcgctactggggttttgtaccttcagaccacatcgttgggaaagttgtctatattattcaatagcgtagcaaacataggttttgaaaccactgaaggaaatctctaggcgtcttgtatttagaagggcaaggggtggtgcaccgcgacattgttgccaagcgcatgaccccgcagcaaatcgctgacgcgcaaaaactggcgcgggattgtttggctcggaatttcaagggctgcgactagtgtcggttgccaaggttcaaacaatgggggggtgttcatgcgaaagtccattttggtattcgcggtttacttagcagttagtgtggacgctgcacgctagttgtagctggatgatataacctctgtgagtactgacggcaaagtacacaaataaataattaatattttcactaaagattacacatgaaaaatatcaaaaaatctataattactgctggatttttattactgattaccggctgtggaacaacatcaaatgtcggttacgtttggtttggcactggtatcaatgacgattggggtactggaggtaatatttggagccatttttcctcctactctcagcaaagtgtcaatcaggttgctactgaatactgttcaagaaaaaatttaccacccccaactgtaactaccatctcaagtccatcatttgtggtctccgagtattacatgttcagatttcagtgtgataaaaatgctatgccacgcactacagttccacaatccatacaacaaggtaaattatcattgaacgaagcaaaaaataagtgcattgatttggggtttaaagcaaatactgaggaattgggaaaatgcgtattacaactatcaaaataggactggcactcagtctttgttcattaaatgggtttgctgttgacttaactctttttgaaaaccaatgcgctgagattggttttacaaggaatacgcctgcatttgggagttgtgttttagatttgcattcacgtgaattcaattcaaatccaagtcaaaaactgtatcaacaaccagcttcggagttttctaggcaaaatgaattgtctagggaagcgttagacgaagctaggaaagctcggcaagaggccgcaacagcgcggcgagaggctgatgagtaccgaaaaaggatagaagcacaaaaacgacaagaccaatttgatgaacagagaagacttctctgggatagcaatgaaaaggcaatgcgtgaaagttggcgacgtccctgaaagaattaaaagagggacagtttttacgcctcattaaaaaaaacttcgctattaaggtgcttagtgaattgggtgagtttaaaaatagggtttagtctgtctataaattgagaattaaatgaataaattttcgacgctcctcattcctctgataattgtatcagtcagtacatttgccacaccgttaacggctcaggaaaagctagaatttcaaaaaagcagtgtgccttcttgcatagcaaaaaataatgcttccagagatttaactaccttacaaaaagaaggacttaacaattactgcatatgtcatagtgttgtaatgacaagtcttgttactagagaagaaatgatgagtttaggcaaaggtaagctaccgacaacattccaaggtaaggtctcggaggcacagaagcaatgtatcaaagcattgtctaattaatcaacatgcaatatttaactttatctgttggcgcagttttattgttgcctcttagcgtgtttgctcaaatgggcgctagaatgccaccaattgattatgatgagggagcatttaggaatccctctgattggtggtggactgtcctaattattgcaaactttattattgctccgtatttaataacaagaaaagaccttgactttggtggtgttgcatactttaaatggttcattgcgcttttcattacttttgttatttctcttcttttaattccattgttcgtaaataaaaatgattatatgttctggactattgctattcagttgggagttactagctatggatttataactaacaaaaaatagtttggtaaaattatattccgccagtagtgtgcatgcacaaaatgaacgagtagggcctaatcaagtcccaccctcatcgcgatctagttcatttatcaagcaactccacgacattgctttgcaaaaactgcggcttgaagctctgggtaaacctcagacatcctagtcggcttcggaccacgagtccgtgcgccgctcataaagcccaactgatgtcctactgcctcaagtacagcaaggcgggcactgactagactacgctccgttcgcgct

SEQ ID NO: 99 - DNA, 14962 bp, Artificial Sequence
  Synthetic Oligonucleotide
  misc_feature (1)..(9893): n is a, c, g, or t
nnnnnnnnnnnnnnnnnnnnnnnnnnnnnnnnnnnnnnnnnnnnnnnnnnnnnnnnnnnnnnnnnnnnnnnnnnnnnnnnnnnnnnnnnnnnnnnnnnnnnnnnnnnnnnnnnnnnnnnnnnnnnnnnnnnnnnnnnnnnnnnnnnnnnnnnnnnnnnnnnnnnnnnnnnnnnnnnnnnnnnnnnnnnnnnnnnnnnnnnnnnnnnnnnnnnnnnnnnnnnnnnnnnnnnnnnnnnnnnnnnnnnnnnnnnnnnnnnnnnnnnnnnnnnnnnnnnnnnnnnnnnnnnnnnnnnnnnnnnnnnnnnnnnnnnnnnnnnnnnnnnnnnnnnnnnnnnnnnnnnnnnnnnnnnnnnnnnnnnnnnnnnnnnnnnnnnnnnnnnnnnnnnnnnnnnnnnnnnnnnnnnnnnnnnnnnnnnnnnnnnnnnnnnnnnnnnnnnnnnnnnnnnnnnnnnnnnnnnnnnnnnnnnnnnnnnnnnnnnnnnnnnnnnnnnnnnnnnnnnnnnnnnnnnnnnnnnnnnnnnnnnnnnnnnnnnnnnnnnnnnnnnnnnnnnnnnnnnnnnnnnnnnnnnnnnnnnnnnnnnnnnnnnnnnnnnnnnnnnnnnnnnnnnnnnnnnnnnnnnnnnnnnnnnnnnnnnnnnnnnnnnnnnnnnnnnnnnnnnnnnnnnnnnnnnnnnnnnnnnnnnnnnnnnnnnnnnnnnnnnnnnnnnnnnnnnnnnnnnnnnnnnnnnnnnnnnnnnnnnnnnnnnnnnnnnnnnnnnnnnnnnnnnnnnnnnnnnnnnnnnnnnnnnnnnnnnnnnnnnnnnnnnnnnnnnnnnnnnnnnnnnnnnnnnnnnnnnnnnnnnnnnnnnnnnnnnnnnnnnnnnnnnnnnnnnnnnnnnnnnnnnnnnnnnnnnnnnnnnnnnnnnnnnnnnnnnnnnnnnnnnnnnnnnnnnnnnnnnnnnnnnnnnnnnnnnnnnnnnnnnnnnnnnnnnnnnnnnnnnnnnnnnnnnnnnnnnnnnnnnnnnnnnnnnnnnnnnnnnnnnnnnnnnnnnnnnnnnnnnnnnnnnnnnnnnnnnnnnnnnnnnnnnnnnnnnnnnnnnnnnnnnnnnnnnnnnnnnnnnnnnnnnnnnnnnnnnnnnnnnnnnnnnnnnnnnnnnnnnnnnnnnnnnnnnnnnnnnnnnnnnnnnnnnnnnnnnnnnnnnnnnnnnnnnnnnnnnnnnnnnnnnnnnnnnnnnnnnnnnnnnnnnnnnnnnnnnnnnnnnnnnnnnnnnnnnnnnnnnnnnnnnnnnnnnnnnnnnnnnnnnnnnnnnnnnnnnnnnnnnnnnnnnnnnnnnnnnnnnnnnnnnnnnnnnnnnnnnnnnnnnnnnnnnnnnnnnnnnnnnnnnnnnnnnnnnnnnnnnnnnnnnnnnnnnnnnnnnnnnnnnnnnnnnnnnnnnnnnnnnnnnnnnnnnnnnnnnnnnnnnnnnnnnnnnnnnnnnnnnnnnnnnnnnnnnnnnnnnnnnnnnnnnnnnnnnnnnnnnnnnnnnnnnnnnnnnnnnnnnnnnnnnnnnnnnnnnnnnnnnnnnnnnnnnnnnnnnnnnnnnnnnnnnnnnnnnnnnnnnnnnnnnnnnnnnnnnnnnnnnnnnnnnnnnnnnnnnnnnnnnnnnnnnnnnnnnnnnnnnnnnnnnnnnnnnnnnnnnnnnnnnnnnnnnnnnnnnnnnnnnnnnnnnnnnnnnnnnnnnnnnnnnnnnnnnnnnnnnnnnnnnnnnnnnnnnnnnnnnnnnnnnnnnnnnnnnnnnnnnnnnnnnnnnnnnnnnnnnnnnnnnnnnnnnnnnnnnnnnnnnnnnnnnnnnnnnnnnnnnnnnnnnnnnnnnnnnnnnnnnnnnnnnnnnnnnnnnnnnnnnnnnnnnnnnnnnnnnnnnnnnnnnnnnnnnnnnnnnnnnnnnnnnnnnnnnnnnnnnnnnnnnnnnnnnnnnnnnnnnnnnnnnnnnnnnnnnnnnnnnnnnnnnnnnnnnnnnnnnnnnnnnnnnnnnnnnnnnnnnnnnnnnnnnnnnnnnnnnnnnnnnnnnnnnnnnnnnnnnnnnnnnnnnnnnnnnnnnnnnnnnnnnnnnnnnnnnnnnnnnnnnnnnnnnnnnnnnnnnnnnnnnnnnnnnnnnnnnnnnnnnnnnnnnnnnnnnnnnnnnnnnnnnnnnnnnnnnnnnnnnnnnnnnnnnnnnnnnnnnnnnnnnnnnnnnnnnnnnnnnnnnnnnnnnnnnnnnnnnnnnnnnnnnnnnnnnnnnnnnnnnnnnnnnnnnnnnnnnnnnnnnnnnnnnnnnnnnnnnnnnnnnnnnnnnnnnnnnnnnnnnnnnnnnnnnnnnnnnnnnnnnnnnnnnnnnnnnnnnnnnnnnnnnnnnnnnnnnnnnnnnnnnnnnnnnnnnnnnnnnnnnnnnnnnnnnnnnnnnnnnnnnnnnnnnnnnnnnnnnnnnnnnnnnnnnnnnnnnnnnnnnnnnnnnnnnnnnnnnnnnnnnnnnnnnnnnnnnnnnnnnnnnnnnnnnnnnnnnnnnnnnnnnnnnnnnnnnnnnnnnnnnnnnnnnnnnnnnnnnnnnnnnnnnnnnnnnnnnnnnnnnnnnnnnnnnnnnnnnnnnnnnnnnnnnnnnnnnnnnnnnnnnnnnnnnnnnnnnnnnnnnnnnnnnnnnnnnnnnnnnnnnnnnnnnnnnnnnnnnnnnnnnnnnnnnnnnnnnnnnnnnnnnnnnnnnnnnnnnnnnnnnnnnnnnnnnnnnnnnnnnnnnnnnnnnnnnnnnnnnnnnnnnnnnnnnnnnnnnnnnnnnnnnnnnnnnnnnnnnnnnnnnnnnnnnnnnnnnnnnnnnnnnnnnnnnnnnnnnnnnnnnnnnnnnnnnnnnnnnnnnnnnnnnnnnnnnnnnnnnnnnnnnnnnnnnnnnnnnnnnnnnnnnnnnnnnnnnnnnnnnnnnnnnnnnnnnnnnnnnnnnnnnnnnnnnnnnnnnnnnnnnnnnnnnnnnnnnnnnnnnnnnnnnnnnnnnnnnnnnnnnnnnnnnnnnnnnnnnnnnnnnnnnnnnnnnnnnnnnnnnnnnnnnnnnnnnnnnnnnnnnnnnnnnnnnnnnnnnnnnnnnnnnnnnnnnnnnnnnnnnnnnnnnnnnnnnnnnnnnnnnnnnnnnnnnnnnnnnnnnnnnnnnnnnnnnnnnnnnnnnnnnnnnnnnnnnnnnnnnnnnnnnnnnnnnnnnnnnnnnnnnnnnnnnnnnnnnnnnnnnnnnnnnnnnnnnnnnnnnnnnnnnnnnnnnnnnnnnnnnnnnnnnnnnnnnnnnnnnnnnnnnnnnnnnnnnnnnnnnnnnnnnnnnnnnnnnnnnnnnnnnnnnnnnnnnnnnnnnnnnnnnnnnnnnnnnnnnnnnnnnnnnnnnnnnnnnnnnnnnnnnnnnnnnnnnnnnnnnnnnnnnnnnnnnnnnnnnnnnnnnnnnnnnnnnnnnnnnnnnnnnnnnnnnnnnnnnnnnnnnnnnnnnnnnnnnnnnnnnnnnnnnnnnnnnnnnnnnnnnnnnnnnnnnnnnnnnnnnnnnnnnnnnnnnnnnnnnnnnnnnnnnnnnnnnnnnnnnnnnnnnnnnnnnnnnnnnnnnnnnnnnnnnnnnnnnnnnnnnnnnnnnnnnnnnnnnnnnnnnnnnnnnnnnnnnnnnnnnnnnnnnnnnnnnnnnnnnnnnnnnnnnnnnnnnnnnnnnnnnnnnnnnnnnnnnnnnnnnnnnnnnnnnnnnnnnnnnnnnnnnnnnnnnnnnnnnnnnnnnnnnnnnnnnnnnnnnnnnnnnnnnnnnnnnnnnnnnnnnnnnnnnnnnnnnnnnnnnnnnnnnnnnnnnnnnnnnnnnnnnnnnnnnnnnnnnnnnnnnnnnnnnnnnnnnnnnnnnnnnnnnnnnnnnnnnnnnnnnnnnnnnnnnnnnnnnnnnnnnnnnnnnnnnnnnnnnnnnnnnnnnnnnnnnnnnnnnnnnnnnnnnnnnnnnnnnnnnnnnnnnnnnnnnnnnnnnnnnnnnnnnnnnnnnnnnnnnnnnnnnnnnnnnnnnnnnnnnnnnnnnnnnnnnnnnnnnnnnnnnnnnnnnnnnnnnnnnnnnnnnnnnnnnnnnnnnnnnnnnnnnnnnnnnnnnnnnnnnnnnnnnnnnnnnnnnnnnnnnnnnnnnnnnnnnnnnnnnnnnnnnnnnnnnnnnnnnnnnnnnnnnnnnnnnnnnnnnnnnnnnnnnnnnnnnnnnnnnnnnnnnnnnnnnnnnnnnnnnnnnnnnnnnnnnnnnnnnnnnnnnnnnnnnnnnnnnnnnnnnnnnnnnnnnnnnnnnnnnnnnnnnnnnnnnnnnnnnnnnnnnnnnnnnnnnnnnnnnnnnnnnnnnnnnnnnnnnnnnnnnnnnnnnnnnnnnnnnnnnnnnnnnnnnnnnnnnnnnnnnnnnnnnnnnnnnnnnnnnnnnnnnnnnnnnnnnnnnnnnnnnnnnnnnnnnnnnnnnnnnnnnnnnnnnnnnnnnnnnnnnnnnnnnnnnnnnnnnnnnnnnnnnnnnnnnnnnnnnnnnnnnnnnnnnnnnnnnnnnnnnnnnnnnnnnnnnnnnnnnnnnnnnnnnnnnnnnnnnnnnnnnnnnnnnnnnnnnnnnnnnnnnnnnnnnnnnnnnnnnnnnnnnnnnnnnnnnnnnnnnnnnnnnnnnnnnnnnnnnnnnnnnnnnnnnnnnnnnnnnnnnnnnnnnnnnnnnnnnnnnnnnnnnnnnnnnnnnnnnnnnnnnnnnnnnnnnnnnnnnnnnnnnnnnnnnnnnnnnnnnnnnnnnnnnnnnnnnnnnnnnnnnnnnnnnnnnnnnnnnnnnnnnnnnnnnnnnnnnnnnnnnnnnnnnnnnnnnnnnnnnnnnnnnnnnnnnnnnnnnnnnnnnnnnnnnnnnnnnnnnnnnnnnnnnnnnnnnnnnnnnnnnnnnnnnnnnnnnnnnnnnnnnnnnnnnnnnnnnnnnnnnnnnnnnnnnnnnnnnnnnnnnnnnnnnnnnnnnnnnnnnnnnnnnnnnnnnnnnnnnnnnnnnnnnnnnnnnnnnnnnnnnnnnnnnnnnnnnnnnnnnnnnnnnnnnnnnnnnnnnnnnnnnnnnnnnnnnnnnnnnnnnnnnnnnnnnnnnnnnnnnnnnnnnnnnnnnnnnnnnnnnnnnnnnnnnnnnnnnnnnnnnnnnnnnnnnnnnnnnnnnnnnnnnnnnnnnnnnnnnnnnnnnnnnnnnnnnnnnnnnnnnnnnnnnnnnnnnnnnnnnnnnnnnnnnnnnnnnnnnnnnnnnnnnnnnnnnnnnnnnnnnnnnnnnnnnnnnnnnnnnnnnnnnnnnnnnnnnnnnnnnnnnnnnnnnnnnnnnnnnnnnnnnnnnnnnnnnnnnnnnnnnnnnnnnnnnnnnnnnnnnnnnnnnnnnnnnnnnnnnnnnnnnnnnnnnnnnnnnnnnnnnnnnnnnnnnnnnnnnnnnnnnnnnnnnnnnnnnnnnnnnnnnnnnnnnnnnnnnnnnnnnnnnnnnnnnnnnnnnnnnnnnnnnnnnnnnnnnnnnnnnnnnnnnnnnnnnnnnnnnnnnnnnnnnnnnnnnnnnnnnnnnnnnnnnnnnnnnnnnnnnnnnnnnnnnnnnnnnnnnnnnnnnnnnnnnnnnnnnnnnnnnnnnnnnnnnnnnnnnnnnnnnnnnnnnnnnnnnnnnnnnnnnnnnnnnnnnnnnnnnnnnnnnnnnnnnnnnnnnnnnnnnnnnnnnnnnnnnnnnnnnnnnnnnnnnnnnnnnnnnnnnnnnnnnnnnnnnnnnnnnnnnnnnnnnnnnnnnnnnnnnnnnnnnnnnnnnnnnnnnnnnnnnnnnnnnnnnnnnnnnnnnnnnnnnnnnnnnnnnnnnnnnnnnnnnnnnnnnnnnnnnnnnnnnnnnnnnnnnnnnnnnnnnnnnnnnnnnnnnnnnnnnnnnnnnnnnnnnnnnnnnnnnnnnnnnnnnnnnnnnnnnnnnnnnnnnnnnnnnnnnnnnnnnnnnnnnnnnnnnnnnnnnnnnnnnnnnnnnnnnnnnnnnnnnnnnnnnnnnnnnnnnnnnnnnnnnnnnnnnnnnnnnnnnnnnnnnnnnnnnnnnnnnnnnnnnnnnnnnnnnnnnnnnnnnnnnnnnnnnnnnnnnnnnnnnnnnnnnnnnnnnnnnnnnnnnnnnnnnnnnnnnnnnnnnnnnnnnnnnnnnnnnnnnnnnnnnnnnnnnnnnnnnnnnnnnnnnnnnnnnnnnnnnnnnnnnnnnnnnnnnnnnnnnnnnnnnnnnnnnnnnnnnnnnnnnnnnnnnnnnnnnnnnnnnnnnnnnnnnnnnnnnnnnnnnnnnnnnnnnnnnnnnnnnnnnnnnnnnnnnnnnnnnnnnnnnnnnnnnnnnnnnnnnnnnnnnnnnnnnnnnnnnnnnnnnnnnnnnnnnnnnnnnnnnnnnnnnnnnnnnnnnnnnnnnnnnnnnnnnnnnnnnnnnnnnnnnnnnnnnnnnnnnnnnnnnnnnnnnnnnnnnnnnnnnnnnnnnnnnnnnnnnnnnnnnnnnnnnnnnnnnnnnnnnnnnnnnnnnnnnnnnnnnnnnnnnnnnnnnnnnnnnnnnnnnnnnnnnnnnnnnnnnnnnnnnnnnnnnnnnnnnnnnnnnnnnnnnnnnnnnnnnnnnnnnnnnnnnnnnnnnnnnnnnnnnnnnnnnnnnnnnnnnnnnnnnnnnnnnnnnnnnnnnnnnnnnnnnnnnnnnnnnnnnnnnnnnnnnnnnnnnnnnnnnnnnnnnnnnnnnnnnnnnnnnnnnnnnnnnnnnnnnnnnnnnnnnnnnnnnnnnnnnnnnnnnnnnnnnnnnnnnnnnnnnnnnnnnnnnnnnnnnnnnnnnnnnnnnnnnnnnnnnnnnnnnnnnnnnnnnnnnnnnnnnnnnnnnnnnnnnnnnnnnnnnnnnnnnnnnnnnnnnnnnnnnnnnnnnnnnnnnnnnnnnnnnnnnnnnnnnnnnnnnnnnnnnnnnnnnnnnnnnnnnnnnnnnnnnnnnnnnnnnnnnnnnnnnnnnnnnnnnnnnnnnnnnnnnnnnnnnnnnnnnnnnnnnnnnnnnnnnnnnnnnnnnnnnnnnnnnnnnnnnnnnnnnnnnnnnnnnnnnnnnnnnnnnnnnnnnnnnnnnnnnnnnnnnnnnnnnnnnnnnnnnnnnnnnnnnnnnnnnnnnnnnnnnnnnnnnnnnnnnnnnnnnnnnnnnnnnnnnnnnnnnnnnnnnnnnnnnnnnnnnnnnnnnnnnnnnnnnnnnnnnnnnnnnnnnnnnnnnnnnnnnnnnnnnnnnnnnnnnnnnnnnnnnnnnnnnnnnnnnnnnnnnnnnnnnnnnnnnnnnnnnnnnnnnnnnnnnnnnnnnnnnnnnnnnnnnnnnnnnnnnnnnnnnnnnnnnnnnnnnnnnnnnnnnnnnnnnnnnnnnnnnnnnnnnnnnnnnnnnnnnnnnnnnnnnnnnnnnnnnnnnnnnnnnnnnnnnnnnnnnnnnnnnnnnnnnnnnnnnnnnnnnnnnnnnnnnnnnnnnnnnnnnnnnnnnnnnnnnnnnnnnnnnnnnnnnnnnnnnnnnnnnnnnnnnnnnnnnnnnnnnnnnnnnnnnnnnnnnnnnnnnnnnnnnnnnnnnnnnnnnnnnnnnnnnnnnnnnnnnnnnnnnnnnnnnnnnnnnnnnnnnnnnnnnnnnnnnnnnnnnnnnnnnnnnnnnnnnnnnnnnnnnnnnnnnnnnnnnnnnnnnnnnnnnnnnnnnnnnnnnnnnnnnnnnnnnnnnnnnnnnnnnnnnnnnnnnnnnnnnnnnnnnnnnnnnnnnnnnnnnnnnnnnnnnnnnnnnnnnnnnnnnnnnnnnnnnnnnnnnnnnnnnnnnnnnnnnnnnnnnnnnnnnnnnnnnnnnnnnnnnnnnnnnnnnnnnnnnnnnnnnnnnnnnnnnnnnnnnnnnnnnnnnnnnnnnnnnnnnnnnnnnnnnnnnnnnnnnnnnnnnnnnnnnnnnnnnnnnnnnnnnnnnnnnnnnnnnnnnnnnnnnnnnnnnnnnnnnnnnnnnnnnnnnnnnnnnnnnnnnnnnnnnnnnnnnnnnnnnnnnnnnnnnnnnnnnnnnnnnnnnnnnnnnnnnnnnnnnnnnnnnnnnnnnnnnnnnnnnnnnnnnnnnnnnnnnnnnnnnnnnnnnnnnnnnnnnnnnnnnnnnnnnnnnnnnnnnnnnnnnnnnnnnnnnnnnnnnnnnnnnnnnnnnnnnnnnnnnnnnnnnnnnnnnnnnnnnnnnnnnnnnnnnnnnnnnnnnnnnnnnnnnnnnnnnnnnnnnnnnnnnnnnnnnnnnnnnnnnnnnnnnnnnnnnnnnnnnnnnnnnnnnnnnnnnnnnnnnnnnnnnnnnnnnnnnnnnnnnnnnnnnnnnnnnnnnnnnnnnnnnnnnnnnnnnnnnnnnnnnnnnnnnnnnnnnnnnnnnnnnnnnnnnnnnnnnnnnnnnnnnnnnnnnnnnnnnnnnnnnnnnnnnnnnnnnnnnnnnnnnnnnnnnnnnnnnnnnnnnnnnnnnnnnnnnnnnnnnnnnnnnnnnnnnnnnnnnnnnnnnnnnnnnnnnnnnnnnnnnnnnnnnnnnnnnnnnnnnnnnnnnnnnnnnnnnnnnnnnnnnnnnnnnnnnnnnnnnnnnnnnnnnnnnnnnnnnnnnnnnnnnnnnnnnnnnnnnnnnnnnnnnnnnnnnnnnnnnnnnnnnnnnnnnnnnnnnnnnnnnnnnnnnnnnnnnnnnnnnnnnnnnnnnnnnnnnnnnnnnnnnnnnnnnnnnnnnnnnnnnnnnnnnnnnnnnnnnnnnnnnnnnnnnnnnnnnnnnnnnnnnnnnnnnnnnnnnnnnnnnnnnnnnnnnnnnnnnnnnnnnnnnnnnnnnnnnnnnnnnnnnnnnnnnnnnnnnnnnnnnnnnnnnnnnnnnnnnnnnnnnnnnnnnnnnnnnnnnnnnnnnnnnnnnnnnnnnnnnnnnnnnnnnnnnnnnnnnnnnnnnnnnnnnnnnnnnnnnnnnnnnnnnnnnnnnnnnnnnnnnnnnnnnnnnnnnnnnnnnnnnnnnnnnnnnnnnnnnnnnnnnnnnnnnnnnnnnnnnnnnnnnnnnnnnnnnnnnnnnnnnnnnnnnnnnnnnnnnnnnnnnnnnnnnnnnnnnnnnnnnnnnnnnnnnnnnnnnnnnnnnnnnnnnnnnnnnnnnnnnnnnnnnnnnnnnnnnnnnnnnnnnnnnnnnnnnnnnnnnnnnnnnnnnnnnnnnnnnnnnnnnnnnnnnnnnnnnnnnnnnnnnnnnnnnnnnnnnnnnnnnnnnnnnnnnnnnnnnnnnnnnnnnnnnnnnnnnnnnnnnnnnnnnnnnnnnnnnnnnnnnnnnnnnnnnnnnnnnnnnnnnnnnnnnnnnnnnnnnnnnnnnnnnnnnnnnnnnnnnnnnnnnnnnnnnnnnnnnnnnnnnnnnnnnnnnnnnnnnnnnnnnnnnnnnnnnnnnnnnnnnnnnnnnnnnnnnnnnnnnnnnnnnnnnnnnnnnnnnnnnnnnnnnnnnnnnnnnnnnnnnnnnnnnnnnnnnnnnnnnnnnnnnnnnnnnnnnnnnnnnnnnnnnnnnnnnnnnnnnnnnnnnnnnnnnnnnnnnnnnnnnnnnnnnnnnnnnnnnnnnnnnnnnnnnnnnnnnnnnnnnnnnnnnnnnnnnnnnnnnnnnnnnnnnnnnnnnnnnnnnnnnnnnnnnnnnnnnnnnnnnnnnnnnnnnnnnnnnnnnnnnnnnnnnnnnnnnnnnnnnnnnnnnnnnnnnnnnnnnnnnnnnnnnnnnnnnnnnnnnnnnnnnnnnnnnnnnnnnnnnnnnnnnnnnnnnnnnnnnnnnnnnnnnnnnnnnnnnnnnnnnnnnnnnnnnnnnnnnnnnnnnnnnnnnnnnnnnnnnnnnnnnnnnnnnnnnnnnnnnnnnnnnnnnnnnnnnnnnnnnnnnnnnnnnnnnnnnnnnnnnnnnnnnnnnnnnnnnnnnnnnnnnnnnnnnnnnnnnnnnnnnnnnnnnnnnnnnnnnnnnnnnnnnnnnnnnnnnaaggttgccgctggcatatctgatcattagattctccgtgatcgtcgtgcgtacccatgttcgctccttccgggcgggcttcaatacgcattgatcctgagaaaggttgccgcggcggagtacaccactacgccccgaagatgttgtcggtactggaggcattgtcttgttccgttcgcccgagcagcgcgatttcttcgaaaaaatcctggcccatgtcagggcgccggagcagtcgaggtcctttgccaagggcgtcgatgggcccctgcttctcgagggtggtacgggtctgggcaagacgcgcgccgccctgatggcggccgtggaaaccgtccgatccggactgacggtcgcgatcgtcctcccctccgaaaccctcatgcagcggctgctggattccgtcgatttcgccgaggtcgtccccgcggatctggattggctggcgttccgacctgcggcgggcgacgcctcaccggacgagatcgaacgggtggcagacgcagcccgcgaggtgccgctgctcctctgcacggcgggctcggtcatcatcgaccgggtgctcagggggcgctacaacggtgccacgtcacgtgactacctgatcttcgacgatgcggaccgcttgcccgacagtgcactgaaggcgaccgattgcgaagtcactgcgtcgcagttgcgcgagttgggggtggttggcagcaacgtgcgggatgtcgccaccaaggtttcccgtgcgcctgctgcgtcccaggaggcgcgcgctgccgcgacgatgatcctcgagatgctggatgatcccgcgaagtatcactcggtgaccttcaacccggagaccgggctcgtcttgcggcacaaaatgccaggacgcctgatgaagcgggtcgccaacaacccgaacgctgccttcatcggtacgtcgcttgccctcggcaggagcttcgatgccttcaagcgtgccatgggcatcgtcagtccgagcggcttgtcatcgatcatcgagcccaagaaccacggcagcctgcgttgccaccacgccgcgcatgcgccgctgtccgaggaatggttcgccgcgctcaagcagggtatcgcgaaggcggcgcgaccctgcctcgtcgtcaccgcggacgagcagcaggcccgggccatcggcttgctgacgcccgaggcgtcggtacgcctttcaggcgactcgccgtcacccgaatcattgacgtccgctggagccgtgctgatcgctgcggcgaactggccgggactcgacgcgccgcgggagtggcgcagcatcatcatcgcccgcgtacccatcgacgccgaatggggtcaggacgaagatgccgacgaacacttcgtcgatccccgcaatcaggccgtcaggctgctcaagaacatcatcggctggggagttcgccgacccgatgccgaatgtgatctttatgtgctcgactatcgcccggggttggtggagtcgctgatcccggctcgattcaagggtgattgggcacagcggcgcgcgatgacgggacgcggggcggcggaggacagcgcgatcgaacgcctcatcgctgccgagcagcctggcaaggcgctgcgtgacgaggtgttccgggtgcttggcaagcgctgcatgacctgcgatctcgtgccgaagccggggataccgctcgagatccatctgctcgggccagtctcggtcagcgaagacgatcgatcgctggccgaggagatggcggtgctctgccagtcatgccaccggctcgcgcattcggtcacgccgccgctctcgatgcccatgctgcgcggcttccacgaacgcaagcgcgcgcgaacctgagtccgtcgccgttgcggcgcaaggcggcttccgtcagatcgccaccgcgtgcacggggctgtccgtggcggcgctacggcgccgcagcgcgaacatgcgcatggttccgtagcctttggcggcagccgtcagaccgacgtagtcgcagcagaactcgtccgcgtgctcgagttcgagcgccgcggcaaaagtttcggtgacatagacgagaccgggtggcgtcaccggctcgatgcgcgccgcaagactcacgtgcgcgccgaagaagttctgtttcagcagcagaggatcgtcggtttcgaacaccggaccgagatgaccgccgagtcgcaaggccaggggttcggcgaaagcgccgctgtcggcagccaacgcctgcatcgcgacctgcaggtcgagggcgcattccgccgcttcgcgggtccggcgaaaaacgaggaacatgccatcgccccaggtgttgaggctgagcacgcgcgcgcgatggctctcgatggcacgcgcgaccccgcccaggacaccatggacgaactgcggcatttcccgatccgatatggtgctgaagcgggtgaagtcgccgaacagcatggctcgcgcccgtcgccggttcctgcgctcgtccgcaggcggcgcagcgttggtttcttgcgcgtcttgcggtgcgttgccgggatccggcaacggaatgatgcgctgcggccttccggattcgcgccacagtccgacgtcgacggccgttccggccacgccgcgagcgggggtgccgtcccacaccgcaagttgcgccacgctcgtgaaaaggtgttgggaggcgagcacggcaaggcccatggcgatccggctcgagtaggtgaacaacgtgtcgtcgccgagcccggcgccatcggtcgcgtaacggaccgattgcgcggcggcgaggcaacgccgcatccgggtcacccattgcccgccggcgggccgcaccgaggtttcaatgaaatcgtccagaaggaacggcagtaccacatgcagctgcgcaccgcgatcgagcagcgcttcggcaaagaggatgtctgcgcctgaggcgagcgaaccatagccgaagcccgctgcgtgctcgtccagtgtcttactgatggcggcggcgatcgtcgcttcggccgcggccgggaagcgacccgggactccgggtgcggcgatcatgtgacccgtgtagtggatcaccgcgggcggcgtcagggacgccacccacgatggcggcagacccttggcctcggtcgcgtgcttgatcgaacgcgctgcggtggcgagcatggtgtagtcaccattgctcgcttcgcgtgcggcatcgagccttgcctcggccgacacgagatcgccattgatgatatgcgcttcgatcagggttgcgagggaccagaaccgatcttcgccctctgccgtgtccaccatcgtctcgagcgaggcgatcaggcgccgcgccactgcagccgcacgctccggctccccggcaagcagcagcaggttcgcgaaattgatcccggggtaatagtcgccgcgctcgaggtaggccgcttcgtactttgcggccgcggtgcgcagcagggcgagcctctcggcttcatcggtgctggccagggcgagatccttgtccagtcgggcatcgagttcacgcagaccgcgttcgcttcgaccttcgagtcccagtgaaacgaaccattgtcttgcctgccgcgtggcccccgagcgggcgagggcgaggacggctcggtgtttaagcctggtgctgtcgggatgttcgcccagcccgcggcgggcgatgtcgaacgcccggaacgcctcgcctgcacgctcggcttcgcgcaccagcgcataccagtccgcttcgttgcgaccgaccgtcggtgcgtggcgcagatcacccatggtgcattgtttactcgacccgggtccagatcgacttgctgtagaagaagcccctcgattgcttcacttcgagtttgcgacctcccggcagttgcaggatttcggcgcggctgagggatccggtttccggatcgagcaatatcgcctcttcccagacgttctctgcggcgttgaatcgggcgttttgcaagatcgtcagccccatgaacaactgccccttgcgcgaaccgggacagtccttgcagcgcgctgcacgctgcgccgggtcccgaacctcctcgattcgtccccagagttttcctgacagcaatgaaatgcgcacgaggaagccgcccgggtcgctctcggcttcgtgggtcagccagagtcccgtcggcggtggcggcggggtcgcgaaggaaaatgttgatacaccgatcaggaggatggaaaagagaagctttacacgcatgttccgttcacctccgccagctgtggagcgcccgcgatgcgcctgcgtcaccgatcctcaaatcgccctttcaacgcgaaccagtcgcccgacgcccgcagcccggcccgcttcgatgtcgcgctcgctgtcgccgatgaggatcgacgctgcagggtcgatgccgagctcgcggatcgcacgcaggatcattcccggtgccggcttgcgacagtcgcaggatcgcgtgaattgcgcaacggtaccctgcgggtgatgcgggcagtggtacaccgcggcgatacggatgccctgcgccgccaaggcttcgcgatagcgatccgtgagcagttcatagtccgcctcggagaagtagccccgcgcgatgccggactggttggtgatcacgaccagcagataaccctcgtcggccagccgctgcaacatcgcgacggcgtccggtgcgaacctgaagtcctcccagcgaccgacatacccggagtcgacgttgatcaccccgtcgcggtcgatgaacgcggctttgcgcaggccggacatggagcctccggtcagcgggccggatcgcccagtttcgagaggatgcgggtggtggacaggccgggcacgaggtcgaggatggccacctggccgcccgctgccgtgacacaccgtccgccggcgacttcgccggcgatgtagtccccgcctttcacgagtacctgcggcaacacctcgcagtagagatgttccggcgtgtcttcctcgaaggcgacgagatagtcgacgcactccagcatgccgaggaccgtgagtcggtgctcgagcggattgaccggccgcgtcggccccttgagccgacgtaccgaggcgtcgtcgttgacggccacgaccagcaggtca

SEQ ID NO: 100 - DNA, 14934 bp, Artificial Sequence
  Synthetic Oligonucleotide
  misc_feature (1)..(9997): n is a, c, g, or t
nnnnnnnnnnnnnnnnnnnnnnnnnnnnnnnnnnnnnnnnnnnnnnnnnnnnnnnnnnnnnnnnnnnnnnnnnnnnnnnnnnnnnnnnnnnnnnnnnnnnnnnnnnnnnnnnnnnnnnnnnnnnnnnnnnnnnnnnnnnnnnnnnnnnnnnnnnnnnnnnnnnnnnnnnnnnnnnnnnnnnnnnnnnnnnnnnnnnnnnnnnnnnnnnnnnnnnnnnnnnnnnnnnnnnnnnnnnnnnnnnnnnnnnnnnnnnnnnnnnnnnnnnnnnnnnnnnnnnnnnnnnnnnnnnnnnnnnnnnnnnnnnnnnnnnnnnnnnnnnnnnnnnnnnnnnnnnnnnnnnnnnnnnnnnnnnnnnnnnnnnnnnnnnnnnnnnnnnnnnnnnnnnnnnnnnnnnnnnnnnnnnnnnnnnnnnnnnnnnnnnnnnnnnnnnnnnnnnnnnnnnnnnnnnnnnnnnnnnnnnnnnnnnnnnnnnnnnnnnnnnnnnnnnnnnnnnnnnnnnnnnnnnnnnnnnnnnnnnnnnnnnnnnnnnnnnnnnnnnnnnnnnnnnnnnnnnnnnnnnnnnnnnnnnnnnnnnnnnnnnnnnnnnnnnnnnnnnnnnnnnnnnnnnnnnnnnnnnnnnnnnnnnnnnnnnnnnnnnnnnnnnnnnnnnnnnnnnnnnnnnnnnnnnnnnnnnnnnnnnnnnnnnnnnnnnnnnnnnnnnnnnnnnnnnnnnnnnnnnnnnnnnnnnnnnnnnnnnnnnnnnnnnnnnnnnnnnnnnnnnnnnnnnnnnnnnnnnnnnnnnnnnnnnnnnnnnnnnnnnnnnnnnnnnnnnnnnnnnnnnnnnnnnnnnnnnnnnnnnnnnnnnnnnnnnnnnnnnnnnnnnnnnnnnnnnnnnnnnnnnnnnnnnnnnnnnnnnnnnnnnnnnnnnnnnnnnnnnnnnnnnnnnnnnnnnnnnnnnnnnnnnnnnnnnnnnnnnnnnnnnnnnnnnnnnnnnnnnnnnnnnnnnnnnnnnnnnnnnnnnnnnnnnnnnnnnnnnnnnnnnnnnnnnnnnnnnnnnnnnnnnnnnnnnnnnnnnnnnnnnnnnnnnnnnnnnnnnnnnnnnnnnnnnnnnnnnnnnnnnnnnnnnnnnnnnnnnnnnnnnnnnnnnnnnnnnnnnnnnnnnnnnnnnnnnnnnnnnnnnnnnnnnnnnnnnnnnnnnnnnnnnnnnnnnnnnnnnnnnnnnnnnnnnnnnnnnnnnnnnnnnnnnnnnnnnnnnnnnnnnnnnnnnnnnnnnnnnnnnnnnnnnnnnnnnnnnnnnnnnnnnnnnnnnnnnnnnnnnnnnnnnnnnnnnnnnnnnnnnnnnnnnnnnnnnnnnnnnnnnnnnnnnnnnnnnnnnnnnnnnnnnnnnnnnnnnnnnnnnnnnnnnnnnnnnnnnnnnnnnnnnnnnnnnnnnnnnnnnnnnnnnnnnnnnnnnnnnnnnnnnnnnnnnnnnnnnnnnnnnnnnnnnnnnnnnnnnnnnnnnnnnnnnnnnnnnnnnnnnnnnnnnnnnnnnnnnnnnnnnnnnnnnnnnnnnnnnnnnnnnnnnnnnnnnnnnnnnnnnnnnnnnnnnnnnnnnnnnnnnnnnnnnnnnnnnnnnnnnnnnnnnnnnnnnnnnnnnnnnnnnnnnnnnnnnnnnnnnnnnnnnnnnnnnnnnnnnnnnnnnnnnnnnnnnnnnnnnnnnnnnnnnnnnnnnnnnnnnnnnnnnnnnnnnnnnnnnnnnnnnnnnnnnnnnnnnnnnnnnnnnnnnnnnnnnnnnnnnnnnnnnnnnnnnnnnnnnnnnnnnnnnnnnnnnnnnnnnnnnnnnnnnnnnnnnnnnnnnnnnnnnnnnnnnnnnnnnnnnnnnnnnnnnnnnnnnnnnnnnnnnnnnnnnnnnnnnnnnnnnnnnnnnnnnnnnnnnnnnnnnnnnnnnnnnnnnnnnnnnnnnnnnnnnnnnnnnnnnnnnnnnnnnnnnnnnnnnnnnnnnnnnnnnnnnnnnnnnnnnnnnnnnnnnnnnnnnnnnnnnnnnnnnnnnnnnnnnnnnnnnnnnnnnnnnnnnnnnnnnnnnnnnnnnnnnnnnnnnnnnnnnnnnnnnnnnnnnnnnnnnnnnnnnnnnnnnnnnnnnnnnnnnnnnnnnnnnnnnnnnnnnnnnnnnnnnnnnnnnnnnnnnnnnnnnnnnnnnnnnnnnnnnnnnnnnnnnnnnnnnnnnnnnnnnnnnnnnnnnnnnnnnnnnnnnnnnnnnnnnnnnnnnnnnnnnnnnnnnnnnnnnnnnnnnnnnnnnnnnnnnnnnnnnnnnnnnnnnnnnnnnnnnnnnnnnnnnnnnnnnnnnnnnnnnnnnnnnnnnnnnnnnnnnnnnnnnnnnnnnnnnnnnnnnnnnnnnnnnnnnnnnnnnnnnnnnnnnnnnnnnnnnnnnnnnnnnnnnnnnnnnnnnnnnnnnnnnnnnnnnnnnnnnnnnnnnnnnnnnnnnnnnnnnnnnnnnnnnnnnnnnnnnnnnnnnnnnnnnnnnnnnnnnnnnnnnnnnnnnnnnnnnnnnnnnnnnnnnnnnnnnnnnnnnnnnnnnnnnnnnnnnnnnnnnnnnnnnnnnnnnnnnnnnnnnnnnnnnnnnnnnnnnnnnnnnnnnnnnnnnnnnnnnnnnnnnnnnnnnnnnnnnnnnnnnnnnnnnnnnnnnnnnnnnnnnnnnnnnnnnnnnnnnnnnnnnnnnnnnnnnnnnnnnnnnnnnnnnnnnnnnnnnnnnnnnnnnnnnnnnnnnnnnnnnnnnnnnnnnnnnnnnnnnnnnnnnnnnnnnnnnnnnnnnnnnnnnnnnnnnnnnnnnnnnnnnnnnnnnnnnnnnnnnnnnnnnnnnnnnnnnnnnnnnnnnnnnnnnnnnnnnnnnnnnnnnnnnnnnnnnnnnnnnnnnnnnnnnnnnnnnnnnnnnnnnnnnnnnnnnnnnnnnnnnnnnnnnnnnnnnnnnnnnnnnnnnnnnnnnnnnnnnnnnnnnnnnnnnnnnnnnnnnnnnnnnnnnnnnnnnnnnnnnnnnnnnnnnnnnnnnnnnnnnnnnnnnnnnnnnnnnnnnnnnnnnnnnnnnnnnnnnnnnnnnnnnnnnnnnnnnnnnnnnnnnnnnnnnnnnnnnnnnnnnnnnnnnnnnnnnnnnnnnnnnnnnnnnnnnnnnnnnnnnnnnnnnnnnnnnnnnnnnnnnnnnnnnnnnnnnnnnnnnnnnnnnnnnnnnnnnnnnnnnnnnnnnnnnnnnnnnnnnnnnnnnnnnnnnnnnnnnnnnnnnnnnnnnnnnnnnnnnnnnnnnnnnnnnnnnnnnnnnnnnnnnnnnnnnnnnnnnnnnnnnnnnnnnnnnnnnnnnnnnnnnnnnnnnnnnnnnnnnnnnnnnnnnnnnnnnnnnnnnnnnnnnnnnnnnnnnnnnnnnnnnnnnnnnnnnnnnnnnnnnnnnnnnnnnnnnnnnnnnnnnnnnnnnnnnnnnnnnnnnnnnnnnnnnnnnnnnnnnnnnnnnnnnnnnnnnnnnnnnnnnnnnnnnnnnnnnnnnnnnnnnnnnnnnnnnnnnnnnnnnnnnnnnnnnnnnnnnnnnnnnnnnnnnnnnnnnnnnnnnnnnnnnnnnnnnnnnnnnnnnnnnnnnnnnnnnnnnnnnnnnnnnnnnnnnnnnnnnnnnnnnnnnnnnnnnnnnnnnnnnnnnnnnnnnnnnnnnnnnnnnnnnnnnnnnnnnnnnnnnnnnnnnnnnnnnnnnnnnnnnnnnnnnnnnnnnnnnnnnnnnnnnnnnnnnnnnnnnnnnnnnnnnnnnnnnnnnnnnnnnnnnnnnnnnnnnnnnnnnnnnnnnnnnnnnnnnnnnnnnnnnnnnnnnnnnnnnnnnnnnnnnnnnnnnnnnnnnnnnnnnnnnnnnnnnnnnnnnnnnnnnnnnnnnnnnnnnnnnnnnnnnnnnnnnnnnnnnnnnnnnnnnnnnnnnnnnnnnnnnnnnnnnnnnnnnnnnnnnnnnnnnnnnnnnnnnnnnnnnnnnnnnnnnnnnnnnnnnnnnnnnnnnnnnnnnnnnnnnnnnnnnnnnnnnnnnnnnnnnnnnnnnnnnnnnnnnnnnnnnnnnnnnnnnnnnnnnnnnnnnnnnnnnnnnnnnnnnnnnnnnnnnnnnnnnnnnnnnnnnnnnnnnnnnnnnnnnnnnnnnnnnnnnnnnnnnnnnnnnnnnnnnnnnnnnnnnnnnnnnnnnnnnnnnnnnnnnnnnnnnnnnnnnnnnnnnnnnnnnnnnnnnnnnnnnnnnnnnnnnnnnnnnnnnnnnnnnnnnnnnnnnnnnnnnnnnnnnnnnnnnnnnnnnnnnnnnnnnnnnnnnnnnnnnnnnnnnnnnnnnnnnnnnnnnnnnnnnnnnnnnnnnnnnnnnnnnnnnnnnnnnnnnnnnnnnnnnnnnnnnnnnnnnnnnnnnnnnnnnnnnnnnnnnnnnnnnnnnnnnnnnnnnnnnnnnnnnnnnnnnnnnnnnnnnnnnnnnnnnnnnnnnnnnnnnnnnnnnnnnnnnnnnnnnnnnnnnnnnnnnnnnnnnnnnnnnnnnnnnnnnnnnnnnnnnnnnnnnnnnnnnnnnnnnnnnnnnnnnnnnnnnnnnnnnnnnnnnnnnnnnnnnnnnnnnnnnnnnnnnnnnnnnnnnnnnnnnnnnnnnnnnnnnnnnnnnnnnnnnnnnnnnnnnnnnnnnnnnnnnnnnnnnnnnnnnnnnnnnnnnnnnnnnnnnnnnnnnnnnnnnnnnnnnnnnnnnnnnnnnnnnnnnnnnnnnnnnnnnnnnnnnnnnnnnnnnnnnnnnnnnnnnnnnnnnnnnnnnnnnnnnnnnnnnnnnnnnnnnnnnnnnnnnnnnnnnnnnnnnnnnnnnnnnnnnnnnnnnnnnnnnnnnnnnnnnnnnnnnnnnnnnnnnnnnnnnnnnnnnnnnnnnnnnnnnnnnnnnnnnnnnnnnnnnnnnnnnnnnnnnnnnnnnnnnnnnnnnnnnnnnnnnnnnnnnnnnnnnnnnnnnnnnnnnnnnnnnnnnnnnnnnnnnnnnnnnnnnnnnnnnnnnnnnnnnnnnnnnnnnnnnnnnnnnnnnnnnnnnnnnnnnnnnnnnnnnnnnnnnnnnnnnnnnnnnnnnnnnnnnnnnnnnnnnnnnnnnnnnnnnnnnnnnnnnnnnnnnnnnnnnnnnnnnnnnnnnnnnnnnnnnnnnnnnnnnnnnnnnnnnnnnnnnnnnnnnnnnnnnnnnnnnnnnnnnnnnnnnnnnnnnnnnnnnnnnnnnnnnnnnnnnnnnnnnnnnnnnnnnnnnnnnnnnnnnnnnnnnnnnnnnnnnnnnnnnnnnnnnnnnnnnnnnnnnnnnnnnnnnnnnnnnnnnnnnnnnnnnnnnnnnnnnnnnnnnnnnnnnnnnnnnnnnnnnnnnnnnnnnnnnnnnnnnnnnnnnnnnnnnnnnnnnnnnnnnnnnnnnnnnnnnnnnnnnnnnnnnnnnnnnnnnnnnnnnnnnnnnnnnnnnnnnnnnnnnnnnnnnnnnnnnnnnnnnnnnnnnnnnnnnnnnnnnnnnnnnnnnnnnnnnnnnnnnnnnnnnnnnnnnnnnnnnnnnnnnnnnnnnnnnnnnnnnnnnnnnnnnnnnnnnnnnnnnnnnnnnnnnnnnnnnnnnnnnnnnnnnnnnnnnnnnnnnnnnnnnnnnnnnnnnnnnnnnnnnnnnnnnnnnnnnnnnnnnnnnnnnnnnnnnnnnnnnnnnnnnnnnnnnnnnnnnnnnnnnnnnnnnnnnnnnnnnnnnnnnnnnnnnnnnnnnnnnnnnnnnnnnnnnnnnnnnnnnnnnnnnnnnnnnnnnnnnnnnnnnnnnnnnnnnnnnnnnnnnnnnnnnnnnnnnnnnnnnnnnnnnnnnnnnnnnnnnnnnnnnnnnnnnnnnnnnnnnnnnnnnnnnnnnnnnnnnnnnnnnnnnnnnnnnnnnnnnnnnnnnnnnnnnnnnnnnnnnnnnnnnnnnnnnnnnnnnnnnnnnnnnnnnnnnnnnnnnnnnnnnnnnnnnnnnnnnnnnnnnnnnnnnnnnnnnnnnnnnnnnnnnnnnnnnnnnnnnnnnnnnnnnnnnnnnnnnnnnnnnnnnnnnnnnnnnnnnnnnnnnnnnnnnnnnnnnnnnnnnnnnnnnnnnnnnnnnnnnnnnnnnnnnnnnnnnnnnnnnnnnnnnnnnnnnnnnnnnnnnnnnnnnnnnnnnnnnnnnnnnnnnnnnnnnnnnnnnnnnnnnnnnnnnnnnnnnnnnnnnnnnnnnnnnnnnnnnnnnnnnnnnnnnnnnnnnnnnnnnnnnnnnnnnnnnnnnnnnnnnnnnnnnnnnnnnnnnnnnnnnnnnnnnnnnnnnnnnnnnnnnnnnnnnnnnnnnnnnnnnnnnnnnnnnnnnnnnnnnnnnnnnnnnnnnnnnnnnnnnnnnnnnnnnnnnnnnnnnnnnnnnnnnnnnnnnnnnnnnnnnnnnnnnnnnnnnnnnnnnnnnnnnnnnnnnnnnnnnnnnnnnnnnnnnnnnnnnnnnnnnnnnnnnnnnnnnnnnnnnnnnnnnnnnnnnnnnnnnnnnnnnnnnnnnnnnnnnnnnnnnnnnnnnnnnnnnnnnnnnnnnnnnnnnnnnnnnnnnnnnnnnnnnnnnnnnnnnnnnnnnnnnnnnnnnnnnnnnnnnnnnnnnnnnnnnnnnnnnnnnnnnnnnnnnnnnnnnnnnnnnnnnnnnnnnnnnnnnnnnnnnnnnnnnnnnnnnnnnnnnnnnnnnnnnnnnnnnnnnnnnnnnnnnnnnnnnnnnnnnnnnnnnnnnnnnnnnnnnnnnnnnnnnnnnnnnnnnnnnnnnnnnnnnnnnnnnnnnnnnnnnnnnnnnnnnnnnnnnnnnnnnnnnnnnnnnnnnnnnnnnnnnnnnnnnnnnnnnnnnnnnnnnnnnnnnnnnnnnnnnnnnnnnnnnnnnnnnnnnnnnnnnnnnnnnnnnnnnnnnnnnnnnnnnnnnnnnnnnnnnnnnnnnnnnnnnnnnnnnnnnnnnnnnnnnnnnnnnnnnnnnnnnnnnnnnnnnnnnnnnnnnnnnnnnnnnnnnnnnnnnnnnnnnnnnnnnnnnnnnnnnnnnnnnnnnnnnnnnnnnnnnnnnnnnnnnnnnnnnnnnnnnnnnnnnnnnnnnnnnnnnnnnnnnnnnnnnnnnnnnnnnnnnnnnnnnnnnnnnnnnnnnnnnnnnnnnnnnnnnnnnnnnnnnnnnnnnnnnnnnnnnnnnnnnnnnnnnnnnnnnnnnnnnnnnnnnnnnnnnnnnnnnnnnnnnnnnnnnnnnnnnnnnnnnnnnnnnnnnnnnnnnnnnnnnnnnnnnnnnnnnnnnnnnnnnnnnnnnnnnnnnnnnnnnnnnnnnnnnnnnnnnnnnnnnnnnnnnnnnnnnnnnnnnnnnnnnnnnnnnnnnnnnnnnnnnnnnnnnnnnnnnnnnnnnnnnnnnnnnnnnnnnnnnnnnnnnnnnnnnnnnnnnnnnnnnnnnnnnnnnnnnnnnnnnnnnnnnnnnnnnnnnnnnnnnnnnnnnnnnnnnnnnnnnnnnnnnnnnnnnnnnnnnnnnnnnnnnnnnnnnnnnnnnnnnnnnnnnnnnnnnnnnnnnnnnnnnnnnnnnnnnnnnnnnnnnnnnnnnnnnnnnnnnnnnnnnnnnnnnnnnnnnnnnnnnnnnnnnnnnnnnnnnnnnnnnnnnnnnnnnnnnnnnnnnnnnnnnnnnnnnnnnnnnnnnnnnnnnnnnnnnnnnnnnnnnnnnnnnnnnnnnnnnnnnnnnnnnnnnnnnnnnnnnnnnnnnnnnnnnnnnnnnnnnnnnnnnnnnnnnnnnnnnnnnnnnnnnnnnnnnnnnnnnnnnnnnnnnnnnnnnnnnnnnnnnnnnnnnnnnnnnnnnnnnnnnnnnnnnnnnnnnnnnnnnnnnnnnnnnnnnnnnnnnnnnnnnnnnnnnnnnnnnnnnnnnnnnnnnnnnnnnnnnnnnnnnnnnnnnnnnnnnnnnnnnnnnnnnnnnnnnnnnnnnnnnnnnnnnnnnnnnnnnnnnnnnnnnnnnnnnnnnnnnnnnnnnnnnnnnnnnnnnnnnnnnnnnnnnnnnnnnnnnnnnnnnnnnnnnnnnnnnnnnnnnnnnnnnnnnnnnnnnnnnnnnnnnnnnnnnnnnnnnnnnnnnnnnnnnnnnnnnnnnnnnnnnnnnnnnnnnnnnnnnnnnnnnnnnnnnnnnnnnnnnnnnnnnnnnnnnnnnnnnnnnnnnnnnnnnnnnnnnnnnnnnnnnnnnnnnnnnnnnnnnnnnnnnnnnnnnnnnnnnnnnnnnnnnnnnnnnnnnnnnnnnnnnnnnnnnnnnnnnnnnnnnnnnnnnnnnnnnnnnnnnnnnnnnnnnnnnnnnnnnnnnnnnnnnnnnnnnnnnnnnnnnnnnnnnnnnnnnnnnnnnnnnnnnnnnnnnnnnnnnnnnnnnnnnnnnnnnnnnnnnnnnnnnnnnnnnnnnnnnnnnnnnnnnnnnnnnnnnnnnnnnnnnnnnnnnnnnnnnnnnnnnnnnnnnnnnnnnnnnnnnnnnnnnnnnnnnnnnnnnnnnnnnnnnnnnnnnnnnnnnnnnnnnnnnnnnnnnnnnnnnnnnnnnnnnnnnnnnnnnnnnnnnnnnnnnnnnnnnnnnnnnnnnnnnnnnnnnnnnnnnnnnnnnnnnnnnnnnnnnnnnnnnnnnnnnnnnnnnnnnnnnnnnnnnnnnnnnnnnnnnnnnnnnnnnnnnnnnnnnnnnnnnnnnnnnnnnnnnnnnnnnnnnnnnnnnnnnnnnnnnnnnnnnnnnnnnnnnnnnnnnnnnnnnnnnnnnnnnnnnnnnnnnnnnnnnnnnnnnnnnnnnnnnnnnnnnnnnnnnnnnnnnnnnnnnnnnnnnnnnnnnnnnnnnnnnnnnnnnnnnnnnnnnnnnnnnnnnnnnnnnnnnnnnnnnnnnnnnnnnnnnnnnnnnnnnnnnnnnnnnnnnnnnnnnnnnnnnnnnnnnnnnnnnnnnnnnnnnnnnnnnnnnnnnnnnnnnnnnnnnnnnnnnnnnnnnnnnnnnnnnnnnnnnnnnnnnnnnnnnnnnnnnnnnnnnnnnnnnnnnnnnnnnnnnnnnnnnnnnnnnnnnnnnnnnnnnnnnnnnnnnnnnnnnnnnnnnnnnnnnnnnnnnnnnnnnnnnnnnnnnnnnnnnnnnnnnnnnnnnnnnnnnnnnnnnnnnnnnnnnnnnnnnnnnnnnnnnnnnnnnnnnnnnnnnnnnnnnnnnnnnnnnnnnnnnnnnnnnnnnnnnnnnnnnnnnnnnnnnnnnnnnnnnnnnnnnnnnnnnnnnnnnnnnnnnnnnnnnnnnnnnnnnnnnnnnnnnnnnnnnnnnnnnnnnnnnnnnnnnnnnnnnnnnnnnnnnnnnnnnnnnnnnnnnnnnnnnnnnnnnnnnnnnnnnnnnnnnnnnnnnnnnnnnnnnnnnnnnnnnnnnnnnnnnnnnnnnnnnnnnnnnnnnnnnnnnnnnnnnnnnnnnnnnnnnnnnnnnnnnnnnnnnnnnnnnnnnnnnnnnnnnnnnnnnnnnnnnnnnnnnnnnnnnnnnnnnnnnnnnnnnnnnnnnnnnnnnnnnnnnnnnnnnnnnnnnnnnnnnnnnnnnnnnnnnnnnnnnnnnnnnnnnnnnnnnnnnnnnnnnnnnnnnnnnnnnnnnnnnnnnnnnnnnnnnnnnnnnnnnnnnnnnnnnnnnnnnnnnnnnnnnnnnnnnnnnnnnnnnnnnnnnnnnnnnnnnnnnnnnnnnnnnnnnnnnnnnnnnnnnnnnnnnnnnnnnnnnnnnnnnnnnnnnnnnnnnnnnnnnnnnnnnnnnnnnnnnnnnnnnnnnnnnnnnnnnnnnnnnnnnnnnnnnnnnnnnnnnnnnnnnnnnnnnnnnnnnnnnnnnnnnnnnnnnnnnnnnnnnnnnnnnnnnnnnnnnnnnnnnnnnnnnnnnnnnnnnnnnnnnnnnnnnnnnnnnnnnnnnnnnnnnnnnnnnnnnnnnnnnnnnnnnnnnnnnnnnnnnnnnnnnnnnnnnnnnnnnnnnnnnnnnnnnnnnnnnnnnnnnnnnnnnnnnnnnnnnnnnnnnnnnnnnnnnnnnnnnnnnnnnnnnnnnnnnnnnnnnnnnnnnnnnnnnnnnnnnnnnnnnnnnnnntacgcgacctgaatatcacggcaccatcggctgaagccattgccactgccgttgtggcgcatccccgagccacaacagaacaacgcgccatcgcccggctggtgcaggaatacgctgcggaagcgcgaggctatgcgttggccggcaggacagaccaagggggcattgccgtatatcatccaaggcccgggcggatgctgaagcgcatcagcaatctgccacgcagcattttcatttccgccactctgcaaatccgcggaagttttgacgccttccggcgagccatggcgattgaggagatctcgcccctttcaacagccattgaaccaaagcgtcacggggacctctcctttgtctatcagcccaaggtgccggatacggaagattggttcagtgaggttatcagcagcatagccaccgcaccgcgcccctgtttggtgctggtcccaagccatgatttggcggaacgcataggcgcggctgctggtgggcgtgtgcgtggccgcgaggagcctttgcgtgaggccgccgcggaagctgaaagccaagggcttttcatcgcagccggtgcttgggcgggcctggatacgcctacacgctgggccagcctggtcattccccgcgcgcctttccccaggctgcgggttctggagggggaagcgatagatcattacctggatagccatgcagccacagtccggcgccttgggcaggggcttggccgcgtactgcgctttccggaggcacgggccaaggtgatcattctggaccagcgccttgtcacccacggcctggaaagctgcgtgccggaacgcttccgtcccgcatgggaggaggccaagcgcgccgcactttctcaggggttcgacgaaggcacacggtttgaaatgacgttgagccgggcggaacgagaccctgcgttacgcaaggcagcactcagccattacgggctgcgctgcaccgaatgcggctttgtgccgcgggtttcatcgcaattagatgttcaccacctgaacccaatcgccgagggcaagcgtagaactgtgctgacggacgtgacggttctctgcgccaattgtcaccggctggcacatgcgcgcctccgcgccgcttcagccgagggggaggcggtgtgaaaccttaaccgatgtaagtccgtaaaggacgctccttcatgaaaggcgtgcggcgacattgagaaggccttcctgtcgtggcgcggcacgttgctcgcctgatggcctctgctgggccgacaggcaagcggacttgcggcggattgactttgctatcacagggaagaccagcttagcattggtcaccccagccagggatgaatgaccctggcgagttgagcatcgcttaaggaggaaagaaaatggccaaagcattgatcggttttctgatggcggtgttatttctggccctacctcatcaggcccgcgctcaagaggaaaactggccatcacgtcccattactatggtaatacctttctcaaccggcggatccgtggatgcggtgttgcgcgtcctgaagccgatgctcgaagccgaattgaagcagccgatcattccggattatcggcctggcggcgcaacggcacttggggcggccacagtcgcccgcgcccggcctgacggctacactttcggcatcgtcgtggatgccctcgcggtaaatgccacgctctatcgcaaccttccgtatgatacgttgacggatttgatgccggtctctctgcttggcaaaatgccgctggtgatgatcgttcatccggctgcaccattcaatgatcttgcggcaatcgtgtcggcggctcgcgcaagaccaggtgcattgacctatgcgtcggtcggcgtgggcagcatcaatcatttggcgatggaattactcaaccggcaaagtggcgtcagtatgacacatgtgccgtatcgcggtggcggtcctgcggtgaccgatctgctgggtgggcatgtggatatgatgttgatgtccctggcacttgctcgcgcccagcttgatgccggtacgctcaaggctgtggccgtcacctcggcaagccgacttgccgcgcttccgagcctgcccaccgcaagcgaaggcggcatccctggctttaccgcatttgcttggcagggcgtggtggcgccacctggaacgcccaccaccgtgattgggcggtttcaccagatattgcgcaatgtggctgccgaaccgcgcatacgcgaagggctggagaatctgggaatgcaggctgaggtatcctctccaagcgagctcagccaattcctacgcgagcagatcaacacttggagcactgtgattcgagaagctgatatcaagccggagtgaagcggcttggctttcatgtcacccaacgcctcgccgcatctgcaggcactcggcgctgcgttgccagcggggctgcagcgttttcacgctgatgccgaaaggtgcacagtttccgggcaggcaagggtcacgacaggcggcgtgtttgctcgtgttctgcttcgtttgcttggcctccatctccgcgatggaaagcagccgctggacgtcacctttatgcccgctggcagcggcacgatctgggatcggcgcttcgggacaggccgctttatcagccggattgaagcaggcggcatcggctttctcatcgaatcctttggtccctataccttgcgatttcggctgaccccagatggagacgcagtttcatggacgctgcagcgtgctgcggtatttggcctcgctattccctcatttctggcgccgcgtatcgctgcacgggaatggttggccgctgacaaagcctatgcaatgtccgtcgcggtcgtgcttccgctgcttggtttgatactacgatatgaaggtgagcttcatccgccgcagtttaatgagcccgactgacaaagggcgaaaaaagaatgggcacgcagccgaacgctttttcaccccaccaaccgcgaccgctgctctggcgtcagcaagctgcagtgctcatgatgcccgaaccagcgatatcggttgcgggcaacaagcctatacagcgcatcgcggagggcttcagggatcaggcgggtaatctcaagcaagcgccaggcaccgccgagcaccggcaaaaggcgcagatagccaccgctcatcccccagcaatgcccgtccttcatgagtagatatgtggtgtcaatttccacgccgaagtggcggtatagcgaagcgccaagttcgccttgcgctgacgtataaaggatttttccttgccggtcggcagacatcaaccagcgcaccccaccggagcaaagcccacaatgcccatcaaaaacgaaaagtgggcggctttcgtcaaacaccggcacggtgggatcgtcgcgccaggagaaagcttctgtggaatagcgtgtcatgcccgtattgccgtgatatccagcgacgccaaggcgccaagatactcatccaggctgatgaggtcgaggcaaggtcgcgcaccggcagggattgatccaccatgtgcaaggcgccgggcaatcaggattgccggaatacaggggatattcggcccatggccagatcgggcgatgatacgctcggtacggataagcgctttgccgtcatggccttttccactgatccgcatgtgaaagccgctgcgcgcgctaccccgccaatcaaaaaggaatgaggctttcaataaggcgtttgaccagcggtcgagccttggcaacaggcgaaaacgtaccccccatgaaaggagccaggtgccgaagtgcagaatggcgatctcatgtccggcgccgaagcgtatctgcttgagggttgggtagcgaaggggaaacaactccaggtcgggcacatcgcaatagccaaaccagcgtctgcccaactcgggatagacctcactatgcagcccctgccagccgaatacccgttgcatgcggccgtcgatcaaggtggtgaagggacgcccgacataggaaagaacggcgcttgccgtgccgagaccgcgattggtctgttgtgctgctgtgatgccgtaatcgactgcttcgatttgggcgaagtgacgcgcagcatcgtccagataggccgccgtgaggcatggcactgaactggcgccggagatgatcgctacaccttgatgacgcgcagcggggtcaagcgacccaatgttccggacaaaggtgcgggcatcggcaaggtcgcagtaatgcgcgcctgcggcgattgccgcttccgccacggcatagctttggtgctggaacgggcccacggtgtggatgaccagacctgggtgcaacgctgcaaggggcttagcgagatcaccgcctatgtccaatgctaccgcctcggcaggattgaccgcatcaagggaagcagcaaaggcctgggccttggccagggatcgcccggctatgatcagggttatcgccggatcgtcctttagggcacgggcgacatagctgccgaagttaccgtagccgccgaggattaggactcgcattgccatctgcctgactatcgcacgatttgccaagctatcggcaggcagcaggccgaaaaaacggttcgcagcccctcaatgggtaactgtgccaggcaggaggcaagcagccgaaacaggataaacagttggtataattggaattttgttcaggaatagctctaacaccttgtaggttccgcccaattttccctacccagtgccgcttgccccaccagtccattccccaaccacgctgcaccgcagcatagttaaaaccatttcagatcaacgcgttaaaccttgttggaaaaatcggcctaccctcaagctttggagagaattcgccggttcggagaaaaaacgccgaaacattccgcttgagcaccctcaaggtcgccagaaaaaagctttgatttcaagggagtttaggcgctgtacgggggaagggag

SEQ ID NO: 101 - DNA, 14831 bp, Artificial Sequence
  Synthetic Oligonucleotide
  misc_feature (1)..(9997): n is a, c, g, or t
nnnnnnnnnnnnnnnnnnnnnnnnnnnnnnnnnnnnnnnnnnnnnnnnnnnnnnnnnnnnnnnnnnnnnnnnnnnnnnnnnnnnnnnnnnnnnnnnnnnnnnnnnnnnnnnnnnnnnnnnnnnnnnnnnnnnnnnnnnnnnnnnnnnnnnnnnnnnnnnnnnnnnnnnnnnnnnnnnnnnnnnnnnnnnnnnnnnnnnnnnnnnnnnnnnnnnnnnnnnnnnnnnnnnnnnnnnnnnnnnnnnnnnnnnnnnnnnnnnnnnnnnnnnnnnnnnnnnnnnnnnnnnnnnnnnnnnnnnnnnnnnnnnnnnnnnnnnnnnnnnnnnnnnnnnnnnnnnnnnnnnnnnnnnnnnnnnnnnnnnnnnnnnnnnnnnnnnnnnnnnnnnnnnnnnnnnnnnnnnnnnnnnnnnnnnnnnnnnnnnnnnnnnnnnnnnnnnnnnnnnnnnnnnnnnnnnnnnnnnnnnnnnnnnnnnnnnnnnnnnnnnnnnnnnnnnnnnnnnnnnnnnnnnnnnnnnnnnnnnnnnnnnnnnnnnnnnnnnnnnnnnnnnnnnnnnnnnnnnnnnnnnnnnnnnnnnnnnnnnnnnnnnnnnnnnnnnnnnnnnnnnnnnnnnnnnnnnnnnnnnnnnnnnnnnnnnnnnnnnnnnnnnnnnnnnnnnnnnnnnnnnnnnnnnnnnnnnnnnnnnnnnnnnnnnnnnnnnnnnnnnnnnnnnnnnnnnnnnnnnnnnnnnnnnnnnnnnnnnnnnnnnnnnnnnnnnnnnnnnnnnnnnnnnnnnnnnnnnnnnnnnnnnnnnnnnnnnnnnnnnnnnnnnnnnnnnnnnnnnnnnnnnnnnnnnnnnnnnnnnnnnnnnnnnnnnnnnnnnnnnnnnnnnnnnnnnnnnnnnnnnnnnnnnnnnnnnnnnnnnnnnnnnnnnnnnnnnnnnnnnnnnnnnnnnnnnnnnnnnnnnnnnnnnnnnnnnnnnnnnnnnnnnnnnnnnnnnnnnnnnnnnnnnnnnnnnnnnnnnnnnnnnnnnnnnnnnnnnnnnnnnnnnnnnnnnnnnnnnnnnnnnnnnnnnnnnnnnnnnnnnnnnnnnnnnnnnnnnnnnnnnnnnnnnnnnnnnnnnnnnnnnnnnnnnnnnnnnnnnnnnnnnnnnnnnnnnnnnnnnnnnnnnnnnnnnnnnnnnnnnnnnnnnnnnnnnnnnnnnnnnnnnnnnnnnnnnnnnnnnnnnnnnnnnnnnnnnnnnnnnnnnnnnnnnnnnnnnnnnnnnnnnnnnnnnnnnnnnnnnnnnnnnnnnnnnnnnnnnnnnnnnnnnnnnnnnnnnnnnnnnnnnnnnnnnnnnnnnnnnnnnnnnnnnnnnnnnnnnnnnnnnnnnnnnnnnnnnnnnnnnnnnnnnnnnnnnnnnnnnnnnnnnnnnnnnnnnnnnnnnnnnnnnnnnnnnnnnnnnnnnnnnnnnnnnnnnnnnnnnnnnnnnnnnnnnnnnnnnnnnnnnnnnnnnnnnnnnnnnnnnnnnnnnnnnnnnnnnnnnnnnnnnnnnnnnnnnnnnnnnnnnnnnnnnnnnnnnnnnnnnnnnnnnnnnnnnnnnnnnnnnnnnnnnnnnnnnnnnnnnnnnnnnnnnnnnnnnnnnnnnnnnnnnnnnnnnnnnnnnnnnnnnnnnnnnnnnnnnnnnnnnnnnnnnnnnnnnnnnnnnnnnnnnnnnnnnnnnnnnnnnnnnnnnnnnnnnnnnnnnnnnnnnnnnnnnnnnnnnnnnnnnnnnnnnnnnnnnnnnnnnnnnnnnnnnnnnnnnnnnnnnnnnnnnnnnnnnnnnnnnnnnnnnnnnnnnnnnnnnnnnnnnnnnnnnnnnnnnnnnnnnnnnnnnnnnnnnnnnnnnnnnnnnnnnnnnnnnnnnnnnnnnnnnnnnnnnnnnnnnnnnnnnnnnnnnnnnnnnnnnnnnnnnnnnnnnnnnnnnnnnnnnnnnnnnnnnnnnnnnnnnnnnnnnnnnnnnnnnnnnnnnnnnnnnnnnnnnnnnnnnnnnnnnnnnnnnnnnnnnnnnnnnnnnnnnnnnnnnnnnnnnnnnnnnnnnnnnnnnnnnnnnnnnnnnnnnnnnnnnnnnnnnnnnnnnnnnnnnnnnnnnnnnnnnnnnnnnnnnnnnnnnnnnnnnnnnnnnnnnnnnnnnnnnnnnnnnnnnnnnnnnnnnnnnnnnnnnnnnnnnnnnnnnnnnnnnnnnnnnnnnnnnnnnnnnnnnnnnnnnnnnnnnnnnnnnnnnnnnnnnnnnnnnnnnnnnnnnnnnnnnnnnnnnnnnnnnnnnnnnnnnnnnnnnnnnnnnnnnnnnnnnnnnnnnnnnnnnnnnnnnnnnnnnnnnnnnnnnnnnnnnnnnnnnnnnnnnnnnnnnnnnnnnnnnnnnnnnnnnnnnnnnnnnnnnnnnnnnnnnnnnnnnnnnnnnnnnnnnnnnnnnnnnnnnnnnnnnnnnnnnnnnnnnnnnnnnnnnnnnnnnnnnnnnnnnnnnnnnnnnnnnnnnnnnnnnnnnnnnnnnnnnnnnnnnnnnnnnnnnnnnnnnnnnnnnnnnnnnnnnnnnnnnnnnnnnnnnnnnnnnnnnnnnnnnnnnnnnnnnnnnnnnnnnnnnnnnnnnnnnnnnnnnnnnnnnnnnnnnnnnnnnnnnnnnnnnnnnnnnnnnnnnnnnnnnnnnnnnnnnnnnnnnnnnnnnnnnnnnnnnnnnnnnnnnnnnnnnnnnnnnnnnnnnnnnnnnnnnnnnnnnnnnnnnnnnnnnnnnnnnnnnnnnnnnnnnnnnnnnnnnnnnnnnnnnnnnnnnnnnnnnnnnnnnnnnnnnnnnnnnnnnnnnnnnnnnnnnnnnnnnnnnnnnnnnnnnnnnnnnnnnnnnnnnnnnnnnnnnnnnnnnnnnnnnnnnnnnnnnnnnnnnnnnnnnnnnnnnnnnnnnnnnnnnnnnnnnnnnnnnnnnnnnnnnnnnnnnnnnnnnnnnnnnnnnnnnnnnnnnnnnnnnnnnnnnnnnnnnnnnnnnnnnnnnnnnnnnnnnnnnnnnnnnnnnnnnnnnnnnnnnnnnnnnnnnnnnnnnnnnnnnnnnnnnnnnnnnnnnnnnnnnnnnnnnnnnnnnnnnnnnnnnnnnnnnnnnnnnnnnnnnnnnnnnnnnnnnnnnnnnnnnnnnnnnnnnnnnnnnnnnnnnnnnnnnnnnnnnnnnnnnnnnnnnnnnnnnnnnnnnnnnnnnnnnnnnnnnnnnnnnnnnnnnnnnnnnnnnnnnnnnnnnnnnnnnnnnnnnnnnnnnnnnnnnnnnnnnnnnnnnnnnnnnnnnnnnnnnnnnnnnnnnnnnnnnnnnnnnnnnnnnnnnnnnnnnnnnnnnnnnnnnnnnnnnnnnnnnnnnnnnnnnnnnnnnnnnnnnnnnnnnnnnnnnnnnnnnnnnnnnnnnnnnnnnnnnnnnnnnnnnnnnnnnnnnnnnnnnnnnnnnnnnnnnnnnnnnnnnnnnnnnnnnnnnnnnnnnnnnnnnnnnnnnnnnnnnnnnnnnnnnnnnnnnnnnnnnnnnnnnnnnnnnnnnnnnnnnnnnnnnnnnnnnnnnnnnnnnnnnnnnnnnnnnnnnnnnnnnnnnnnnnnnnnnnnnnnnnnnnnnnnnnnnnnnnnnnnnnnnnnnnnnnnnnnnnnnnnnnnnnnnnnnnnnnnnnnnnnnnnnnnnnnnnnnnnnnnnnnnnnnnnnnnnnnnnnnnnnnnnnnnnnnnnnnnnnnnnnnnnnnnnnnnnnnnnnnnnnnnnnnnnnnnnnnnnnnnnnnnnnnnnnnnnnnnnnnnnnnnnnnnnnnnnnnnnnnnnnnnnnnnnnnnnnnnnnnnnnnnnnnnnnnnnnnnnnnnnnnnnnnnnnnnnnnnnnnnnnnnnnnnnnnnnnnnnnnnnnnnnnnnnnnnnnnnnnnnnnnnnnnnnnnnnnnnnnnnnnnnnnnnnnnnnnnnnnnnnnnnnnnnnnnnnnnnnnnnnnnnnnnnnnnnnnnnnnnnnnnnnnnnnnnnnnnnnnnnnnnnnnnnnnnnnnnnnnnnnnnnnnnnnnnnnnnnnnnnnnnnnnnnnnnnnnnnnnnnnnnnnnnnnnnnnnnnnnnnnnnnnnnnnnnnnnnnnnnnnnnnnnnnnnnnnnnnnnnnnnnnnnnnnnnnnnnnnnnnnnnnnnnnnnnnnnnnnnnnnnnnnnnnnnnnnnnnnnnnnnnnnnnnnnnnnnnnnnnnnnnnnnnnnnnnnnnnnnnnnnnnnnnnnnnnnnnnnnnnnnnnnnnnnnnnnnnnnnnnnnnnnnnnnnnnnnnnnnnnnnnnnnnnnnnnnnnnnnnnnnnnnnnnnnnnnnnnnnnnnnnnnnnnnnnnnnnnnnnnnnnnnnnnnnnnnnnnnnnnnnnnnnnnnnnnnnnnnnnnnnnnnnnnnnnnnnnnnnnnnnnnnnnnnnnnnnnnnnnnnnnnnnnnnnnnnnnnnnnnnnnnnnnnnnnnnnnnnnnnnnnnnnnnnnnnnnnnnnnnnnnnnnnnnnnnnnnnnnnnnnnnnnnnnnnnnnnnnnnnnnnnnnnnnnnnnnnnnnnnnnnnnnnnnnnnnnnnnnnnnnnnnnnnnnnnnnnnnnnnnnnnnnnnnnnnnnnnnnnnnnnnnnnnnnnnnnnnnnnnnnnnnnnnnnnnnnnnnnnnnnnnnnnnnnnnnnnnnnnnnnnnnnnnnnnnnnnnnnnnnnnnnnnnnnnnnnnnnnnnnnnnnnnnnnnnnnnnnnnnnnnnnnnnnnnnnnnnnnnnnnnnnnnnnnnnnnnnnnnnnnnnnnnnnnnnnnnnnnnnnnnnnnnnnnnnnnnnnnnnnnnnnnnnnnnnnnnnnnnnnnnnnnnnnnnnnnnnnnnnnnnnnnnnnnnnnnnnnnnnnnnnnnnnnnnnnnnnnnnnnnnnnnnnnnnnnnnnnnnnnnnnnnnnnnnnnnnnnnnnnnnnnnnnnnnnnnnnnnnnnnnnnnnnnnnnnnnnnnnnnnnnnnnnnnnnnnnnnnnnnnnnnnnnnnnnnnnnnnnnnnnnnnnnnnnnnnnnnnnnnnnnnnnnnnnnnnnnnnnnnnnnnnnnnnnnnnnnnnnnnnnnnnnnnnnnnnnnnnnnnnnnnnnnnnnnnnnnnnnnnnnnnnnnnnnnnnnnnnnnnnnnnnnnnnnnnnnnnnnnnnnnnnnnnnnnnnnnnnnnnnnnnnnnnnnnnnnnnnnnnnnnnnnnnnnnnnnnnnnnnnnnnnnnnnnnnnnnnnnnnnnnnnnnnnnnnnnnnnnnnnnnnnnnnnnnnnnnnnnnnnnnnnnnnnnnnnnnnnnnnnnnnnnnnnnnnnnnnnnnnnnnnnnnnnnnnnnnnnnnnnnnnnnnnnnnnnnnnnnnnnnnnnnnnnnnnnnnnnnnnnnnnnnnnnnnnnnnnnnnnnnnnnnnnnnnnnnnnnnnnnnnnnnnnnnnnnnnnnnnnnnnnnnnnnnnnnnnnnnnnnnnnnnnnnnnnnnnnnnnnnnnnnnnnnnnnnnnnnnnnnnnnnnnnnnnnnnnnnnnnnnnnnnnnnnnnnnnnnnnnnnnnnnnnnnnnnnnnnnnnnnnnnnnnnnnnnnnnnnnnnnnnnnnnnnnnnnnnnnnnnnnnnnnnnnnnnnnnnnnnnnnnnnnnnnnnnnnnnnnnnnnnnnnnnnnnnnnnnnnnnnnnnnnnnnnnnnnnnnnnnnnnnnnnnnnnnnnnnnnnnnnnnnnnnnnnnnnnnnnnnnnnnnnnnnnnnnnnnnnnnnnnnnnnnnnnnnnnnnnnnnnnnnnnnnnnnnnnnnnnnnnnnnnnnnnnnnnnnnnnnnnnnnnnnnnnnnnnnnnnnnnnnnnnnnnnnnnnnnnnnnnnnnnnnnnnnnnnnnnnnnnnnnnnnnnnnnnnnnnnnnnnnnnnnnnnnnnnnnnnnnnnnnnnnnnnnnnnnnnnnnnnnnnnnnnnnnnnnnnnnnnnnnnnnnnnnnnnnnnnnnnnnnnnnnnnnnnnnnnnnnnnnnnnnnnnnnnnnnnnnnnnnnnnnnnnnnnnnnnnnnnnnnnnnnnnnnnnnnnnnnnnnnnnnnnnnnnnnnnnnnnnnnnnnnnnnnnnnnnnnnnnnnnnnnnnnnnnnnnnnnnnnnnnnnnnnnnnnnnnnnnnnnnnnnnnnnnnnnnnnnnnnnnnnnnnnnnnnnnnnnnnnnnnnnnnnnnnnnnnnnnnnnnnnnnnnnnnnnnnnnnnnnnnnnnnnnnnnnnnnnnnnnnnnnnnnnnnnnnnnnnnnnnnnnnnnnnnnnnnnnnnnnnnnnnnnnnnnnnnnnnnnnnnnnnnnnnnnnnnnnnnnnnnnnnnnnnnnnnnnnnnnnnnnnnnnnnnnnnnnnnnnnnnnnnnnnnnnnnnnnnnnnnnnnnnnnnnnnnnnnnnnnnnnnnnnnnnnnnnnnnnnnnnnnnnnnnnnnnnnnnnnnnnnnnnnnnnnnnnnnnnnnnnnnnnnnnnnnnnnnnnnnnnnnnnnnnnnnnnnnnnnnnnnnnnnnnnnnnnnnnnnnnnnnnnnnnnnnnnnnnnnnnnnnnnnnnnnnnnnnnnnnnnnnnnnnnnnnnnnnnnnnnnnnnnnnnnnnnnnnnnnnnnnnnnnnnnnnnnnnnnnnnnnnnnnnnnnnnnnnnnnnnnnnnnnnnnnnnnnnnnnnnnnnnnnnnnnnnnnnnnnnnnnnnnnnnnnnnnnnnnnnnnnnnnnnnnnnnnnnnnnnnnnnnnnnnnnnnnnnnnnnnnnnnnnnnnnnnnnnnnnnnnnnnnnnnnnnnnnnnnnnnnnnnnnnnnnnnnnnnnnnnnnnnnnnnnnnnnnnnnnnnnnnnnnnnnnnnnnnnnnnnnnnnnnnnnnnnnnnnnnnnnnnnnnnnnnnnnnnnnnnnnnnnnnnnnnnnnnnnnnnnnnnnnnnnnnnnnnnnnnnnnnnnnnnnnnnnnnnnnnnnnnnnnnnnnnnnnnnnnnnnnnnnnnnnnnnnnnnnnnnnnnnnnnnnnnnnnnnnnnnnnnnnnnnnnnnnnnnnnnnnnnnnnnnnnnnnnnnnnnnnnnnnnnnnnnnnnnnnnnnnnnnnnnnnnnnnnnnnnnnnnnnnnnnnnnnnnnnnnnnnnnnnnnnnnnnnnnnnnnnnnnnnnnnnnnnnnnnnnnnnnnnnnnnnnnnnnnnnnnnnnnnnnnnnnnnnnnnnnnnnnnnnnnnnnnnnnnnnnnnnnnnnnnnnnnnnnnnnnnnnnnnnnnnnnnnnnnnnnnnnnnnnnnnnnnnnnnnnnnnnnnnnnnnnnnnnnnnnnnnnnnnnnnnnnnnnnnnnnnnnnnnnnnnnnnnnnnnnnnnnnnnnnnnnnnnnnnnnnnnnnnnnnnnnnnnnnnnnnnnnnnnnnnnnnnnnnnnnnnnnnnnnnnnnnnnnnnnnnnnnnnnnnnnnnnnnnnnnnnnnnnnnnnnnnnnnnnnnnnnnnnnnnnnnnnnnnnnnnnnnnnnnnnnnnnnnnnnnnnnnnnnnnnnnnnnnnnnnnnnnnnnnnnnnnnnnnnnnnnnnnnnnnnnnnnnnnnnnnnnnnnnnnnnnnnnnnnnnnnnnnnnnnnnnnnnnnnnnnnnnnnnnnnnnnnnnnnnnnnnnnnnnnnnnnnnnnnnnnnnnnnnnnnnnnnnnnnnnnnnnnnnnnnnnnnnnnnnnnnnnnnnnnnnnnnnnnnnnnnnnnnnnnnnnnnnnnnnnnnnnnnnnnnnnnnnnnnnnnnnnnnnnnnnnnnnnnnnnnnnnnnnnnnnnnnnnnnnnnnnnnnnnnnnnnnnnnnnnnnnnnnnnnnnnnnnnnnnnnnnnnnnnnnnnnnnnnnnnnnnnnnnnnnnnnnnnnnnnnnnnnnnnnnnnnnnnnnnnnnnnnnnnnnnnnnnnnnnnnnnnnnnnnnnnnnnnnnnnnnnnnnnnnnnnnnnnnnnnnnnnnnnnnnnnnnnnnnnnnnnnnnnnnnnnnnnnnnnnnnnnnnnnnnnnnnnnnnnnnnnnnnnnnnnnnnnnnnnnnnnnnnnnnnnnnnnnnnnnnnnnnnnnnnnnnnnnnnnnnnnnnnnnnnnnnnnnnnnnnnnnnnnnnnnnnnnnnnnnnnnnnnnnnnnnnnnnnnnnnnnnnnnnnnnnnnnnnnnnnnnnnnnnnnnnnnnnnnnnnnnnnnnnnnnnnnnnnnnnnnnnnnnnnnnnnnnnnnnnnnnnnnnnnnnnnnnnnnnnnnnnnnnnnnnnnnnnnnnnnnnnnnnnnnnnnnnnnnnnnnnnnnnnnnnnnnnnnnnnnnnnnnnnnnnnnnnnnnnnnnnnnnnnnnnnnnnnnnnnnnnnnnnnnnnnnnnnnnnnnnnnnnnnnnnnnnnnnnnnnnnnnnnnnnnnnnnnnnnnnnnnnnnnnnnnnnnnnnnnnnnnnnnnnnnnnnnnnnnnnnnnnnnnnnnnnnnnnnnnnnnnnnnnnnnnnnnnnnnnnnnnnnnnnnnnnnnnnnnnnnnnnnnnnnnnnnnnnnnnnnnnnnnnnnnnnnnnnnnnnnnnnnnnnnnnnnnnnnnnnnnnnnnnnnnnnnnnnnnnnnnnnnnnnnnnnnnnnnnnnnnnnnnnnnnnnnnnnnnnnnnnnnnnnnnnnnnnnnnnnnnnnnnnnnnnnnnnnnnnnnnnnnnnnnnnnnnnnnnnnnnnnnnnnnnnnnnnnnnnnnnnnnnnnnnnnnnnnnnnnnnnnnnnnnnnnnnnnnnnnnnnnnnnnnnnnnnnnnnnnnnnnnnnnnnnnnnnnnnnnnnnnnnnnnnnnnnnnnnnnnnnnnnnnnnnnnnnnnnnnnnnnnnnnnnnnnnnnnnnnnnnnnnnnnnnnnnnnnnnnnnnnnnnnnnnnnnnnnnnnnnnnnnnnnnnnnnnnnnnnnnnnnnnnnnnnnnnnnnnnnnnnnnnnnnnnnnnnnnnnnnnnnnnnnnnnnnnnnnnnnnnnnnnnnnnnnnnnnnnnnnnnnnnnnnnnnnnnnnnnnnnnnnnnnnnnnnnnnnnnnnnnnnnnnnnnnnnnnnnnnnnnnnnnnnnnnnnnnnnnnnnnnnnnnnnnnnnnnnnnnnnnnnnnnnnnnnnnnnnnnnnnnnnnnnnnnnnnnnnnnnnnnnnnnnnnnnnnnnnnnnnnnnnnnnnnnnnnnnnnnnnnnnnnnnnnnnnnnnnnnnnnnnnnnnnnnnnnnnnnnnnnnnnnnnnnnnnnnnnnnnnnnnnnnnnnnnnnnnnnnnnnnnnnnnnnnnnnnnnnnnnnnnnnnnnnnnnnnnnnnnnnnnnnnnnnnnnnnnnnnnnnnnnnnnnnnnnnnnnnnnnnnnnnnnnnnnnnnnnnnnnnnnnnnnnnnnnnnnnnnnnnnnnnnnnnnnnnnnnnnnnnnnnnnnnnnnnnnnnnnnnnnnnnnnnnnnnnnnnnnnnnnnnnnnnnnnnnnnnnnnnnnnnnnnnnnnnnnnnnnnnnnnnnnnnnnnnnnnnnnnnnnnnnnnnnnnnnnnnnnnnnnnnnnnnnnnnnnnnnnnnnnnnnnnnnnnnnnnnnnnnnnnnnnnnnnnnnnnnnnnnnnnnnnnnnnnnnnnnnnnnnnnnnnnnnnnnnnnnnnnnnnnnnnnnnnnnnnnnnnnnnnnnnnnnnnnnnnnnnnnnnnnnnnnnnnnnnnnnnnnnnnnnnnnnnnnnnnnnnnnnnnnnnnnnnnnnnnnnnnnnnnnnnnnnnnnnnnnnnnnnnnnnnnnnnnnnnnnnnnnnnnnnnnnnnnnnnnnnnnnnnnnnnnnnnnnnnnnnnnnnnnnnnnnnnnnnnnnnnnnnnnnnnnnnnnnnnnnnnnnnnnnnnnnnnnnnnnnnnnnnnnnnnnnnnnnnnnnnnnnnnnnnnnnnnnnnnnnnnnnnnnnnnnnnnnnnnnnnnnnnnnnnnnnnnnnnnnnnnnnnnnnnnnnnnnnnnnnnnnnnnnnnnnnnnnnnnnnnnnnnnnnnnnnnnnnnnnnnnnnnnnnnnnnnnnnnnnnnnnnnnnnnnnnnnnnnnnnnnnnnnnnnnnnnnnnnnnnnnnnnnnnnnnnnnnnnnnnnnnnnnnnnnnnnnnnnnnnnnnnnnnnnnnnnnnnnnnnnnnnnnnnnnnnnaagcaattggccgtgggcttagaacacctgaggcggtgtgcacggttgtggttttggatgcgcgggcacacaacttaggtcgctttgtgccagagcgttttgcggcagattggtcgtctcggcaagtgtttgaggagggtgcccgccatgcggtggtgctgtccaaagcggagcgcgaccccgctttggccaaagccgcgctcagacactacggcgctcaatgccaacaagcgggttgttccgtgacagaggcgtgtcagctggacgtgcaccaccttgaccccgtaagcgaaggcgtgcgccgcacaaccttgaaggatgtgaccgtgctgtgtgcaaaccaccaccgacaggcccaccacgacatgaaaatggggctgaacgtgtcgtagcgcaacaaaaaacccgccatacctttgggtacgcgggttttgggagttctggcaaggcctgaaacctaaatgtggtggtgataggtggacttgaaccaccgaccccagcattatgaatgctgtgctctaaccaactgagctatatcaccgagcctggaattatagccaaaattctcagggctttggcttgccgccaaaagtttttgttagccattttgtcgcgcctgtacgacgcgccaagcccttggttattggtgtttgaaggcgggtttgcgcttgtttatgaacgcatccatgccctctttttggtcttcggttgcaaacagcgcgtggaacagacggcgctcaaaacgcacgccttcgctgaggctgccttcaaacgcttggttcaccgcttcctttgccgccatgacactggggagggagtagttgcaaatcatcagggctgcgcccaaggcctcggtcatgagttggtcatcggcgaccacgcggctcaccagtccgccgcgctcggcttctgcagcgtccatcatgcggcctgtgagggccatgtccatggccttggctttgccaacggcgcgtggcaggcgctgcgtgccacctgcgccagggataacgcccaacttgatttcgggttggccaaatttggcgctctcgctggcaatgatgacgtcgcacatcatggccaattcacaaccgccgccgagggcaaagccgctgacggcggcaataacgggcttgcgaacgctgcgaatggtttcccagttgcgcgtgatgtagtctgacttgtagacgtcagcaaaggtgtaggtggccatggcgccaatgtcggcacccgcggcaaaggctttttcactgcctgtgagcacaatgcagccaatgtcagggtcggcgtcgaatgcggttagcgccgcgccaagctcgtccattagcgcactgttgagggcattgagttgtttggggcggtttagggtgagtatgcccacgcggccttcggtgcggattaaaaccagttgctcactcatgtctgtgttctccaatgtggtgcgaaaagttgcttagaaaaagttgtttcgaaagttgcttcgacgtaaggggttgatcatagccaagcggtgagcttgctagggtctttcaccaccagttcggcgatctggttggcgtgggtcgatggccagatgagggggcacgacaacatgcggccatcgcgcgcgacaccggcaaccaatgggtgctgggctacgtcggcgtggcgtctcgcaatgctctccacatcgctcagtgacttcacccgccattgatcggtgccgtcaaatagcgtcacccattcgtcacccgccgccatgcccgcttgttcgcctgcaccgcctcttgccacgtgggtgatgcggatgccgtctcgctcaacgacacgcatgcccaagcgctgggcgagggtgccgctcttggccgccaccgcgacaccgtaatgactaagcagtgcgtgtaccggcaggtcttccgtgctgtgtacccagtgcgcgagttgtgtggcgacgttggcgtgcccttgctggttgagcagggcgtagatgtcggcctcactgatggtgccgcctttgcttttgacccaaaggccgcgcatgagggtgtcgagatcgccgccttgttggcgcagcatgaggtcggtgcacagcgctattagcgcccctttggtgtagtagctaacggtggcgttgggcgtgttttcgccaatgcggtagtacttgacccacgcgtcatagctagactgggcaacgctttgcagatgccgccctggggtggccgcaacgtggttaatggatttggccaatagcgtgagataggtggccgtatcaatgagtttggcgcgttgtagaaacaggtcatcgtagtagctggtaaagccttcaaagaaccacagcagctcggtgtagttctcttggttgaagtcgatgcttgcaaactcggatgggcgcagacgcttgacgttccatgtgtggaagtactcatggctaatgaggctaagtaattggttgtagccagcgccttgtgcatgggggggcgctgcctcgccagcgacggccgttaggggcaagtcggcacgttggcaaatgagtgcggtgctggcgatgtgctctagcccgccatagccgttttcagtggcgtgaagcatgaagacgtagcggtcaaagggtagttggcgttggggttgtttgccgtgccaaaacgtgatctctgtttcgcaaattcggcgggtgtcggcaactaattttttgacatcaaacccgggcgcggtgtggttgccaatgcccgtgacaacgagttcatgcggtacgccagagaccttaaaccgactgacgtaaaaatcacccaaggtaaagggactgtcggcgagctcgccgtagttgcgggcggtgtagcgcccgaagccacgcgcgtcgatttgccgcgcgggcaatacggtagacagccgccacgcattgaacgcgggcgcggtggggcgctcgacggagatggtttgtatctcgttttcgcccccgaccacttgcaaacacaggctggtggggttgaagaagccgcgggtgttgtccaaaaaggcggttcgcaccgaggcgtcaaaggcgtagatttggtaattgagctccagcgggcgtttgccgtcggattccactagccactcatttttactgcactgcgtgatttggcaaggcgtgcggccttgcttggctgtgagcgcttgcaggtgttgcgaaaattcacgcaccaaataactacccgcaatccaaacgggtagacgcaggcgctgttgcttttttgggcttgagatgcgcagatgcacaccgaacaggtgcgcttccgcgctgtcaacgcgaatgttgtgatcgatgcgcatggtgttacttgatggcggccagacgcttctcaacttcggcggcagaaatggcgccggggacacgtgtgccgtctgagaagaaaagggcaggcgtgcccgagatacggtgcttttgaccaaacgcgatgttgcggtcaagcgcgctggtgtcgcagctgatggcggcggcgctggtggttagtgggacttcgttcaccatccagtcttcaaaggctacgccggggtttttgtcgcaccaaatggccttggacttgagcgttgaatccgcgccgagtatggggtacaaaaagatatgcagggtgatgttgtcgacattcatcatgtcacgttcaaagcgcttgcagaagccacagttggggtcttcaaaaaccgcgagttgacgcttgccgttaccgcgtttgatggtgaaggcatctttaaagggcagggcctcaaagggtattgcgctcaatttatcgaggcgctcctgcgtcaggttgcgtttgcccttgaggtcaacgagtacgccttgcagcaaaaattcaccgttggcatcggtgtacaaaatttcggtttcaccaaagcgaacttcgtagaggccggccatgggggtcttggtgacgctgttgatagcgggtaagttgggtagttgcttgggtagcatctcgcgaatcttggcttcctgtgcccagcccatgcttgccatgagagtgaatgcgatgcccacggccaagccgcgcaataaagagcgtgtgggggtgggtgcgagaggtgacgtgtggtgaagcatggtgtggttcgctaggtaggcgttgtttgggggtaagagggtggatgggggcggttgggtagcagatgctcgctgttggagcaccatcgtggcaatcagttccccatgccaacacgctgtacccacgacttgagtgggcccatggcattaaagcccgacatgcctgcattgcgtagccaactggcggcggggttgcggcccaaggggttgttgaacaagtgaaagagtccgtgcgtgacccattgcatgggttcggtggcggcgcgtcgacgccgttggtagcgctgaagcacgcgtgaggcacccggagactcacctcgggcgcgtgccgcaacgcagtcactgagcgtttgtacgtcggccaagccaaggttgagaccttgccctgcgagggggtgaatggtgtgcgccgcatcgccggctaacgcggtctgctgggcaatccattgcgtggttaagccgacgctcaaggggaaggcaacaggcccgctggtgagggagaggtgccctagcgcgccctgactggcttgggtgagttggtcttctagggcggcggtttgggcggtggtctccatgtccagccacgtctggtgcgcagcgtctggtagcgaccagacaacggccaggtcgtgcccgtcagcgccgcccatgggcagcaaggccaaaatatgtgtgccgttaaaccactggtgggcgacgccgccgtggctgtgctcggcgcgcatgcgcaacgccaaggcaaggtgggggtagtgcttacttaccatgtcaatacccaag

SEQ ID NO: 102 - DNA, 14817 bp, Artificial Sequence
  Synthetic Oligonucleotide
  misc_feature (1)..(9999): n is a, c, g, or t
nnnnnnnnnnnnnnnnnnnnnnnnnnnnnnnnnnnnnnnnnnnnnnnnnnnnnnnnnnnnnnnnnnnnnnnnnnnnnnnnnnnnnnnnnnnnnnnnnnnnnnnnnnnnnnnnnnnnnnnnnnnnnnnnnnnnnnnnnnnnnnnnnnnnnnnnnnnnnnnnnnnnnnnnnnnnnnnnnnnnnnnnnnnnnnnnnnnnnnnnnnnnnnnnnnnnnnnnnnnnnnnnnnnnnnnnnnnnnnnnnnnnnnnnnnnnnnnnnnnnnnnnnnnnnnnnnnnnnnnnnnnnnnnnnnnnnnnnnnnnnnnnnnnnnnnnnnnnnnnnnnnnnnnnnnnnnnnnnnnnnnnnnnnnnnnnnnnnnnnnnnnnnnnnnnnnnnnnnnnnnnnnnnnnnnnnnnnnnnnnnnnnnnnnnnnnnnnnnnnnnnnnnnnnnnnnnnnnnnnnnnnnnnnnnnnnnnnnnnnnnnnnnnnnnnnnnnnnnnnnnnnnnnnnnnnnnnnnnnnnnnnnnnnnnnnnnnnnnnnnnnnnnnnnnnnnnnnnnnnnnnnnnnnnnnnnnnnnnnnnnnnnnnnnnnnnnnnnnnnnnnnnnnnnnnnnnnnnnnnnnnnnnnnnnnnnnnnnnnnnnnnnnnnnnnnnnnnnnnnnnnnnnnnnnnnnnnnnnnnnnnnnnnnnnnnnnnnnnnnnnnnnnnnnnnnnnnnnnnnnnnnnnnnnnnnnnnnnnnnnnnnnnnnnnnnnnnnnnnnnnnnnnnnnnnnnnnnnnnnnnnnnnnnnnnnnnnnnnnnnnnnnnnnnnnnnnnnnnnnnnnnnnnnnnnnnnnnnnnnnnnnnnnnnnnnnnnnnnnnnnnnnnnnnnnnnnnnnnnnnnnnnnnnnnnnnnnnnnnnnnnnnnnnnnnnnnnnnnnnnnnnnnnnnnnnnnnnnnnnnnnnnnnnnnnnnnnnnnnnnnnnnnnnnnnnnnnnnnnnnnnnnnnnnnnnnnnnnnnnnnnnnnnnnnnnnnnnnnnnnnnnnnnnnnnnnnnnnnnnnnnnnnnnnnnnnnnnnnnnnnnnnnnnnnnnnnnnnnnnnnnnnnnnnnnnnnnnnnnnnnnnnnnnnnnnnnnnnnnnnnnnnnnnnnnnnnnnnnnnnnnnnnnnnnnnnnnnnnnnnnnnnnnnnnnnnnnnnnnnnnnnnnnnnnnnnnnnnnnnnnnnnnnnnnnnnnnnnnnnnnnnnnnnnnnnnnnnnnnnnnnnnnnnnnnnnnnnnnnnnnnnnnnnnnnnnnnnnnnnnnnnnnnnnnnnnnnnnnnnnnnnnnnnnnnnnnnnnnnnnnnnnnnnnnnnnnnnnnnnnnnnnnnnnnnnnnnnnnnnnnnnnnnnnnnnnnnnnnnnnnnnnnnnnnnnnnnnnnnnnnnnnnnnnnnnnnnnnnnnnnnnnnnnnnnnnnnnnnnnnnnnnnnnnnnnnnnnnnnnnnnnnnnnnnnnnnnnnnnnnnnnnnnnnnnnnnnnnnnnnnnnnnnnnnnnnnnnnnnnnnnnnnnnnnnnnnnnnnnnnnnnnnnnnnnnnnnnnnnnnnnnnnnnnnnnnnnnnnnnnnnnnnnnnnnnnnnnnnnnnnnnnnnnnnnnnnnnnnnnnnnnnnnnnnnnnnnnnnnnnnnnnnnnnnnnnnnnnnnnnnnnnnnnnnnnnnnnnnnnnnnnnnnnnnnnnnnnnnnnnnnnnnnnnnnnnnnnnnnnnnnnnnnnnnnnnnnnnnnnnnnnnnnnnnnnnnnnnnnnnnnnnnnnnnnnnnnnnnnnnnnnnnnnnnnnnnnnnnnnnnnnnnnnnnnnnnnnnnnnnnnnnnnnnnnnnnnnnnnnnnnnnnnnnnnnnnnnnnnnnnnnnnnnnnnnnnnnnnnnnnnnnnnnnnnnnnnnnnnnnnnnnnnnnnnnnnnnnnnnnnnnnnnnnnnnnnnnnnnnnnnnnnnnnnnnnnnnnnnnnnnnnnnnnnnnnnnnnnnnnnnnnnnnnnnnnnnnnnnnnnnnnnnnnnnnnnnnnnnnnnnnnnnnnnnnnnnnnnnnnnnnnnnnnnnnnnnnnnnnnnnnnnnnnnnnnnnnnnnnnnnnnnnnnnnnnnnnnnnnnnnnnnnnnnnnnnnnnnnnnnnnnnnnnnnnnnnnnnnnnnnnnnnnnnnnnnnnnnnnnnnnnnnnnnnnnnnnnnnnnnnnnnnnnnnnnnnnnnnnnnnnnnnnnnnnnnnnnnnnnnnnnnnnnnnnnnnnnnnnnnnnnnnnnnnnnnnnnnnnnnnnnnnnnnnnnnnnnnnnnnnnnnnnnnnnnnnnnnnnnnnnnnnnnnnnnnnnnnnnnnnnnnnnnnnnnnnnnnnnnnnnnnnnnnnnnnnnnnnnnnnnnnnnnnnnnnnnnnnnnnnnnnnnnnnnnnnnnnnnnnnnnnnnnnnnnnnnnnnnnnnnnnnnnnnnnnnnnnnnnnnnnnnnnnnnnnnnnnnnnnnnnnnnnnnnnnnnnnnnnnnnnnnnnnnnnnnnnnnnnnnnnnnnnnnnnnnnnnnnnnnnnnnnnnnnnnnnnnnnnnnnnnnnnnnnnnnnnnnnnnnnnnnnnnnnnnnnnnnnnnnnnnnnnnnnnnnnnnnnnnnnnnnnnnnnnnnnnnnnnnnnnnnnnnnnnnnnnnnnnnnnnnnnnnnnnnnnnnnnnnnnnnnnnnnnnnnnnnnnnnnnnnnnnnnnnnnnnnnnnnnnnnnnnnnnnnnnnnnnnnnnnnnnnnnnnnnnnnnnnnnnnnnnnnnnnnnnnnnnnnnnnnnnnnnnnnnnnnnnnnnnnnnnnnnnnnnnnnnnnnnnnnnnnnnnnnnnnnnnnnnnnnnnnnnnnnnnnnnnnnnnnnnnnnnnnnnnnnnnnnnnnnnnnnnnnnnnnnnnnnnnnnnnnnnnnnnnnnnnnnnnnnnnnnnnnnnnnnnnnnnnnnnnnnnnnnnnnnnnnnnnnnnnnnnnnnnnnnnnnnnnnnnnnnnnnnnnnnnnnnnnnnnnnnnnnnnnnnnnnnnnnnnnnnnnnnnnnnnnnnnnnnnnnnnnnnnnnnnnnnnnnnnnnnnnnnnnnnnnnnnnnnnnnnnnnnnnnnnnnnnnnnnnnnnnnnnnnnnnnnnnnnnnnnnnnnnnnnnnnnnnnnnnnnnnnnnnnnnnnnnnnnnnnnnnnnnnnnnnnnnnnnnnnnnnnnnnnnnnnnnnnnnnnnnnnnnnnnnnnnnnnnnnnnnnnnnnnnnnnnnnnnnnnnnnnnnnnnnnnnnnnnnnnnnnnnnnnnnnnnnnnnnnnnnnnnnnnnnnnnnnnnnnnnnnnnnnnnnnnnnnnnnnnnnnnnnnnnnnnnnnnnnnnnnnnnnnnnnnnnnnnnnnnnnnnnnnnnnnnnnnnnnnnnnnnnnnnnnnnnnnnnnnnnnnnnnnnnnnnnnnnnnnnnnnnnnnnnnnnnnnnnnnnnnnnnnnnnnnnnnnnnnnnnnnnnnnnnnnnnnnnnnnnnnnnnnnnnnnnnnnnnnnnnnnnnnnnnnnnnnnnnnnnnnnnnnnnnnnnnnnnnnnnnnnnnnnnnnnnnnnnnnnnnnnnnnnnnnnnnnnnnnnnnnnnnnnnnnnnnnnnnnnnnnnnnnnnnnnnnnnnnnnnnnnnnnnnnnnnnnnnnnnnnnnnnnnnnnnnnnnnnnnnnnnnnnnnnnnnnnnnnnnnnnnnnnnnnnnnnnnnnnnnnnnnnnnnnnnnnnnnnnnnnnnnnnnnnnnnnnnnnnnnnnnnnnnnnnnnnnnnnnnnnnnnnnnnnnnnnnnnnnnnnnnnnnnnnnnnnnnnnnnnnnnnnnnnnnnnnnnnnnnnnnnnnnnnnnnnnnnnnnnnnnnnnnnnnnnnnnnnnnnnnnnnnnnnnnnnnnnnnnnnnnnnnnnnnnnnnnnnnnnnnnnnnnnnnnnnnnnnnnnnnnnnnnnnnnnnnnnnnnnnnnnnnnnnnnnnnnnnnnnnnnnnnnnnnnnnnnnnnnnnnnnnnnnnnnnnnnnnnnnnnnnnnnnnnnnnnnnnnnnnnnnnnnnnnnnnnnnnnnnnnnnnnnnnnnnnnnnnnnnnnnnnnnnnnnnnnnnnnnnnnnnnnnnnnnnnnnnnnnnnnnnnnnnnnnnnnnnnnnnnnnnnnnnnnnnnnnnnnnnnnnnnnnnnnnnnnnnnnnnnnnnnnnnnnnnnnnnnnnnnnnnnnnnnnnnnnnnnnnnnnnnnnnnnnnnnnnnnnnnnnnnnnnnnnnnnnnnnnnnnnnnnnnnnnnnnnnnnnnnnnnnnnnnnnnnnnnnnnnnnnnnnnnnnnnnnnnnnnnnnnnnnnnnnnnnnnnnnnnnnnnnnnnnnnnnnnnnnnnnnnnnnnnnnnnnnnnnnnnnnnnnnnnnnnnnnnnnnnnnnnnnnnnnnnnnnnnnnnnnnnnnnnnnnnnnnnnnnnnnnnnnnnnnnnnnnnnnnnnnnnnnnnnnnnnnnnnnnnnnnnnnnnnnnnnnnnnnnnnnnnnnnnnnnnnnnnnnnnnnnnnnnnnnnnnnnnnnnnnnnnnnnnnnnnnnnnnnnnnnnnnnnnnnnnnnnnnnnnnnnnnnnnnnnnnnnnnnnnnnnnnnnnnnnnnnnnnnnnnnnnnnnnnnnnnnnnnnnnnnnnnnnnnnnnnnnnnnnnnnnnnnnnnnnnnnnnnnnnnnnnnnnnnnnnnnnnnnnnnnnnnnnnnnnnnnnnnnnnnnnnnnnnnnnnnnnnnnnnnnnnnnnnnnnnnnnnnnnnnnnnnnnnnnnnnnnnnnnnnnnnnnnnnnnnnnnnnnnnnnnnnnnnnnnnnnnnnnnnnnnnnnnnnnnnnnnnnnnnnnnnnnnnnnnnnnnnnnnnnnnnnnnnnnnnnnnnnnnnnnnnnnnnnnnnnnnnnnnnnnnnnnnnnnnnnnnnnnnnnnnnnnnnnnnnnnnnnnnnnnnnnnnnnnnnnnnnnnnnnnnnnnnnnnnnnnnnnnnnnnnnnnnnnnnnnnnnnnnnnnnnnnnnnnnnnnnnnnnnnnnnnnnnnnnnnnnnnnnnnnnnnnnnnnnnnnnnnnnnnnnnnnnnnnnnnnnnnnnnnnnnnnnnnnnnnnnnnnnnnnnnnnnnnnnnnnnnnnnnnnnnnnnnnnnnnnnnnnnnnnnnnnnnnnnnnnnnnnnnnnnnnnnnnnnnnnnnnnnnnnnnnnnnnnnnnnnnnnnnnnnnnnnnnnnnnnnnnnnnnnnnnnnnnnnnnnnnnnnnnnnnnnnnnnnnnnnnnnnnnnnnnnnnnnnnnnnnnnnnnnnnnnnnnnnnnnnnnnnnnnnnnnnnnnnnnnnnnnnnnnnnnnnnnnnnnnnnnnnnnnnnnnnnnnnnnnnnnnnnnnnnnnnnnnnnnnnnnnnnnnnnnnnnnnnnnnnnnnnnnnnnnnnnnnnnnnnnnnnnnnnnnnnnnnnnnnnnnnnnnnnnnnnnnnnnnnnnnnnnnnnnnnnnnnnnnnnnnnnnnnnnnnnnnnnnnnnnnnnnnnnnnnnnnnnnnnnnnnnnnnnnnnnnnnnnnnnnnnnnnnnnnnnnnnnnnnnnnnnnnnnnnnnnnnnnnnnnnnnnnnnnnnnnnnnnnnnnnnnnnnnnnnnnnnnnnnnnnnnnnnnnnnnnnnnnnnnnnnnnnnnnnnnnnnnnnnnnnnnnnnnnnnnnnnnnnnnnnnnnnnnnnnnnnnnnnnnnnnnnnnnnnnnnnnnnnnnnnnnnnnnnnnnnnnnnnnnnnnnnnnnnnnnnnnnnnnnnnnnnnnnnnnnnnnnnnnnnnnnnnnnnnnnnnnnnnnnnnnnnnnnnnnnnnnnnnnnnnnnnnnnnnnnnnnnnnnnnnnnnnnnnnnnnnnnnnnnnnnnnnnnnnnnnnnnnnnnnnnnnnnnnnnnnnnnnnnnnnnnnnnnnnnnnnnnnnnnnnnnnnnnnnnnnnnnnnnnnnnnnnnnnnnnnnnnnnnnnnnnnnnnnnnnnnnnnnnnnnnnnnnnnnnnnnnnnnnnnnnnnnnnnnnnnnnnnnnnnnnnnnnnnnnnnnnnnnnnnnnnnnnnnnnnnnnnnnnnnnnnnnnnnnnnnnnnnnnnnnnnnnnnnnnnnnnnnnnnnnnnnnnnnnnnnnnnnnnnnnnnnnnnnnnnnnnnnnnnnnnnnnnnnnnnnnnnnnnnnnnnnnnnnnnnnnnnnnnnnnnnnnnnnnnnnnnnnnnnnnnnnnnnnnnnnnnnnnnnnnnnnnnnnnnnnnnnnnnnnnnnnnnnnnnnnnnnnnnnnnnnnnnnnnnnnnnnnnnnnnnnnnnnnnnnnnnnnnnnnnnnnnnnnnnnnnnnnnnnnnnnnnnnnnnnnnnnnnnnnnnnnnnnnnnnnnnnnnnnnnnnnnnnnnnnnnnnnnnnnnnnnnnnnnnnnnnnnnnnnnnnnnnnnnnnnnnnnnnnnnnnnnnnnnnnnnnnnnnnnnnnnnnnnnnnnnnnnnnnnnnnnnnnnnnnnnnnnnnnnnnnnnnnnnnnnnnnnnnnnnnnnnnnnnnnnnnnnnnnnnnnnnnnnnnnnnnnnnnnnnnnnnnnnnnnnnnnnnnnnnnnnnnnnnnnnnnnnnnnnnnnnnnnnnnnnnnnnnnnnnnnnnnnnnnnnnnnnnnnnnnnnnnnnnnnnnnnnnnnnnnnnnnnnnnnnnnnnnnnnnnnnnnnnnnnnnnnnnnnnnnnnnnnnnnnnnnnnnnnnnnnnnnnnnnnnnnnnnnnnnnnnnnnnnnnnnnnnnnnnnnnnnnnnnnnnnnnnnnnnnnnnnnnnnnnnnnnnnnnnnnnnnnnnnnnnnnnnnnnnnnnnnnnnnnnnnnnnnnnnnnnnnnnnnnnnnnnnnnnnnnnnnnnnnnnnnnnnnnnnnnnnnnnnnnnnnnnnnnnnnnnnnnnnnnnnnnnnnnnnnnnnnnnnnnnnnnnnnnnnnnnnnnnnnnnnnnnnnnnnnnnnnnnnnnnnnnnnnnnnnnnnnnnnnnnnnnnnnnnnnnnnnnnnnnnnnnnnnnnnnnnnnnnnnnnnnnnnnnnnnnnnnnnnnnnnnnnnnnnnnnnnnnnnnnnnnnnnnnnnnnnnnnnnnnnnnnnnnnnnnnnnnnnnnnnnnnnnnnnnnnnnnnnnnnnnnnnnnnnnnnnnnnnnnnnnnnnnnnnnnnnnnnnnnnnnnnnnnnnnnnnnnnnnnnnnnnnnnnnnnnnnnnnnnnnnnnnnnnnnnnnnnnnnnnnnnnnnnnnnnnnnnnnnnnnnnnnnnnnnnnnnnnnnnnnnnnnnnnnnnnnnnnnnnnnnnnnnnnnnnnnnnnnnnnnnnnnnnnnnnnnnnnnnnnnnnnnnnnnnnnnnnnnnnnnnnnnnnnnnnnnnnnnnnnnnnnnnnnnnnnnnnnnnnnnnnnnnnnnnnnnnnnnnnnnnnnnnnnnnnnnnnnnnnnnnnnnnnnnnnnnnnnnnnnnnnnnnnnnnnnnnnnnnnnnnnnnnnnnnnnnnnnnnnnnnnnnnnnnnnnnnnnnnnnnnnnnnnnnnnnnnnnnnnnnnnnnnnnnnnnnnnnnnnnnnnnnnnnnnnnnnnnnnnnnnnnnnnnnnnnnnnnnnnnnnnnnnnnnnnnnnnnnnnnnnnnnnnnnnnnnnnnnnnnnnnnnnnnnnnnnnnnnnnnnnnnnnnnnnnnnnnnnnnnnnnnnnnnnnnnnnnnnnnnnnnnnnnnnnnnnnnnnnnnnnnnnnnnnnnnnnnnnnnnnnnnnnnnnnnnnnnnnnnnnnnnnnnnnnnnnnnnnnnnnnnnnnnnnnnnnnnnnnnnnnnnnnnnnnnnnnnnnnnnnnnnnnnnnnnnnnnnnnnnnnnnnnnnnnnnnnnnnnnnnnnnnnnnnnnnnnnnnnnnnnnnnnnnnnnnnnnnnnnnnnnnnnnnnnnnnnnnnnnnnnnnnnnnnnnnnnnnnnnnnnnnnnnnnnnnnnnnnnnnnnnnnnnnnnnnnnnnnnnnnnnnnnnnnnnnnnnnnnnnnnnnnnnnnnnnnnnnnnnnnnnnnnnnnnnnnnnnnnnnnnnnnnnnnnnnnnnnnnnnnnnnnnnnnnnnnnnnnnnnnnnnnnnnnnnnnnnnnnnnnnnnnnnnnnnnnnnnnnnnnnnnnnnnnnnnnnnnnnnnnnnnnnnnnnnnnnnnnnnnnnnnnnnnnnnnnnnnnnnnnnnnnnnnnnnnnnnnnnnnnnnnnnnnnnnnnnnnnnnnnnnnnnnnnnnnnnnnnnnnnnnnnnnnnnnnnnnnnnnnnnnnnnnnnnnnnnnnnnnnnnnnnnnnnnnnnnnnnnnnnnnnnnnnnnnnnnnnnnnnnnnnnnnnnnnnnnnnnnnnnnnnnnnnnnnnnnnnnnnnnnnnnnnnnnnnnnnnnnnnnnnnnnnnnnnnnnnnnnnnnnnnnnnnnnnnnnnnnnnnnnnnnnnnnnnnnnnnnnnnnnnnnnnnnnnnnnnnnnnnnnnnnnnnnnnnnnnnnnnnnnnnnnnnnnnnnnnnnnnnnnnnnnnnnnnnnnnnnnnnnnnnnnnnnnnnnnnnnnnnnnnnnnnnnnnnnnnnnnnnnnnnnnnnnnnnnnnnnnnnnnnnnnnnnnnnnnnnnnnnnnnnnnnnnnnnnnnnnnnnnnnnnnnnnnnnnnnnnnnnnnnnnnnnnnnnnnnnnnnnnnnnnnnnnnnnnnnnnnnnnnnnnnnnnnnnnnnnnnnnnnnnnnnnnnnnnnnnnnnnnnnnnnnnnnnnnnnnnnnnnnnnnnnnnnnnnnnnnnnnnnnnnnnnnnnnnnnnnnnnnnnnnnnnnnnnnnnnnnnnnnnnnnnnnnnnnnnnnnnnnnnnnnnnnnnnnnnnnnnnnnnnnnnnnnnnnnnnnnnnnnnnnnnnnnnnnnnnnnnnnnnnnnnnnnnnnnnnnnnnnnnnnnnnnnnnnnnnnnnnnnnnnnnnnnnnnnnnnnnnnnnnnnnnnnnnnnnnnnnnnnnnnnnnnnnnnnnnnnnnnnnnnnnnnnnnnnnnnnnnnnnnnnnnnnnnnnnnnnnnnnnnnnnnnnnnnnnnnnnnnnnnnnnnnnnnnnnnnnnnnnnnnnnnnnnnnnnnnnnnnnnnnnnnnnnnnnnnnnnnnnnnnnnnnnnnnnnnnnnnnnnnnnnnnnnnnnnnnnnnnnnnnnnnnnnnnnnnnnnnnnnnnnnnnnnnnnnnnnnnnnnnnnnnnnnnnnnnnnnnnnnnnnnnnnnnnnnnnnnnnnnnnnnnnnnnnnnnnnnnnnnnnnnnnnnnnnnnnnnnnnnnnnnnnnnnnnnnnnnnnnnnnnnnnnnnnnnnnnnnnnnnnnnnnnnnnnnnnnnnnnnnnnnnnnnnnnnnnnnnnnnnnnnnnnnnnnnnnnnnnnnnnnnnnnnnnnnnnnnnnnnnnnnnnnnnnnnnnnnnnnnnnnnnnnnnnnnnnnnnnnnnnnnnnnnnnnnnnnnnnnnnnnnnnnnnnnnnnnnnnnnnnnnnnnnnnnnnnnnnnnnnnnnnnnnnnnnnnnnnnnnnnnnnnnnnnnnnnnnnnnnnnnnnnnnnnnnnnnnnnnnnnnnnnnnnnnnnnnnnnnnnnnnnnnnnnnnnnnnnnnnnnnnnnnnnnnnnnnnnnnnnnnnnnnnnnnnnnnnnnnnnnnnnnnnnnnnnnnnnnnnnnnnnnnnnnnnnnnnnnnnnnnnnnnnnnnnnnnnnnnnnnnnnnnnnnnnnnnnnnnnnnnnnnnnnnnnnnnnnnnnnnnnnnnnnnnnnnnnnnnnnnnnnnnnnnnnnnnnnnnnnnnnnnnnnnnnnnnnnnnnnnnnnnnnnnnnnnnnnnnnnnnnnnnnnnnnnnnnnnnnnnnnnnnnnnnnnnnnnnnnnnnnnnnnnnnnnnnnnnnnnnnnnnnnnnnnnnnnnnnnnnnnnnnnnnnnnnnnnnnnnnnnnnnnnnnnnnnnnnnnnnnnnnnnnnnnnnnnnnnnnnnnnnnnnnnnnnnnnnnnnnnnnnnnnnnnnnnnnnnnnnnnnnnnnnnnnnnnnnnnnnnnnnnnnnnnnnnnnnnnnnnnnnnnnnnnnnnnnnnnnnnnnnnnnnnnnnnnnnnnnnnnnnnnnnnnnnnnnnnnnnnnntgcgtgaaaattcttagactcgaaaggatgccggtgtttagaacgcaagagcaagctaacttctgcgccattgttgcaaaacatttggcagagccggacgcgcctcttttacttgaaggggccaccggcctcggaaagaccagagcctacttgcaggccgttatgaacgctgccgaatccggaaaacgtatcgcaattgctttaccaagtcatcagttgattgaccagttattagcctctagcgatttggctattacgagtctacgatctgttcgggttgcggacttcaggccagcaagattctttcaaaacaaagcagagttcttggcgcagaagctttctgcaatgagcgcagaggtcatgctgtgtaccagcgcatctgtaatcattgaccagagattaggcggagaatataacggcgtattaagcagggatcacatcatctttgatgaggcggatcaacttcctgatgcggctgcattgcaaagcgattacgagatcacggcgcagcagtttaaagatctaaagatcaaggttgagacggcacagcaagctgcccaagaagttttgaagtgcaaggatttggagcctgaagtcaaagctgccgcgctcatcattcttgaagcaatacaagagcctgcttggtattacagtgctggcgttaccgatgatggcggtgtgaagctattccacaaaatgccgggtcggttgttgaaaaaggttgggatccggaaatcggtatctttcataagcgcaaccttgtcgatagcagataagtttgatgatttcaaaagggcgcttggaatccaaaaagaaagtagcctatcgcaaattttagaaccgatccatcatggcaacctaagattccatgcttcagacgtgcaggtgaactcgcaagagtggattgatttaatacaaaagacggtattgagtgctccgcccccggtgctagttgttacgcctagccaccagctttctcagacattgggggcactaattccaacggccgtagtcagggctacaaacgaaacttccagccaagctgctgcacgtttggatgatgctcgggtgctgattgccgctggtgcttgggctgggcttgatgcgccaatccaatgggcatccatcattattcctcgcataccgtatgagagaccagtagtgctagatgggcagcatgagagtagttttttggacacccgaaatactgcactgcgtaggatgcgtcaggtgatcggacgtggcttgcgatctccagaggctagttgcgaaatttacgttctagatggcaggtataaaaacatagaggcctttgtacccaagcgattccgtagtgggtggacaagcaaacagttcttagagggcagtagacgtgaactggtcttgtccaaaatagaacgtgatccatcagtccgtaaagaagcactaaaacgctttggtcatgaatgcatgtgttgtggctttcatccaaaggtgatctctcagttagatgtgcatcacctatcccccttgagtgaaggcggcgaaagactcacagcaattagcgatcttgcagttctctgcgctaactgtcaccgactcgcccactcaacttcaccaccgttaagtattgatgctatgaaggcgttgagatgaggtagtggccttttttcgggtcacgttaccaagttgctactggcaaacacagcgccactcgtatcgtccggttgcctgattgaagacttgcttttgagtgcactggctcgtacctaggggtggcagttgtaacgacggcattggttggattgatggcggagtcattgggcacatcccgatgcatatagcttggtcgaacttattttaattggggggttgactttttaccgcccacgagtaaaagcattactggaagtccaagtgcaacgccacttcgggctagatgtctggcgctaaagatgaagacccccatcctacttacagaaacatagtgacatacaaaataagagtaaataaatgacaaatcgtcctaagggttggttggctgcgctgctttcgctaggttttccgcctatcggctttttatacgtgggccggtggaggtgggcgatattgagtttgctgcctattggcgtatttgccggcactacttacgcgtttcctaaagtgcatttggaggaaatgtggtgggttgttgacatattttcttgggtcttttctggcatatgcgcatggattgcctataaggaggcggcccgatttggtgcagaccggatccgtcctggctatagcaaatggtatggattgcttgcaacagcaatcgtgatacctagttcagtcattggtgttcgcgcttttttattcgagccgttcagaattcccgctcgaagcatgttgccaacactagacataggggccagaataatagttaaaaaatggggatatgggaactacgcaactttcggatttcagctatttcatgctaaacccagtgttgctttgaatcgaggtgatctcattgtctttgaatacccgcccaatcgggatataaactacatcaaacggctagttggcctacctggtgatacggtggcttacctcaataagcgccttacgataaacggtcagtctgtttctataactgacttaccggattactacgatgaacaaagtatgagatatttcaaacagtttgaagaagcattaggtgatacgagatatagattgctaaatgaggtcgatcgacctgcttttgtgcctggtgctgaacaatttttggggcgcgaatggtgtcgctatacgattgatggtttcatctgcaaagtgcccttaggcaactatttcatgcttggtgacaatcgggacaattcgttggactctcgctactggggttttgtaccttcagaccacatcgttgggaaagttgtctatattattcaatagcgtagcaaacataggttttgaaaccactgaaggaaatctctaggcgtcttgtatttagaagggcaaggggtggtgcaccgcgacattgttgccaagcgcatgaccccgcagcaaatcgctgacgcgcaaaaactggcgcgggattgtttggctcggaatttcaagggctgcgactagtgtcggttgccaaggttcaaacaatgggggggtgttcatgcgaaagtccattttggtattcgcggtttacttagcagttagtgtggacgctgcacgctagttgtagctggatgatataacctctgtgagtactgacggcaaagtacacaaataaataattaatattttcactaaagattacacatgaaaaatatcaaaaaatctataattactgctggatttttattactgattaccggctgtggaacaacatcaaatgtcggttacgtttggtttggcactggtatcaatgacgattggggtactggaggtaatatttggagccatttttcctcctactctcagcaaagtgtcaatcaggttgctactgaatactgttcaagaaaaaatttaccacccccaactgtaactaccatctcaagtccatcatttgtggtctccgagtattacatgttcagatttcagtgtgataaaaatgctatgccacgcactacagttccacaatccatacaacaaggtaaattatcattgaacgaagcaaaaaataagtgcattgatttggggtttaaagcaaatactgaggaattgggaaaatgcgtattacaactatcaaaataggactggcactcagtctttgttcattaaatgggtttgctgttgacttaactctttttgaaaaccaatgcgctgagattggttttacaaggaatacgcctgcatttgggagttgtgttttagatttgcattcacgtgaattcaattcaaatccaagtcaaaaactgtatcaacaaccagcttcggagttttctaggcaaaatgaattgtctagggaagcgttagacgaagctaggaaagctcggcaagaggccgcaacagcgcggcgagaggctgatgagtaccgaaaaaggatagaagcacaaaaacgacaagaccaatttgatgaacagagaagacttctctgggatagcaatgaaaaggcaatgcgtgaaagttggcgacgtccctgaaagaattaaaagagggacagtttttacgcctcattaaaaaaaacttcgctattaaggtgcttagtgaattgggtgagtttaaaaatagggtttagtctgtctataaattgagaattaaatgaataaattttcgacgctcctcattcctctgataattgtatcagtcagtacatttgccacaccgttaacggctcaggaaaagctagaatttcaaaaaagcagtgtgccttcttgcatagcaaaaaataatgcttccagagatttaactaccttacaaaaagaaggacttaacaattactgcatatgtcatagtgttgtaatgacaagtcttgttactagagaagaaatgatgagtttaggcaaaggtaagctaccgacaacattccaaggtaaggtctcggaggcacagaagcaatgtatcaaagcattgtctaattaatcaacatgcaatatttaactttatctgttggcgcagttttattgttgcctcttagcgtgtttgctcaaatgggcgctagaatgccaccaattgattatgatgagggagcatttaggaatccctctgattggtggtggactgtcctaattattgcaaactttattattgctccgtatttaataacaagaaaagaccttgactttggtggtgttgcatactttaaatggttcattgcgcttttcattacttttgttatttctcttcttttaattccat

SEQ ID NO: 103 - DNA, 14817 bp, Artificial Sequence; identical to SEQ ID NO: 102
  Synthetic Oligonucleotide
  misc_feature (1)..(9999): n is a, c, g, or t

SEQ ID NO: 104 - DNA, 14790 bp, Artificial Sequence
  Synthetic Oligonucleotide
  misc_feature (1)..(9972): n is a, c, g, or t
nnnnnnnnnnnnnnnnnnnnnnnnnnnnnnnnnnnnnnnnnnnnnnnnnnnnnnnnnnnnnnnnnnnnnnnnnnnnnnnnnnnnnnnnnnnnnnnnnnnnnnnnnnnnnnnnnnnnnnnnnnnnnnnnnnnnnnnnnnnnnnnnnnnnnnnnnnnnnnnnnnnnnnnnnnnnnnnnnnnnnnnnnnnnnnnnnnnnnnnnnnnnnnnnnnnnnnnnnnnnnnnnnnnnnnnnnnnnnnnnnnnnnnnnnnnnnnnnnnnnnnnnnnnnnnnnnnnnnnnnnnnnnnnnnnnnnnnnnnnnnnnnnnnnnnnnnnnnnnnnnnnnnnnnnnnnnnnnnnnnnnnnnnnnnnnnnnnnnnnnnnnnnnnnnnnnnnnnnnnnnnnnnnnnnnnnnnnnnnnnnnnnnnnnnnnnnnnnnnnnnnnnnnnnnnnnnnnnnnnnnnnnnnnnnnnnnnnnnnnnnnnnnnnnnnnnnnnnnnnnnnnnnnnnnnnnnnnnnnnnnnnnnnnnnnnnnnnnnnnnnnnnnnnnnnnnnnnnnnnnnnnnnnnnnnnnnnnnnnnnnnnnnnnnnnnnnnnnnnnnnnnnnnnnnnnnnnnnnnnnnnnnnnnnnnnnnnnnnnnnnnnnnnnnnnnnnnnnnnnnnnnnnnnnnnnnnnnnnnnnnnnnnnnnnnnnnnnnnnnnnnnnnnnnnnnnnnnnnnnnnnnnnnnnnnnnnnnnnnnnnnnnnnnnnnnnnnnnnnnnnnnnnnnnnnnnnnnnnnnnnnnnnnnnnnnnnnnnnnnnnnnnnnnnnnnnnnnnnnnnnnnnnnnnnnnnnnnnnnnnnnnnnnnnnnnnnnnnnnnnnnnnnnnnnnnnnnnnnnnnnnnnnnnnnnnnnnnnnnnnnnnnnnnnnnnnnnnnnnnnnnnnnnnnnnnnnnnnnnnnnnnnnnnnnnnnnnnnnnnnnnnnnnnnnnnnnnnnnnnnnnnnnnnnnnnnnnnnnnnnnnnnnnnnnnnnnnnnnnnnnnnnnnnnnnnnnnnnnnnnnnnnnnnnnnnnnnnnnnnnnnnnnnnnnnnnnnnnnnnnnnnnnnnnnnnnnnnnnnnnnnnnnnnnnnnnnnnnnnnnnnnnnnnnnnnnnnnnnnnnnnnnnnnnnnnnnnnnnnnnnnnnnnnnnnnnnnnnnnnnnnnnnnnnnnnnnnnnnnnnnnnnnnnnnnnnnnnnnnnnnnnnnnnnnnnnnnnnnnnnnnnnnnnnnnnnnnnnnnnnnnnnnnnnnnnnnnnnnnnnnnnnnnnnnnnnnnnnnnnnnnnnnnnnnnnnnnnnnnnnnnnnnnnnnnnnnnnnnnnnnnnnnnnnnnnnnnnnnnnnnnnnnnnnnnnnnnnnnnnnnnnnnnnnnnnnnnnnnnnnnnnnnnnnnnnnnnnnnnnnnnnnnnnnnnnnnnnnnnnnnnnnnnnnnnnnnnnnnnnnnnnnnnnnnnnnnnnnnnnnnnnnnnnnnnnnnnnnnnnnnnnnnnnnnnnnnnnnnnnnnnnnnnnnnnnnnnnnnnnnnnnnnnnnnnnnnnnnnnnnnnnnnnnnnnnnnnnnnnnnnnnnnnnnnnnnnnnnnnnnnnnnnnnnnnnnnnnnnnnnnnnnnnnnnnnnnnnnnnnnnnnnnnnnnnnnnnnnnnnnnnnnnnnnnnnnnnnnnnnnnnnnnnnnnnnnnnnnnnnnnnnnnnnnnnnnnnnnnnnnnnnnnnnnnnnnnnnnnnnnnnnnnnnnnnnnnnnnnnnnnnnnnnnnnnnnnnnnnnnnnnnnnnnnnnnnnnnnnnnnnnnnnnnnnnnnnnnnnnnnnnnnnnnnnnnnnnnnnnnnnnnnnnnnnnnnnnnnnnnnnnnnnnnnnnnnnnnnnnnnnnnnnnnnnnnnnnnnnnnnnnnnnnnnnnnnnnnnnnnnnnnnnnnnnnnnnnnnnnnnnnnnnnnnnnnnnnnnnnnnnnnnnnnnnnnnnnnnnnnnnnnnnnnnnnnnnnnnnnnnnnnnnnnnnnnnnnnnnnnnnnnnnnnnnnnnnnnnnnnnnnnnnnnnnnnnnnnnnnnnnnnnnnnnnnnnnnnnnnnnnnnnnnnnnnnnnnnnnnnnnnnnnnnnnnnnnnnnnnnnnnnnnnnnnnnnnnnnnnnnnnnnnnnnnnnnnnnnnnnnnnnnnnnnnnnnnnnnnnnnnnnnnnnnnnnnnnnnnnnnnnnnnnnnnnnnnnnnnnnnnnnnnnnnnnnnnnnnnnnnnnnnnnnnnnnnnnnnnnnnnnnnnnnnnnnnnnnnnnnnnnnnnnnnnnnnnnnnnnnnnnnnnnnnnnnnnnnnnnnnnnnnnnnnnnnnnnnnnnnnnnnnnnnnnnnnnnnnnnnnnnnnnnnnnnnnnnnnnnnnnnnnnnnnnnnnnnnnnnnnnnnnnnnnnnnnnnnnnnnnnnnnnnnnnnnnnnnnnnnnnnnnnnnnnnnnnnnnnnnnnnnnnnnnnnnnnnnnnnnnnnnnnnnnnnnnnnnnnnnnnnnnnnnnnnnnnnnnnnnnnnnnnnnnnnnnnnnnnnnnnnnnnnnnnnnnnnnnnnnnnnnnnnnnnnnnnnnnnnnnnnnnnnnnnnnnnnnnnnnnnnnnnnnnnnnnnnnnnnnnnnnnnnnnnnnnnnnnnnnnnnnnnnnnnnnnnnnnnnnnnnnnnnnnnnnnnnnnnnnnnnnnnnnnnnnnnnnnnnnnnnnnnnnnnnnnnnnnnnnnnnnnnnnnnnnnnnnnnnnnnnnnnnnnnnnnnnnnnnnnnnnnnnnnnnnnnnnnnnnnnnnnnnnnnnnnnnnnnnnnnnnnnnnnnnnnnnnnnnnnnnnnnnnnnnnnnnnnnnnnnnnnnnnnnnnnnnnnnnnnnnnnnnnnnnnnnnnnnnnnnnnnnnnnnnnnnnnnnnnnnnnnnnnnnnnnnnnnnnnnnnnnnnnnnnnnnnnnnnnnnnnnnnnnnnnnnnnnnnnnnnnnnnnnnnnnnnnnnnnnnnnnnnnnnnnnnnnnnnnnnnnnnnnnnnnnnnnnnnnnnnnnnnnnnnnnnnnnnnnnnnnnnnnnnnnnnnnnnnnnnnnnnnnnnnnnnnnnnnnnnnnnnnnnnnnnnnnnnnnnnnnnnnnnnnnnnnnnnnnnnnnnnnnnnnnnnnnnnnnnnnnnnnnnnnnnnnnnnnnnnnnnnnnnnnnnnnnnnnnnnnnnnnnnnnnnnnnnnnnnnnnnnnnnnnnnnnnnnnnnnnnnnnnnnnnnnnnnnnnnnnnnnnnnnnnnnnnnnnnnnnnnnnnnnnnnnnnnnnnnnnnnnnnnnnnnnnnnnnnnnnnnnnnnnnnnnnnnnnnnnnnnnnnnnnnnnnnnnnnnnnnnnnnnnnnnnnnnnnnnnnnnnnnnnnnnnnnnnnnnnnnnnnnnnnnnnnnnnnnnnnnnnnnnnnnnnnnnnnnnnnnnnnnnnnnnnnnnnnnnnnnnnnnnnnnnnnnnnnnnnnnnnnnnnnnnnnnnnnnnnnnnnnnnnnnnnnnnnnnnnnnnnnnnnnnnnnnnnnnnnnnnnnnnnnnnnnnnnnnnnnnnnnnnnnnnnnnnnnnnnnnnnnnnnnnnnnnnnnnnnnnnnnnnnnnnnnnnnnnnnnnnnnnnnnnnnnnnnnnnnnnnnnnnnnnnnnnnnnnnnnnnnnnnnnnnnnnnnnnnnnnnnnnnnnnnnnnnnnnnnnnnnnnnnnnnnnnnnnnnnnnnnnnnnnnnnnnnnnnnnnnnnnnnnnnnnnnnnnnnnnnnnnnnnnnnnnnnnnnnnnnnnnnnnnnnnnnnnnnnnnnnnnnnnnnnnnnnnnnnnnnnnnnnnnnnnnnnnnnnnnnnnnnnnnnnnnnnnnnnnnnnnnnnnnnnnnnnnnnnnnnnnnnnnnnnnnnnnnnnnnnnnnnnnnnnnnnnnnnnnnnnnnnnnnnnnnnnnnnnnnnnnnnnnnnnnnnnnnnnnnnnnnnnnnnnnnnnnnnnnnnnnnnnnnnnnnnnnnnnnnnnnnnnnnnnnnnnnnnnnnnnnnnnnnnnnnnnnnnnnnnnnnnnnnnnnnnnnnnnnnnnnnnnnnnnnnnnnnnnnnnnnnnnnnnnnnnnnnnnnnnnnnnnnnnnnnnnnnnnnnnnnnnnnnnnnnnnnnnnnnnnnnnnnnnnnnnnnnnnnnnnnnnnnnnnnnnnnnnnnnnnnnnnnnnnnnnnnnnnnnnnnnnnnnnnnnnnnnnnnnnnnnnnnnnnnnnnnnnnnnnnnnnnnnnnnnnnnnnnnnnnnnnnnnnnnnnnnnnnnnnnnnnnnnnnnnnnnnnnnnnnnnnnnnnnnnnnnnnnnnnnnnnnnnnnnnnnnnnnnnnnnnnnnnnnnnnnnnnnnnnnnnnnnnnnnnnnnnnnnnnnnnnnnnnnnnnnnnnnnnnnnnnnnnnnnnnnnnnnnnnnnnnnnnnnnnnnnnnnnnnnnnnnnnnnnnnnnnnnnnnnnnnnnnnnnnnnnnnnnnnnnnnnnnnnnnnnnnnnnnnnnnnnnnnnnnnnnnnnnnnnnnnnnnnnnnnnnnnnnnnnnnnnnnnnnnnnnnnnnnnnnnnnnnnnnnnnnnnnnnnnnnnnnnnnnnnnnnnnnnnnnnnnnnnnnnnnnnnnnnnnnnnnnnnnnnnnnnnnnnnnnnnnnnnnnnnnnnnnnnnnnnnnnnnnnnnnnnnnnnnnnnnnnnnnnnnnnnnnnnnnnnnnnnnnnnnnnnnnnnnnnnnnnnnnnnnnnnnnnnnnnnnnnnnnnnnnnnnnnnnnnnnnnnnnnnnnnnnnnnnnnnnnnnnnnnnnnnnnnnnnnnnnnnnnnnnnnnnnnnnnnnnnnnnnnnnnnnnnnnnnnnnnnnnnnnnnnnnnnnnnnnnnnnnnnnnnnnnnnnnnnnnnnnnnnnnnnnnnnnnnnnnnnnnnnnnnnnnnnnnnnnnnnnnnnnnnnnnnnnnnnnnnnnnnnnnnnnnnnnnnnnnnnnnnnnnnnnnnnnnnnnnnnnnnnnnnnnnnnnnnnnnnnnnnnnnnnnnnnnnnnnnnnnnnnnnnnnnnnnnnnnnnnnnnnnnnnnnnnnnnnnnnnnnnnnnnnnnnnnnnnnnnnnnnnnnnnnnnnnnnnnnnnnnnnnnnnnnnnnnnnnnnnnnnnnnnnnnnnnnnnnnnnnnnnnnnnnnnnnnnnnnnnnnnnnnnnnnnnnnnnnnnnnnnnnnnnnnnnnnnnnnnnnnnnnnnnnnnnnnnnnnnnnnnnnnnnnnnnnnnnnnnnnnnnnnnnnnnnnnnnnnnnnnnnnnnnnnnnnnnnnnnnnnnnnnnnnnnnnnnnnnnnnnnnnnnnnnnnnnnnnnnnnnnnnnnnnnnnnnnnnnnnnnnnnnnnnnnnnnnnnnnnnnnnnnnnnnnnnnnnnnnnnnnnnnnnnnnnnnnnnnnnnnnnnnnnnnnnnnnnnnnnnnnnnnnnnnnnnnnnnnnnnnnnnnnnnnnnnnnnnnnnnnnnnnnnnnnnnnnnnnnnnnnnnnnnnnnnnnnnnnnnnnnnnnnnnnnnnnnnnnnnnnnnnnnnnnnnnnnnnnnnnnnnnnnnnnnnnnnnnnnnnnnnnnnnnnnnnnnnnnnnnnnnnnnnnnnnnnnnnnnnnnnnnnnnnnnnnnnnnnnnnnnnnnnnnnnnnnnnnnnnnnnnnnnnnnnnnnnnnnnnnnnnnnnnnnnnnnnnnnnnnnnnnnnnnnnnnnnnnnnnnnnnnnnnnnnnnnnnnnnnnnnnnnnnnnnnnnnnnnnnnnnnnnnnnnnnnnnnnnnnnnnnnnnnnnnnnnnnnnnnnnnnnnnnnnnnnnnnnnnnnnnnnnnnnnnnnnnnnnnnnnnnnnnnnnnnnnnnnnnnnnnnnnnnnnnnnnnnnnnnnnnnnnnnnnnnnnnnnnnnnnnnnnnnnnnnnnnnnnnnnnnnnnnnnnnnnnnnnnnnnnnnnnnnnnnnnnnnnnnnnnnnnnnnnnnnnnnnnnnnnnnnnnnnnnnnnnnnnnnnnnnnnnnnnnnnnnnnnnnnnnnnnnnnnnnnnnnnnnnnnnnnnnnnnnnnnnnnnnnnnnnnnnnnnnnnnnnnnnnnnnnnnnnnnnnnnnnnnnnnnnnnnnnnnnnnnnnnnnnnnnnnnnnnnnnnnnnnnnnnnnnnnnnnnnnnnnnnnnnnnnnnnnnnnnnnnnnnnnnnnnnnnnnnnnnnnnnnnnnnnnnnnnnnnnnnnnnnnnnnnnnnnnnnnnnnnnnnnnnnnnnnnnnnnnnnnnnnnnnnnnnnnnnnnnnnnnnnnnnnnnnnnnnnnnnnnnnnnnnnnnnnnnnnnnnnnnnnnnnnnnnnnnnnnnnnnnnnnnnnnnnnnnnnnnnnnnnnnnnnnnnnnnnnnnnnnnnnnnnnnnnnnnnnnnnnnnnnnnnnnnnnnnnnnnnnnnnnnnnnnnnnnnnnnnnnnnnnnnnnnnnnnnnnnnnnnnnnnnnnnnnnnnnnnnnnnnnnnnnnnnnnnnnnnnnnnnnnnnnnnnnnnnnnnnnnnnnnnnnnnnnnnnnnnnnnnnnnnnnnnnnnnnnnnnnnnnnnnnnnnnnnnnnnnnnnnnnnnnnnnnnnnnnnnnnnnnnnnnnnnnnnnnnnnnnnnnnnnnnnnnnnnnnnnnnnnnnnnnnnnnnnnnnnnnnnnnnnnnnnnnnnnnnnnnnnnnnnnnnnnnnnnnnnnnnnnnnnnnnnnnnnnnnnnnnnnnnnnnnnnnnnnnnnnnnnnnnnnnnnnnnnnnnnnnnnnnnnnnnnnnnnnnnnnnnnnnnnnnnnnnnnnnnnnnnnnnnnnnnnnnnnnnnnnnnnnnnnnnnnnnnnnnnnnnnnnnnnnnnnnnnnnnnnnnnnnnnnnnnnnnnnnnnnnnnnnnnnnnnnnnnnnnnnnnnnnnnnnnnnnnnnnnnnnnnnnnnnnnnnnnnnnnnnnnnnnnnnnnnnnnnnnnnnnnnnnnnnnnnnnnnnnnnnnnnnnnnnnnnnnnnnnnnnnnnnnnnnnnnnnnnnnnnnnnnnnnnnnnnnnnnnnnnnnnnnnnnnnnnnnnnnnnnnnnnnnnnnnnnnnnnnnnnnnnnnnnnnnnnnnnnnnnnnnnnnnnnnnnnnnnnnnnnnnnnnnnnnnnnnnnnnnnnnnnnnnnnnnnnnnnnnnnnnnnnnnnnnnnnnnnnnnnnnnnnnnnnnnnnnnnnnnnnnnnnnnnnnnnnnnnnnnnnnnnnnnnnnnnnnnnnnnnnnnnnnnnnnnnnnnnnnnnnnnnnnnnnnnnnnnnnnnnnnnnnnnnnnnnnnnnnnnnnnnnnnnnnnnnnnnnnnnnnnnnnnnnnnnnnnnnnnnnnnnnnnnnnnnnnnnnnnnnnnnnnnnnnnnnnnnnnnnnnnnnnnnnnnnnnnnnnnnnnnnnnnnnnnnnnnnnnnnnnnnnnnnnnnnnnnnnnnnnnnnnnnnnnnnnnnnnnnnnnnnnnnnnnnnnnnnnnnnnnnnnnnnnnnnnnnnnnnnnnnnnnnnnnnnnnnnnnnnnnnnnnnnnnnnnnnnnnnnnnnnnnnnnnnnnnnnnnnnnnnnnnnnnnnnnnnnnnnnnnnnnnnnnnnnnnnnnnnnnnnnnnnnnnnnnnnnnnnnnnnnnnnnnnnnnnnnnnnnnnnnnnnnnnnnnnnnnnnnnnnnnnnnnnnnnnnnnnnnnnnnnnnnnnnnnnnnnnnnnnnnnnnnnnnnnnnnnnnnnnnnnnnnnnnnnnnnnnnnnnnnnnnnnnnnnnnnnnnnnnnnnnnnnnnnnnnnnnnnnnnnnnnnnnnnnnnnnnnnnnnnnnnnnnnnnnnnnnnnnnnnnnnnnnnnnnnnnnnnnnnnnnnnnnnnnnnnnnnnnnnnnnnnnnnnnnnnnnnnnnnnnnnnnnnnnnnnnnnnnnnnnnnnnnnnnnnnnnnnnnnnnnnnnnnnnnnnnnnnnnnnnnnnnnnnnnnnnnnnnnnnnnnnnnnnnnnnnnnnnnnnnnnnnnnnnnnnnnnnnnnnnnnnnnnnnnnnnnnnnnnnnnnnnnnnnnnnnnnnnnnnnnnnnnnnnnnnnnnnnnnnnnnnnnnnnnnnnnnnnnnnnnnnnnnnnnnnnnnnnnnnnnnnnnnnnnnnnnnnnnnnnnnnnnnnnnnnnnnnnnnnnnnnnnnnnnnnnnnnnnnnnnnnnnnnnnnnnnnnnnnnnnnnnnnnnnnnnnnnnnnnnnnnnnnnnnnnnnnnnnnnnnnnnnnnnnnnnnnnnnnnnnnnnnnnnnnnnnnnnnnnnnnnnnnnnnnnnnnnnnnnnnnnnnnnnnnnnnnnnnnnnnnnnnnnnnnnnnnnnnnnnnnnnnnnnnnnnnnnnnnnnnnnnnnnnnnnnnnnnnnnnnnnnnnnnnnnnnnnnnnnnnnnnnnnnnnnnnnnnnnnnnnnnnnnnnnnnnnnnnnnnnnnnnnnnnnnnnnnnnnnnnnnnnnnnnnnnnnnnnnnnnnnnnnnnnnnnnnnnnnnnnnnnnnnnnnnnnnnnnnnnnnnnnnnnnnnnnnnnnnnnnnnnnnnnnnnnnnnnnnnnnnnnnnnnnnnnnnnnnnnnnnnnnnnnnnnnnnnnnnnnnnnnnnnnnnnnnnnnnnnnnnnnnnnnnnnnnnnnnnnnnnnnnnnnnnnnnnnnnnnnnnnnnnnnnnnnnnnnnnnnnnnnnnnnnnnnnnnnnnnnnnnnnnnnnnnnnnnnnnnnnnnnnnnnnnnnnnnnnnnnnnnnnnnnnnnnnnnnnnnnnnnnnnnnnnnnnnnnnnnnnnnnnnnnnnnnnnnnnnnnnnnnnnnnnnnnnnnnnnnnnnnnnnnnnnnnnnnnnnnnnnnnnnnnnnnnnnnnnnnnnnnnnnnnnnnnnnnnnnnnnnnnnnnnnnnnnnnnnnnnnnnnnnnnnnnnnnnnnnnnnnnnnnnnnnnnnnnnnnnnnnnnnnnnnnnnnnnnnnnnnnnnnnnnnnnnnnnnnnnnnnnnnnnnnnnnnnnnnnnnnnnnnnnnnnnnnnnnnnnnnnnnnnnnnnnnnnnnnnnnnnnnnnnnnnnnnnnnnnnnnnnnnnnnnnnnnnnnnnnnnnnnnnnnnnnnnnnnnnnnnnnnnnnnnnnnnnnnnnnnnnnnnnnnnnnnnnnnnnnnnnnnnnnnnnnnnnnnnnnnnnnnnnnnnnnnnnnnnnnnnnnnnnnnnnnnnnnnnnnnnnnnnnnnnnnnnnnnnnnnnnnnnnnnnnnnnnnnnnnnnnnnnnnnnnnnnnnnnnnnnnnnnnnnnnnnnnnnnnnnnnnnnnnnnnnnnnnnnnnnnnnnnnnnnnnnnnnnnnnnnnnnnnnnnnnnnnnnnnnnnnnnnnnnnnnnnnnnnnnnnnnnnnnnnnnnnnnnnnnnnnnnnnnnnnnnnnnnnnnnnnnnnnnnnnnnnnnnnnnnnnnnnnnnnnnnnnnnnnnnnnnnnnnnnnnnnnnnnnnnnnnnnnnnnnnnnnnnnnnnnnnnnnnnnnnnnnnnnnnnnnnnnnnnnnnnnnnnnnnnnnnnnnnnnnnnnnnnnnnnnnnnnnnnnnnnnnnnnnnnnnnnnnnnnnnnnnnnnnnnnnnnnnnnnnnnnnnnnnnnnnnnnnnnnnnnnnnnnnnnnnnnnnnnnnnnnnnnnnnnnnnnnnnnnnnnnnnnnnnnnnnnnnnnnnnnnnnnnnnnnnnnnnnnnnnnnnnnnnnnnnnnnnnnnnnnnnnnnnnnnnnnnnnnnnnnnnnnnnnnnnnnnnnnnnnnnnnnnnnnnnnnnnnnnnnnnnnnnnnnnnnnnnnnnnnnnnnnnnnnnnnnnnnnnnnnnnnnnnnnnnnnnnnnnnnnnnnnnnnnnnnnnnnnnnnnnnnnnnnnnnnnnnnnnnnnnnnnnnnnnnnnnnnnnnnnnnnnnnnnnnnnnnnnnnnnnnnnnnnnnnnnnnnnnnnnnnnnnnnnnnnnnnnnnnnnnnnnnnnnnnnnnnnnnnnnnnnnnnnnnnnnnnnnnnnnnnnnnnnnnnnnnnnnnnnnnnnnnnnnnnnnnnnnnnnnnnnnnnnnnnnnnnnnnnnnntgcgtgaaaattcttagactcgaaaggatgccggtgtttagaacgcaagagcaagctaacttctgcgccattgttgcaaaacatttggcagagccggacgcgcctcttttacttgaaggggccaccggcctcggaaagaccagagcctacttgcaggccgttatgaacgctgccgaatccggaaaacgtatcgcaattgctttaccaagtcatcagttgattgaccagttattagcctctagcgatttggctattacgagtctacgatctgttcgggttgcggacttcaggccagcaagattctttcaaaacaaagcagagttcttggcgcagaagctttctgcaatgagcgcagaggtcatgctgtgtaccagcgcatctgtaatcattgaccagagattaggcggagaatataacggcgtattaagcagggatcacatcatctttgatgaggcggatcaacttcctgatgcggctgcattgcaaagcgattacgagatcacggcgcagcagtttaaagatctaaagatcaaggttgagacggcacagcaagctgcccaagaagttttgaagtgcaaggatttggagcctgaagtcaaagctgccgcgctcatcattcttgaagcaatacaagagcctgcttggtattacagtgctggcgttaccgatgatggcggtgtgaagctattccacaaaatgccgggtcggttgttgaaaaaggttgggatccggaaatcggtatctttcataagcgcaaccttgtcgatagcagataagtttgatgatttcaaaagggcgcttggaatccaaaaagaaagtagcctatcgcaaattttagaaccgatccatcatggcaacctaagattccatgcttcagacgtgcaggtgaactcgcaagagtggattgatttaatacaaaagacggtattgagtgctccgcccccggtgctagttgttacgcctagccaccagctttctcagacattgggggcactaattccaacggccgtagtcagggctacaaacgaaacttccagccaagctgctgcacgtttggatgatgctcgggtgctgattgccgctggtgcttgggctgggcttgatgcgccaatccaatgggcatccatcattattcctcgcataccgtatgagagaccagtagtgctagatgggcagcatgagagtagttttttggacacccgaaatactgcactgcgtaggatgcgtcaggtgatcggacgtggcttgcgatctccagaggctagttgcgaaatttacgttctagatggcaggtataaaaacatagaggcctttgtacccaagcgattccgtagtgggtggacaagcaaacagttcttagagggcagtagacgtgaactggtcttgtccaaaatagaacgtgatccatcagtccgtaaagaagcactaaaacgctttggtcatgaatgcatgtgttgtggctttcatccaaaggtgatctctcagttagatgtgcatcacctatcccccttgagtgaaggcggcgaaagactcacagcaattagcgatcttgcagttctctgcgctaactgtcaccgactcgcccactcaacttcaccaccgttaagtattgatgctatgaaggcgttgagatgaggtagtggccttttttcgggtcacgttaccaagttgctactggcaaacacagcgccactcgtatcgtccggttgcctgattgaagacttgcttttgagtgcactggctcgtacctaggggtggcagttgtaacgacggcattggttggattgatggcggagtcattgggcacatcccgatgcatatagcttggtcgaacttattttaattggggggttgactttttaccgcccacgagtaaaagcattactggaagtccaagtgcaacgccacttcgggctagatgtctggcgctaaagatgaagacccccatcctacttacagaaacatagtgacatacaaaataagagtaaataaatgacaaatcgtcctaagggttggttggctgcgctgctttcgctaggttttccgcctatcggctttttatacgtgggccggtggaggtgggcgatattgagtttgctgcctattggcgtatttgccggcactacttacgcgtttcctaaagtgcatttggaggaaatgtggtgggttgttgacatattttcttgggtcttttctggcatatgcgcatggattgcctataaggaggcggcccgatttggtgcagaccggatccgtcctggctatagcaaatggtatggattgcttgcaacagcaatcgtgatacctagttcagtcattggtgttcgcgcttttttattcgagccgttcagaattcccgctcgaagcatgttgccaacactagacataggggccagaataatagttaaaaaatggggatatgggaactacgcaactttcggatttcagctatttcatgctaaacccagtgttgctttgaatcgaggtgatctcattgtctttgaatacccgcccaatcgggatataaactacatcaaacggctagttggcctacctggtgatacggtggcttacctcaataagcgccttacgataaacggtcagtctgtttctataactgacttaccggattactacgatgaacaaagtatgagatatttcaaacagtttgaagaagcattaggtgatacgagatatagattgctaaatgaggtcgatcgacctgcttttgtgcctggtgctgaacaatttttggggcgcgaatggtgtcgctatacgattgatggtttcatctgcaaagtgcccttaggcaactatttcatgcttggtgacaatcgggacaattcgttggactctcgctactggggttttgtaccttcagaccacatcgttgggaaagttgtctatattattcaatagcgtagcaaacataggttttgaaaccactgaaggaaatctctaggcgtcttgtatttagaagggcaaggggtggtgcaccgcgacattgttgccaagcgcatgaccccgcagcaaatcgctgacgcgcaaaaactggcgcgggattgtttggctcggaatttcaagggctgcgactagtgtcggttgccaaggttcaaacaatgggggggtgttcatgcgaaagtccattttggtattcgcggtttacttagcagttagtgtggacgctgcacgctagttgtagctggatgatataacctctgtgagtactgacggcaaagtacacaaataaataattaatattttcactaaagattacacatgaaaaatatcaaaaaatctataattactgctggatttttattactgattaccggctgtggaacaacatcaaatgtcggttacgtttggtttggcactggtatcaatgacgattggggtactggaggtaatatttggagccatttttcctcctactctcagcaaagtgtcaatcaggttgctactgaatactgttcaagaaaaaatttaccacccccaactgtaactaccatctcaagtccatcatttgtggtctccgagtattacatgttcagatttcagtgtgataaaaatgctatgccacgcactacagttccacaatccatacaacaaggtaaattatcattgaacgaagcaaaaaataagtgcattgatttggggtttaaagcaaatactgaggaattgggaaaatgcgtattacaactatcaaaataggactggcactcagtctttgttcattaaatgggtttgctgttgacttaactctttttgaaaaccaatgcgctgagattggttttacaaggaatacgcctgcatttgggagttgtgttttagatttgcattcacgtgaattcaattcaaatccaagtcaaaaactgtatcaacaaccagcttcggagttttctaggcaaaatgaattgtctagggaagcgttagacgaagctaggaaagctcggcaagaggccgcaacagcgcggcgagaggctgatgagtaccgaaaaaggatagaagcacaaaaacgacaagaccaatttgatgaacagagaagacttctctgggatagcaatgaaaaggcaatgcgtgaaagttggcgacgtccctgaaagaattaaaagagggacagtttttacgcctcattaaaaaaaacttcgctattaaggtgcttagtgaattgggtgagtttaaaaatagggtttagtctgtctataaattgagaattaaatgaataaattttcgacgctcctcattcctctgataattgtatcagtcagtacatttgccacaccgttaacggctcaggaaaagctagaatttcaaaaaagcagtgtgccttcttgcatagcaaaaaataatgcttccagagatttaactaccttacaaaaagaaggacttaacaattactgcatatgtcatagtgttgtaatgacaagtcttgttactagagaagaaatgatgagtttaggcaaaggtaagctaccgacaacattccaaggtaaggtctcggaggcacagaagcaatgtatcaaagcattgtctaattaatcaacatgcaatatttaactttatctgttggcgcagttttattgttgcctcttagcgtgtttgctcaaatgggcgctagaatgccaccaattgattatgatgagggagcatttaggaatccctctgattggtggtggactgtcctaattattgcaaactttattattgctccgtatttaataacaagaaaagaccttgactttggtggtgttgcatactttaaatggttcattgcgcttttcattacttttgttatttctcttcttttaattccat

SEQ ID NO: 105 - DNA, 14742 bp, Artificial Sequence
  Synthetic Oligonucleotide
  misc_feature (1)..(9805): n is a, c, g, or t
nnnnnnnnnnnnnnnnnnnnnnnnnnnnnnnnnnnnnnnnnnnnnnnnnnnnnnnnnnnnnnnnnnnnnnnnnnnnnnnnnnnnnnnnnnnnnnnnnnnnnnnnnnnnnnnnnnnnnnnnnnnnnnnnnnnnnnnnnnnnnnnnnnnnnnnnnnnnnnnnnnnnnnnnnnnnnnnnnnnnnnnnnnnnnnnnnnnnnnnnnnnnnnnnnnnnnnnnnnnnnnnnnnnnnnnnnnnnnnnnnnnnnnnnnnnnnnnnnnnnnnnnnnnnnnnnnnnnnnnnnnnnnnnnnnnnnnnnnnnnnnnnnnnnnnnnnnnnnnnnnnnnnnnnnnnnnnnnnnnnnnnnnnnnnnnnnnnnnnnnnnnnnnnnnnnnnnnnnnnnnnnnnnnnnnnnnnnnnnnnnnnnnnnnnnnnnnnnnnnnnnnnnnnnnnnnnnnnnnnnnnnnnnnnnnnnnnnnnnnnnnnnnnnnnnnnnnnnnnnnnnnnnnnnnnnnnnnnnnnnnnnnnnnnnnnnnnnnnnnnnnnnnnnnnnnnnnnnnnnnnnnnnnnnnnnnnnnnnnnnnnnnnnnnnnnnnnnnnnnnnnnnnnnnnnnnnnnnnnnnnnnnnnnnnnnnnnnnnnnnnnnnnnnnnnnnnnnnnnnnnnnnnnnnnnnnnnnnnnnnnnnnnnnnnnnnnnnnnnnnnnnnnnnnnnnnnnnnnnnnnnnnnnnnnnnnnnnnnnnnnnnnnnnnnnnnnnnnnnnnnnnnnnnnnnnnnnnnnnnnnnnnnnnnnnnnnnnnnnnnnnnnnnnnnnnnnnnnnnnnnnnnnnnnnnnnnnnnnnnnnnnnnnnnnnnnnnnnnnnnnnnnnnnnnnnnnnnnnnnnnnnnnnnnnnnnnnnnnnnnnnnnnnnnnnnnnnnnnnnnnnnnnnnnnnnnnnnnnnnnnnnnnnnnnnnnnnnnnnnnnnnnnnnnnnnnnnnnnnnnnnnnnnnnnnnnnnnnnnnnnnnnnnnnnnnnnnnnnnnnnnnnnnnnnnnnnnnnnnnnnnnnnnnnnnnnnnnnnnnnnnnnnnnnnnnnnnnnnnnnnnnnnnnnnnnnnnnnnnnnnnnnnnnnnnnnnnnnnnnnnnnnnnnnnnnnnnnnnnnnnnnnnnnnnnnnnnnnnnnnnnnnnnnnnnnnnnnnnnnnnnnnnnnnnnnnnnnnnnnnnnnnnnnnnnnnnnnnnnnnnnnnnnnnnnnnnnnnnnnnnnnnnnnnnnnnnnnnnnnnnnnnnnnnnnnnnnnnnnnnnnnnnnnnnnnnnnnnnnnnnnnnnnnnnnnnnnnnnnnnnnnnnnnnnnnnnnnnnnnnnnnnnnnnnnnnnnnnnnnnnnnnnnnnnnnnnnnnnnnnnnnnnnnnnnnnnnnnnnnnnnnnnnnnnnnnnnnnnnnnnnnnnnnnnnnnnnnnnnnnnnnnnnnnnnnnnnnnnnnnnnnnnnnnnnnnnnnnnnnnnnnnnnnnnnnnnnnnnnnnnnnnnnnnnnnnnnnnnnnnnnnnnnnnnnnnnnnnnnnnnnnnnnnnnnnnnnnnnnnnnnnnnnnnnnnnnnnnnnnnnnnnnnnnnnnnnnnnnnnnnnnnnnnnnnnnnnnnnnnnnnnnnnnnnnnnnnnnnnnnnnnnnnnnnnnnnnnnnnnnnnnnnnnnnnnnnnnnnnnnnnnnnnnnnnnnnnnnnnnnnnnnnnnnnnnnnnnnnnnnnnnnnnnnnnnnnnnnnnnnnnnnnnnnnnnnnnnnnnnnnnnnnnnnnnnnnnnnnnnnnnnnnnnnnnnnnnnnnnnnnnnnnnnnnnnnnnnnnnnnnnnnnnnnnnnnnnnnnnnnnnnnnnnnnnnnnnnnnnnnnnnnnnnnnnnnnnnnnnnnnnnnnnnnnnnnnnnnnnnnnnnnnnnnnnnnnnnnnnnnnnnnnnnnnnnnnnnnnnnnnnnnnnnnnnnnnnnnnnnnnnnnnnnnnnnnnnnnnnnnnnnnnnnnnnnnnnnnnnnnnnnnnnnnnnnnnnnnnnnnnnnnnnnnnnnnnnnnnnnnnnnnnnnnnnnnnnnnnnnnnnnnnnnnnnnnnnnnnnnnnnnnnnnnnnnnnnnnnnnnnnnnnnnnnnnnnnnnnnnnnnnnnnnnnnnnnnnnnnnnnnnnnnnnnnnnnnnnnnnnnnnnnnnnnnnnnnnnnnnnnnnnnnnnnnnnnnnnnnnnnnnnnnnnnnnnnnnnnnnnnnnnnnnnnnnnnnnnnnnnnnnnnnnnnnnnnnnnnnnnnnnnnnnnnnnnnnnnnnnnnnnnnnnnnnnnnnnnnnnnnnnnnnnnnnnnnnnnnnnnnnnnnnnnnnnnnnnnnnnnnnnnnnnnnnnnnnnnnnnnnnnnnnnnnnnnnnnnnnnnnnnnnnnnnnnnnnnnnnnnnnnnnnnnnnnnnnnnnnnnnnnnnnnnnnnnnnnnnnnnnnnnnnnnnnnnnnnnnnnnnnnnnnnnnnnnnnnnnnnnnnnnnnnnnnnnnnnnnnnnnnnnnnnnnnnnnnnnnnnnnnnnnnnnnnnnnnnnnnnnnnnnnnnnnnnnnnnnnnnnnnnnnnnnnnnnnnnnnnnnnnnnnnnnnnnnnnnnnnnnnnnnnnnnnnnnnnnnnnnnnnnnnnnnnnnnnnnnnnnnnnnnnnnnnnnnnnnnnnnnnnnnnnnnnnnnnnnnnnnnnnnnnnnnnnnnnnnnnnnnnnnnnnnnnnnnnnnnnnnnnnnnnnnnnnnnnnnnnnnnnnnnnnnnnnnnnnnnnnnnnnnnnnnnnnnnnnnnnnnnnnnnnnnnnnnnnnnnnnnnnnnnnnnnnnnnnnnnnnnnnnnnnnnnnnnnnnnnnnnnnnnnnnnnnnnnnnnnnnnnnnnnnnnnnnnnnnnnnnnnnnnnnnnnnnnnnnnnnnnnnnnnnnnnnnnnnnnnnnnnnnnnnnnnnnnnnnnnnnnnnnnnnnnnnnnnnnnnnnnnnnnnnnnnnnnnnnnnnnnnnnnnnnnnnnnnnnnnnnnnnnnnnnnnnnnnnnnnnnnnnnnnnnnnnnnnnnnnnnnnnnnnnnnnnnnnnnnnnnnnnnnnnnnnnnnnnnnnnnnnnnnnnnnnnnnnnnnnnnnnnnnnnnnnnnnnnnnnnnnnnnnnnnnnnnnnnnnnnnnnnnnnnnnnnnnnnnnnnnnnnnnnnnnnnnnnnnnnnnnnnnnnnnnnnnnnnnnnnnnnnnnnnnnnnnnnnnnnnnnnnnnnnnnnnnnnnnnnnnnnnnnnnnnnnnnnnnnnnnnnnnnnnnnnnnnnnnnnnnnnnnnnnnnnnnnnnnnnnnnnnnnnnnnnnnnnnnnnnnnnnnnnnnnnnnnnnnnnnnnnnnnnnnnnnnnnnnnnnnnnnnnnnnnnnnnnnnnnnnnnnnnnnnnnnnnnnnnnnnnnnnnnnnnnnnnnnnnnnnnnnnnnnnnnnnnnnnnnnnnnnnnnnnnnnnnnnnnnnnnnnnnnnnnnnnnnnnnnnnnnnnnnnnnnnnnnnnnnnnnnnnnnnnnnnnnnnnnnnnnnnnnnnnnnnnnnnnnnnnnnnnnnnnnnnnnnnnnnnnnnnnnnnnnnnnnnnnnnnnnnnnnnnnnnnnnnnnnnnnnnnnnnnnnnnnnnnnnnnnnnnnnnnnnnnnnnnnnnnnnnnnnnnnnnnnnnnnnnnnnnnnnnnnnnnnnnnnnnnnnnnnnnnnnnnnnnnnnnnnnnnnnnnnnnnnnnnnnnnnnnnnnnnnnnnnnnnnnnnnnnnnnnnnnnnnnnnnnnnnnnnnnnnnnnnnnnnnnnnnnnnnnnnnnnnnnnnnnnnnnnnnnnnnnnnnnnnnnnnnnnnnnnnnnnnnnnnnnnnnnnnnnnnnnnnnnnnnnnnnnnnnnnnnnnnnnnnnnnnnnnnnnnnnnnnnnnnnnnnnnnnnnnnnnnnnnnnnnnnnnnnnnnnnnnnnnnnnnnnnnnnnnnnnnnnnnnnnnnnnnnnnnnnnnnnnnnnnnnnnnnnnnnnnnnnnnnnnnnnnnnnnnnnnnnnnnnnnnnnnnnnnnnnnnnnnnnnnnnnnnnnnnnnnnnnnnnnnnnnnnnnnnnnnnnnnnnnnnnnnnnnnnnnnnnnnnnnnnnnnnnnnnnnnnnnnnnnnnnnnnnnnnnnnnnnnnnnnnnnnnnnnnnnnnnnnnnnnnnnnnnnnnnnnnnnnnnnnnnnnnnnnnnnnnnnnnnnnnnnnnnnnnnnnnnnnnnnnnnnnnnnnnnnnnnnnnnnnnnnnnnnnnnnnnnnnnnnnnnnnnnnnnnnnnnnnnnnnnnnnnnnnnnnnnnnnnnnnnnnnnnnnnnnnnnnnnnnnnnnnnnnnnnnnnnnnnnnnnnnnnnnnnnnnnnnnnnnnnnnnnnnnnnnnnnnnnnnnnnnnnnnnnnnnnnnnnnnnnnnnnnnnnnnnnnnnnnnnnnnnnnnnnnnnnnnnnnnnnnnnnnnnnnnnnnnnnnnnnnnnnnnnnnnnnnnnnnnnnnnnnnnnnnnnnnnnnnnnnnnnnnnnnnnnnnnnnnnnnnnnnnnnnnnnnnnnnnnnnnnnnnnnnnnnnnnnnnnnnnnnnnnnnnnnnnnnnnnnnnnnnnnnnnnnnnnnnnnnnnnnnnnnnnnnnnnnnnnnnnnnnnnnnnnnnnnnnnnnnnnnnnnnnnnnnnnnnnnnnnnnnnnnnnnnnnnnnnnnnnnnnnnnnnnnnnnnnnnnnnnnnnnnnnnnnnnnnnnnnnnnnnnnnnnnnnnnnnnnnnnnnnnnnnnnnnnnnnnnnnnnnnnnnnnnnnnnnnnnnnnnnnnnnnnnnnnnnnnnnnnnnnnnnnnnnnnnnnnnnnnnnnnnnnnnnnnnnnnnnnnnnnnnnnnnnnnnnnnnnnnnnnnnnnnnnnnnnnnnnnnnnnnnnnnnnnnnnnnnnnnnnnnnnnnnnnnnnnnnnnnnnnnnnnnnnnnnnnnnnnnnnnnnnnnnnnnnnnnnnnnnnnnnnnnnnnnnnnnnnnnnnnnnnnnnnnnnnnnnnnnnnnnnnnnnnnnnnnnnnnnnnnnnnnnnnnnnnnnnnnnnnnnnnnnnnnnnnnnnnnnnnnnnnnnnnnnnnnnnnnnnnnnnnnnnnnnnnnnnnnnnnnnnnnnnnnnnnnnnnnnnnnnnnnnnnnnnnnnnnnnnnnnnnnnnnnnnnnnnnnnnnnnnnnnnnnnnnnnnnnnnnnnnnnnnnnnnnnnnnnnnnnnnnnnnnnnnnnnnnnnnnnnnnnnnnnnnnnnnnnnnnnnnnnnnnnnnnnnnnnnnnnnnnnnnnnnnnnnnnnnnnnnnnnnnnnnnnnnnnnnnnnnnnnnnnnnnnnnnnnnnnnnnnnnnnnnnnnnnnnnnnnnnnnnnnnnnnnnnnnnnnnnnnnnnnnnnnnnnnnnnnnnnnnnnnnnnnnnnnnnnnnnnnnnnnnnnnnnnnnnnnnnnnnnnnnnnnnnnnnnnnnnnnnnnnnnnnnnnnnnnnnnnnnnnnnnnnnnnnnnnnnnnnnnnnnnnnnnnnnnnnnnnnnnnnnnnnnnnnnnnnnnnnnnnnnnnnnnnnnnnnnnnnnnnnnnnnnnnnnnnnnnnnnnnnnnnnnnnnnnnnnnnnnnnnnnnnnnnnnnnnnnnnnnnnnnnnnnnnnnnnnnnnnnnnnnnnnnnnnnnnnnnnnnnnnnnnnnnnnnnnnnnnnnnnnnnnnnnnnnnnnnnnnnnnnnnnnnnnnnnnnnnnnnnnnnnnnnnnnnnnnnnnnnnnnnnnnnnnnnnnnnnnnnnnnnnnnnnnnnnnnnnnnnnnnnnnnnnnnnnnnnnnnnnnnnnnnnnnnnnnnnnnnnnnnnnnnnnnnnnnnnnnnnnnnnnnnnnnnnnnnnnnnnnnnnnnnnnnnnnnnnnnnnnnnnnnnnnnnnnnnnnnnnnnnnnnnnnnnnnnnnnnnnnnnnnnnnnnnnnnnnnnnnnnnnnnnnnnnnnnnnnnnnnnnnnnnnnnnnnnnnnnnnnnnnnnnnnnnnnnnnnnnnnnnnnnnnnnnnnnnnnnnnnnnnnnnnnnnnnnnnnnnnnnnnnnnnnnnnnnnnnnnnnnnnnnnnnnnnnnnnnnnnnnnnnnnnnnnnnnnnnnnnnnnnnnnnnnnnnnnnnnnnnnnnnnnnnnnnnnnnnnnnnnnnnnnnnnnnnnnnnnnnnnnnnnnnnnnnnnnnnnnnnnnnnnnnnnnnnnnnnnnnnnnnnnnnnnnnnnnnnnnnnnnnnnnnnnnnnnnnnnnnnnnnnnnnnnnnnnnnnnnnnnnnnnnnnnnnnnnnnnnnnnnnnnnnnnnnnnnnnnnnnnnnnnnnnnnnnnnnnnnnnnnnnnnnnnnnnnnnnnnnnnnnnnnnnnnnnnnnnnnnnnnnnnnnnnnnnnnnnnnnnnnnnnnnnnnnnnnnnnnnnnnnnnnnnnnnnnnnnnnnnnnnnnnnnnnnnnnnnnnnnnnnnnnnnnnnnnnnnnnnnnnnnnnnnnnnnnnnnnnnnnnnnnnnnnnnnnnnnnnnnnnnnnnnnnnnnnnnnnnnnnnnnnnnnnnnnnnnnnnnnnnnnnnnnnnnnnnnnnnnnnnnnnnnnnnnnnnnnnnnnnnnnnnnnnnnnnnnnnnnnnnnnnnnnnnnnnnnnnnnnnnnnnnnnnnnnnnnnnnnnnnnnnnnnnnnnnnnnnnnnnnnnnnnnnnnnnnnnnnnnnnnnnnnnnnnnnnnnnnnnnnnnnnnnnnnnnnnnnnnnnnnnnnnnnnnnnnnnnnnnnnnnnnnnnnnnnnnnnnnnnnnnnnnnnnnnnnnnnnnnnnnnnnnnnnnnnnnnnnnnnnnnnnnnnnnnnnnnnnnnnnnnnnnnnnnnnnnnnnnnnnnnnnnnnnnnnnnnnnnnnnnnnnnnnnnnnnnnnnnnnnnnnnnnnnnnnnnnnnnnnnnnnnnnnnnnnnnnnnnnnnnnnnnnnnnnnnnnnnnnnnnnnnnnnnnnnnnnnnnnnnnnnnnnnnnnnnnnnnnnnnnnnnnnnnnnnnnnnnnnnnnnnnnnnnnnnnnnnnnnnnnnnnnnnnnnnnnnnnnnnnnnnnnnnnnnnnnnnnnnnnnnnnnnnnnnnnnnnnnnnnnnnnnnnnnnnnnnnnnnnnnnnnnnnnnnnnnnnnnnnnnnnnnnnnnnnnnnnnnnnnnnnnnnnnnnnnnnnnnnnnnnnnnnnnnnnnnnnnnnnnnnnnnnnnnnnnnnnnnnnnnnnnnnnnnnnnnnnnnnnnnnnnnnnnnnnnnnnnnnnnnnnnnnnnnnnnnnnnnnnnnnnnnnnnnnnnnnnnnnnnnnnnnnnnnnnnnnnnnnnnnnnnnnnnnnnnnnnnnnnnnnnnnnnnnnnnnnnnnnnnnnnnnnnnnnnnnnnnnnnnnnnnnnnnnnnnnnnnnnnnnnnnnnnnnnnnnnnnnnnnnnnnnnnnnnnnnnnnnnnnnnnnnnnnnnnnnnnnnnnnnnnnnnnnnnnnnnnnnnnnnnnnnnnnnnnnnnnnnnnnnnnnnnnnnnnnnnnnnnnnnnnnnnnnnnnnnnnnnnnnnnnnnnnnnnnnnnnnnnnnnnnnnnnnnnnnnnnnnnnnnnnnnnnnnnnnnnnnnnnnnnnnnnnnnnnnnnnnnnnnnnnnnnnnnnnnnnnnnnnnnnnnnnnnnnnnnnnnnnnnnnnnnnnnnnnnnnnnnnnnnnnnnnnnnnnnnnnnnnnnnnnnnnnnnnnnnnnnnnnnnnnnnnnnnnnnnnnnnnnnnnnnnnnnnnnnnnnnnnnnnnnnnnnnnnnnnnnnnnnnnnnnnnnnnnnnnnnnnnnnnnnnnnnnnnnnnnnnnnnnnnnnnnnnnnnnnnnnnnnnnnnnnnnnnnnnnnnnnnnnnnnnnnnnnnnnnnnnnnnnnnnnnnnnnnnnnnnnnnnnnnnnnnnnnnnnnnnnnnnnnnnnnnnnnnnnnnnnnnnnnnnnnnnnnnnnnnnnnnnnnnnnnnnnnnnnnnnnnnnnnnnnnnnnnnnnnnnnnnnnnnnnnnnnnnnnnnnnnnnnnnnnnnnnnnnnnnnnnnnnnnnnnnnnnnnnnnnnnnnnnnnnnnnnnnnnnnnnnnnnnnnnnnnnnnnnnnnnnnnnnnnnnnnnnnnnnnnnnnnnnnnnnnnnnnnnnnnnnnnnnnnnnnnnnnnnnnnnnnnnnnnnnnnnnnnnnnnnnnnnnnnnnnnnnnnnnnnnnnnnnnnnnnnnnnnnnnnnnnnnnnnnnnnnnnnnnnnnnnnnnnnnnnnnnnnnnnnnnnnnnnnnnnnnnnnnnnnnnnnnnnnnnnnnnnnnnnnnnnnnnnnnnnnnnnnnnnnnnnnnnnnnnnnnnnnnnnnnnnnnnnnnnnnnnnnnnnnnnnnnnnnnnnnnnnnnnnnnnnnnnnnnnnnnnnnnnnnnnnnnnnnnnnnnnnnnnnnnnnnnnnnnnnnnnnnnnnnnnnnnnnnnnnnnnnnnnnnnnnnnnnnnnnnnnnnnnnnnnnnnnnnnnnnnnnnnnnnnnnnnnnnnnnnnnnnnnnnnnnnnnnnnnnnnnnnnnnnnnnnnnnnnnnnnnnnnnnnnnnnnnnnnnnnnnnnnnnnnnnnnnnnnnnnnnnnnnnnnnnnnnnnnnnnnnnnnnnnnnnnnnnnnnnnnnnnnnnnnnnnnnnnnnnnnnnnnnnnnnnnnnnnnnnnnnnnnnnnnnnnnnnnnnnnnnnnnnnnnnnnnnnnnnnnnnnnnnnnnnnnnnnnnnnnnnnnnnnnnnnnnnnnnnnnnnnnnnnnnnnnnnnnnnnnnnnnnnnnnnnnnnnnnnnnnnnnnnnnnnnnnnnnnnnnnnnnnnnnnnnnnnnnnnnnnnnnnnnnnnnnnnnnnnnnnnnnnnnnnnnnnnnnnnnnnnnnnnnnnnnnnnnnnnnnnnnnnnnnnnnnnnnnnnnnnnnnnnnnnnnnnnnnnnnnnnnnnnnnnnnnnnnnnnnnnnnnnnnnnnnnnnnnnnnnnnnnnnnnnnnnnnnnnnnnnnnnnnnnnnnnnnnnnnnnnnnnnnnnnnnnnnnnnnnnnnnnnnnnnnnnnnnnnnnnnnnnnnnnnnnnnnnnnnnnnnnnnnnnnnnnnnnnnnnnnnnnnnnnnnnnnnnnnnnnnnnnnnnnnnnnnnnnnnnnnnnnnnnnnnnnnnnnnnnnnnnnnnnnnnnnnnnnnnnnnnnnnnnnnnnnnnnnnnnnnnnnnnnnnnnnnnnnnnnnnnnnnnnnnnnnnnnnnnnnnnnnnnnnnnnnnnnnnnnnnnnnnnnnnnnnnnnnnnnnnnnnnnnnnnnnnnnnnnnnnnnnnnnnnnnnnnnnnnnnnnnnnnnnnnnnnnnnnnnnnnnnnnnnnnnnnnnnnnnnnnnnnnnnnnnnnnnnnnnnnnnnnnnnnnnnnnnnnnnnnnnnnnnnnnnnnnnnnnnnnnnnnnnnnnnnnnnnnnnnnnnnnnnnnnnnnnnnnnnnnnnnnnnnnnnnnnnnnnnnnnnnnnnnnnnnnnnnnnnnnnnnnnnnnnnnnnnnnnnnnnnnnnnnnnnnnnnnnnnnnnnnnnnnnnnnnnnnnnnnnnnnnnnnnnnnnnnnnnnnnnnnnnnnnnnnnnnnnnnnnnnnnnnnnnnnnnnnnnnnnnnnnnnnnnnnnnnnnnnnnnnnnnnnnnnnnnnnnnnnnnnnnnnnnnnnnnnnnnnnnnnnnnnnnnnnnnnnnnnnnnnnnnnnnnnnnnnnnnnnnnnnnnnnnnnnnnnnnnnnnnnnnnnnnnnnnnnnnnnnnnnnnnnnnnnnnnnnnnnnnnnnnnnnnnnnnnnnnnnnnnnnnnnnnnnnnnnnnnnnnnnnnnnnnnnnnnnnnnnnnnnnnnnnnnnnnnnnnnnnnnnnnnnnnntacgcgacctgaatatcacggcaccatcggctgaagccattgccactgccgttgtggcgcatccccgagccacaacagaacaacgcgccatcgcccggctggtgcaggaatacgctgcggaagcgcgaggctatgcgttggccggcaggacagaccaagggggcattgccgtatatcatccaaggcccgggcggatgctgaagcgcatcagcaatctgccacgcagcattttcatttccgccactctgcaaatccgcggaagttttgacgccttccggcgagccatggcgattgaggagatctcgcccctttcaacagccattgaaccaaagcgtcacggggacctctcctttgtctatcagcccaaggtgccggatacggaagattggttcagtgaggttatcagcagcatagccaccgcaccgcgcccctgtttggtgctggtcccaagccatgatttggcggaacgcataggcgcggctgctggtgggcgtgtgcgtggccgcgaggagcctttgcgtgaggccgccgcggaagctgaaagccaagggcttttcatcgcagccggtgcttgggcgggcctggatacgcctacacgctgggccagcctggtcattccccgcgcgcctttccccaggctgcgggttctggagggggaagcgatagatcattacctggatagccatgcagccacagtccggcgccttgggcaggggcttggccgcgtactgcgctttccggaggcacgggccaaggtgatcattctggaccagcgccttgtcacccacggcctggaaagctgcgtgccggaacgcttccgtcccgcatgggaggaggccaagcgcgccgcactttctcaggggttcgacgaaggcacacggtttgaaatgacgttgagccgggcggaacgagaccctgcgttacgcaaggcagcactcagccattacgggctgcgctgcaccgaatgcggctttgtgccgcgggtttcatcgcaattagatgttcaccacctgaacccaatcgccgagggcaagcgtagaactgtgctgacggacgtgacggttctctgcgccaattgtcaccggctggcacatgcgcgcctccgcgccgcttcagccgagggggaggcggtgtgaaaccttaaccgatgtaagtccgtaaaggacgctccttcatgaaaggcgtgcggcgacattgagaaggccttcctgtcgtggcgcggcacgttgctcgcctgatggcctctgctgggccgacaggcaagcggacttgcggcggattgactttgctatcacagggaagaccagcttagcattggtcaccccagccagggatgaatgaccctggcgagttgagcatcgcttaaggaggaaagaaaatggccaaagcattgatcggttttctgatggcggtgttatttctggccctacctcatcaggcccgcgctcaagaggaaaactggccatcacgtcccattactatggtaatacctttctcaaccggcggatccgtggatgcggtgttgcgcgtcctgaagccgatgctcgaagccgaattgaagcagccgatcattccggattatcggcctggcggcgcaacggcacttggggcggccacagtcgcccgcgcccggcctgacggctacactttcggcatcgtcgtggatgccctcgcggtaaatgccacgctctatcgcaaccttccgtatgatacgttgacggatttgatgccggtctctctgcttggcaaaatgccgctggtgatgatcgttcatccggctgcaccattcaatgatcttgcggcaatcgtgtcggcggctcgcgcaagaccaggtgcattgacctatgcgtcggtcggcgtgggcagcatcaatcatttggcgatggaattactcaaccggcaaagtggcgtcagtatgacacatgtgccgtatcgcggtggcggtcctgcggtgaccgatctgctgggtgggcatgtggatatgatgttgatgtccctggcacttgctcgcgcccagcttgatgccggtacgctcaaggctgtggccgtcacctcggcaagccgacttgccgcgcttccgagcctgcccaccgcaagcgaaggcggcatccctggctttaccgcatttgcttggcagggcgtggtggcgccacctggaacgcccaccaccgtgattgggcggtttcaccagatattgcgcaatgtggctgccgaaccgcgcatacgcgaagggctggagaatctgggaatgcaggctgaggtatcctctccaagcgagctcagccaattcctacgcgagcagatcaacacttggagcactgtgattcgagaagctgatatcaagccggagtgaagcggcttggctttcatgtcacccaacgcctcgccgcatctgcaggcactcggcgctgcgttgccagcggggctgcagcgttttcacgctgatgccgaaaggtgcacagtttccgggcaggcaagggtcacgacaggcggcgtgtttgctcgtgttctgcttcgtttgcttggcctccatctccgcgatggaaagcagccgctggacgtcacctttatgcccgctggcagcggcacgatctgggatcggcgcttcgggacaggccgctttatcagccggattgaagcaggcggcatcggctttctcatcgaatcctttggtccctataccttgcgatttcggctgaccccagatggagacgcagtttcatggacgctgcagcgtgctgcggtatttggcctcgctattccctcatttctggcgccgcgtatcgctgcacgggaatggttggccgctgacaaagcctatgcaatgtccgtcgcggtcgtgcttccgctgcttggtttgatactacgatatgaaggtgagcttcatccgccgcagtttaatgagcccgactgacaaagggcgaaaaaagaatgggcacgcagccgaacgctttttcaccccaccaaccgcgaccgctgctctggcgtcagcaagctgcagtgctcatgatgcccgaaccagcgatatcggttgcgggcaacaagcctatacagcgcatcgcggagggcttcagggatcaggcgggtaatctcaagcaagcgccaggcaccgccgagcaccggcaaaaggcgcagatagccaccgctcatcccccagcaatgcccgtccttcatgagtagatatgtggtgtcaatttccacgccgaagtggcggtatagcgaagcgccaagttcgccttgcgctgacgtataaaggatttttccttgccggtcggcagacatcaaccagcgcaccccaccggagcaaagcccacaatgcccatcaaaaacgaaaagtgggcggctttcgtcaaacaccggcacggtgggatcgtcgcgccaggagaaagcttctgtggaatagcgtgtcatgcccgtattgccgtgatatccagcgacgccaaggcgccaagatactcatccaggctgatgaggtcgaggcaaggtcgcgcaccggcagggattgatccaccatgtgcaaggcgccgggcaatcaggattgccggaatacaggggatattcggcccatggccagatcgggcgatgatacgctcggtacggataagcgctttgccgtcatggccttttccactgatccgcatgtgaaagccgctgcgcgcgctaccccgccaatcaaaaaggaatgaggctttcaataaggcgtttgaccagcggtcgagccttggcaacaggcgaaaacgtaccccccatgaaaggagccaggtgccgaagtgcagaatggcgatctcatgtccggcgccgaagcgtatctgcttgagggttgggtagcgaaggggaaacaactccaggtcgggcacatcgcaatagccaaaccagcgtctgcccaactcgggatagacctcactatgcagcccctgccagccgaatacccgttgcatgcggccgtcgatcaaggtggtgaagggacgcccgacataggaaagaacggcgcttgccgtgccgagaccgcgattggtctgttgtgctgctgtgatgccgtaatcgactgcttcgatttgggcgaagtgacgcgcagcatcgtccagataggccgccgtgaggcatggcactgaactggcgccggagatgatcgctacaccttgatgacgcgcagcggggtcaagcgacccaatgttccggacaaaggtgcgggcatcggcaaggtcgcagtaatgcgcgcctgcggcgattgccgcttccgccacggcatagctttggtgctggaacgggcccacggtgtggatgaccagacctgggtgcaacgctgcaaggggcttagcgagatcaccgcctatgtccaatgctaccgcctcggcaggattgaccgcatcaagggaagcagcaaaggcctgggccttggccagggatcgcccggctatgatcagggttatcgccggatcgtcctttagggcacgggcgacatagctgccgaagttaccgtagccgccgaggattaggactcgcattgccatctgcctgactatcgcacgatttgccaagctatcggcaggcagcaggccgaaaaaacggttcgcagcccctcaatgggtaactgtgccaggcaggaggcaagcagccgaaacaggataaacagttggtataattggaattttgttcaggaatagctctaacaccttgtaggttccgcccaattttccctacccagtgccgcttgccccaccagtccattccccaaccacgctgcaccgcagcatagttaaaaccatttcagatcaacgcgttaaaccttgttggaaaaatcggcctaccctcaagctttggagagaattcgccggttcggagaaaaaacgccgaaacattccgcttgagcaccctcaaggtcgccagaaaaaagctttgatttcaagggagtttaggcgctgtacgggggaagggag

SEQ ID NO: 106 - DNA, 14617 bp, Artificial Sequence
  Synthetic Oligonucleotide
  misc_feature (1)..(9997): n is a, c, g, or t
nnnnnnnnnnnnnnnnnnnnnnnnnnnnnnnnnnnnnnnnnnnnnnnnnnnnnnnnnnnnnnnnnnnnnnnnnnnnnnnnnnnnnnnnnnnnnnnnnnnnnnnnnnnnnnnnnnnnnnnnnnnnnnnnnnnnnnnnnnnnnnnnnnnnnnnnnnnnnnnnnnnnnnnnnnnnnnnnnnnnnnnnnnnnnnnnnnnnnnnnnnnnnnnnnnnnnnnnnnnnnnnnnnnnnnnnnnnnnnnnnnnnnnnnnnnnnnnnnnnnnnnnnnnnnnnnnnnnnnnnnnnnnnnnnnnnnnnnnnnnnnnnnnnnnnnnnnnnnnnnnnnnnnnnnnnnnnnnnnnnnnnnnnnnnnnnnnnnnnnnnnnnnnnnnnnnnnnnnnnnnnnnnnnnnnnnnnnnnnnnnnnnnnnnnnnnnnnnnnnnnnnnnnnnnnnnnnnnnnnnnnnnnnnnnnnnnnnnnnnnnnnnnnnnnnnnnnnnnnnnnnnnnnnnnnnnnnnnnnnnnnnnnnnnnnnnnnnnnnnnnnnnnnnnnnnnnnnnnnnnnnnnnnnnnnnnnnnnnnnnnnnnnnnnnnnnnnnnnnnnnnnnnnnnnnnnnnnnnnnnnnnnnnnnnnnnnnnnnnnnnnnnnnnnnnnnnnnnnnnnnnnnnnnnnnnnnnnnnnnnnnnnnnnnnnnnnnnnnnnnnnnnnnnnnnnnnnnnnnnnnnnnnnnnnnnnnnnnnnnnnnnnnnnnnnnnnnnnnnnnnnnnnnnnnnnnnnnnnnnnnnnnnnnnnnnnnnnnnnnnnnnnnnnnnnnnnnnnnnnnnnnnnnnnnnnnnnnnnnnnnnnnnnnnnnnnnnnnnnnnnnnnnnnnnnnnnnnnnnnnnnnnnnnnnnnnnnnnnnnnnnnnnnnnnnnnnnnnnnnnnnnnnnnnnnnnnnnnnnnnnnnnnnnnnnnnnnnnnnnnnnnnnnnnnnnnnnnnnnnnnnnnnnnnnnnnnnnnnnnnnnnnnnnnnnnnnnnnnnnnnnnnnnnnnnnnnnnnnnnnnnnnnnnnnnnnnnnnnnnnnnnnnnnnnnnnnnnnnnnnnnnnnnnnnnnnnnnnnnnnnnnnnnnnnnnnnnnnnnnnnnnnnnnnnnnnnnnnnnnnnnnnnnnnnnnnnnnnnnnnnnnnnnnnnnnnnnnnnnnnnnnnnnnnnnnnnnnnnnnnnnnnnnnnnnnnnnnnnnnnnnnnnnnnnnnnnnnnnnnnnnnnnnnnnnnnnnnnnnnnnnnnnnnnnnnnnnnnnnnnnnnnnnnnnnnnnnnnnnnnnnnnnnnnnnnnnnnnnnnnnnnnnnnnnnnnnnnnnnnnnnnnnnnnnnnnnnnnnnnnnnnnnnnnnnnnnnnnnnnnnnnnnnnnnnnnnnnnnnnnnnnnnnnnnnnnnnnnnnnnnnnnnnnnnnnnnnnnnnnnnnnnnnnnnnnnnnnnnnnnnnnnnnnnnnnnnnnnnnnnnnnnnnnnnnnnnnnnnnnnnnnnnnnnnnnnnnnnnnnnnnnnnnnnnnnnnnnnnnnnnnnnnnnnnnnnnnnnnnnnnnnnnnnnnnnnnnnnnnnnnnnnnnnnnnnnnnnnnnnnnnnnnnnnnnnnnnnnnnnnnnnnnnnnnnnnnnnnnnnnnnnnnnnnnnnnnnnnnnnnnnnnnnnnnnnnnnnnnnnnnnnnnnnnnnnnnnnnnnnnnnnnnnnnnnnnnnnnnnnnnnnnnnnnnnnnnnnnnnnnnnnnnnnnnnnnnnnnnnnnnnnnnnnnnnnnnnnnnnnnnnnnnnnnnnnnnnnnnnnnnnnnnnnnnnnnnnnnnnnnnnnnnnnnnnnnnnnnnnnnnnnnnnnnnnnnnnnnnnnnnnnnnnnnnnnnnnnnnnnnnnnnnnnnnnnnnnnnnnnnnnnnnnnnnnnnnnnnnnnnnnnnnnnnnnnnnnnnnnnnnnnnnnnnnnnnnnnnnnnnnnnnnnnnnnnnnnnnnnnnnnnnnnnnnnnnnnnnnnnnnnnnnnnnnnnnnnnnnnnnnnnnnnnnnnnnnnnnnnnnnnnnnnnnnnnnnnnnnnnnnnnnnnnnnnnnnnnnnnnnnnnnnnnnnnnnnnnnnnnnnnnnnnnnnnnnnnnnnnnnnnnnnnnnnnnnnnnnnnnnnnnnnnnnnnnnnnnnnnnnnnnnnnnnnnnnnnnnnnnnnnnnnnnnnnnnnnnnnnnnnnnnnnnnnnnnnnnnnnnnnnnnnnnnnnnnnnnnnnnnnnnnnnnnnnnnnnnnnnnnnnnnnnnnnnnnnnnnnnnnnnnnnnnnnnnnnnnnnnnnnnnnnnnnnnnnnnnnnnnnnnnnnnnnnnnnnnnnnnnnnnnnnnnnnnnnnnnnnnnnnnnnnnnnnnnnnnnnnnnnnnnnnnnnnnnnnnnnnnnnnnnnnnnnnnnnnnnnnnnnnnnnnnnnnnnnnnnnnnnnnnnnnnnnnnnnnnnnnnnnnnnnnnnnnnnnnnnnnnnnnnnnnnnnnnnnnnnnnnnnnnnnnnnnnnnnnnnnnnnnnnnnnnnnnnnnnnnnnnnnnnnnnnnnnnnnnnnnnnnnnnnnnnnnnnnnnnnnnnnnnnnnnnnnnnnnnnnnnnnnnnnnnnnnnnnnnnnnnnnnnnnnnnnnnnnnnnnnnnnnnnnnnnnnnnnnnnnnnnnnnnnnnnnnnnnnnnnnnnnnnnnnnnnnnnnnnnnnnnnnnnnnnnnnnnnnnnnnnnnnnnnnnnnnnnnnnnnnnnnnnnnnnnnnnnnnnnnnnnnnnnnnnnnnnnnnnnnnnnnnnnnnnnnnnnnnnnnnnnnnnnnnnnnnnnnnnnnnnnnnnnnnnnnnnnnnnnnnnnnnnnnnnnnnnnnnnnnnnnnnnnnnnnnnnnnnnnnnnnnnnnnnnnnnnnnnnnnnnnnnnnnnnnnnnnnnnnnnnnnnnnnnnnnnnnnnnnnnnnnnnnnnnnnnnnnnnnnnnnnnnnnnnnnnnnnnnnnnnnnnnnnnnnnnnnnnnnnnnnnnnnnnnnnnnnnnnnnnnnnnnnnnnnnnnnnnnnnnnnnnnnnnnnnnnnnnnnnnnnnnnnnnnnnnnnnnnnnnnnnnnnnnnnnnnnnnnnnnnnnnnnnnnnnnnnnnnnnnnnnnnnnnnnnnnnnnnnnnnnnnnnnnnnnnnnnnnnnnnnnnnnnnnnnnnnnnnnnnnnnnnnnnnnnnnnnnnnnnnnnnnnnnnnnnnnnnnnnnnnnnnnnnnnnnnnnnnnnnnnnnnnnnnnnnnnnnnnnnnnnnnnnnnnnnnnnnnnnnnnnnnnnnnnnnnnnnnnnnnnnnnnnnnnnnnnnnnnnnnnnnnnnnnnnnnnnnnnnnnnnnnnnnnnnnnnnnnnnnnnnnnnnnnnnnnnnnnnnnnnnnnnnnnnnnnnnnnnnnnnnnnnnnnnnnnnnnnnnnnnnnnnnnnnnnnnnnnnnnnnnnnnnnnnnnnnnnnnnnnnnnnnnnnnnnnnnnnnnnnnnnnnnnnnnnnnnnnnnnnnnnnnnnnnnnnnnnnnnnnnnnnnnnnnnnnnnnnnnnnnnnnnnnnnnnnnnnnnnnnnnnnnnnnnnnnnnnnnnnnnnnnnnnnnnnnnnnnnnnnnnnnnnnnnnnnnnnnnnnnnnnnnnnnnnnnnnnnnnnnnnnnnnnnnnnnnnnnnnnnnnnnnnnnnnnnnnnnnnnnnnnnnnnnnnnnnnnnnnnnnnnnnnnnnnnnnnnnnnnnnnnnnnnnnnnnnnnnnnnnnnnnnnnnnnnnnnnnnnnnnnnnnnnnnnnnnnnnnnnnnnnnnnnnnnnnnnnnnnnnnnnnnnnnnnnnnnnnnnnnnnnnnnnnnnnnnnnnnnnnnnnnnnnnnnnnnnnnnnnnnnnnnnnnnnnnnnnnnnnnnnnnnnnnnnnnnnnnnnnnnnnnnnnnnnnnnnnnnnnnnnnnnnnnnnnnnnnnnnnnnnnnnnnnnnnnnnnnnnnnnnnnnnnnnnnnnnnnnnnnnnnnnnnnnnnnnnnnnnnnnnnnnnnnnnnnnnnnnnnnnnnnnnnnnnnnnnnnnnnnnnnnnnnnnnnnnnnnnnnnnnnnnnnnnnnnnnnnnnnnnnnnnnnnnnnnnnnnnnnnnnnnnnnnnnnnnnnnnnnnnnnnnnnnnnnnnnnnnnnnnnnnnnnnnnnnnnnnnnnnnnnnnnnnnnnnnnnnnnnnnnnnnnnnnnnnnnnnnnnnnnnnnnnnnnnnnnnnnnnnnnnnnnnnnnnnnnnnnnnnnnnnnnnnnnnnnnnnnnnnnnnnnnnnnnnnnnnnnnnnnnnnnnnnnnnnnnnnnnnnnnnnnnnnnnnnnnnnnnnnnnnnnnnnnnnnnnnnnnnnnnnnnnnnnnnnnnnnnnnnnnnnnnnnnnnnnnnnnnnnnnnnnnnnnnnnnnnnnnnnnnnnnnnnnnnnnnnnnnnnnnnnnnnnnnnnnnnnnnnnnnnnnnnnnnnnnnnnnnnnnnnnnnnnnnnnnnnnnnnnnnnnnnnnnnnnnnnnnnnnnnnnnnnnnnnnnnnnnnnnnnnnnnnnnnnnnnnnnnnnnnnnnnnnnnnnnnnnnnnnnnnnnnnnnnnnnnnnnnnnnnnnnnnnnnnnnnnnnnnnnnnnnnnnnnnnnnnnnnnnnnnnnnnnnnnnnnnnnnnnnnnnnnnnnnnnnnnnnnnnnnnnnnnnnnnnnnnnnnnnnnnnnnnnnnnnnnnnnnnnnnnnnnnnnnnnnnnnnnnnnnnnnnnnnnnnnnnnnnnnnnnnnnnnnnnnnnnnnnnnnnnnnnnnnnnnnnnnnnnnnnnnnnnnnnnnnnnnnnnnnnnnnnnnnnnnnnnnnnnnnnnnnnnnnnnnnnnnnnnnnnnnnnnnnnnnnnnnnnnnnnnnnnnnnnnnnnnnnnnnnnnnnnnnnnnnnnnnnnnnnnnnnnnnnnnnnnnnnnnnnnnnnnnnnnnnnnnnnnnnnnnnnnnnnnnnnnnnnnnnnnnnnnnnnnnnnnnnnnnnnnnnnnnnnnnnnnnnnnnnnnnnnnnnnnnnnnnnnnnnnnnnnnnnnnnnnnnnnnnnnnnnnnnnnnnnnnnnnnnnnnnnnnnnnnnnnnnnnnnnnnnnnnnnnnnnnnnnnnnnnnnnnnnnnnnnnnnnnnnnnnnnnnnnnnnnnnnnnnnnnnnnnnnnnnnnnnnnnnnnnnnnnnnnnnnnnnnnnnnnnnnnnnnnnnnnnnnnnnnnnnnnnnnnnnnnnnnnnnnnnnnnnnnnnnnnnnnnnnnnnnnnnnnnnnnnnnnnnnnnnnnnnnnnnnnnnnnnnnnnnnnnnnnnnnnnnnnnnnnnnnnnnnnnnnnnnnnnnnnnnnnnnnnnnnnnnnnnnnnnnnnnnnnnnnnnnnnnnnnnnnnnnnnnnnnnnnnnnnnnnnnnnnnnnnnnnnnnnnnnnnnnnnnnnnnnnnnnnnnnnnnnnnnnnnnnnnnnnnnnnnnnnnnnnnnnnnnnnnnnnnnnnnnnnnnnnnnnnnnnnnnnnnnnnnnnnnnnnnnnnnnnnnnnnnnnnnnnnnnnnnnnnnnnnnnnnnnnnnnnnnnnnnnnnnnnnnnnnnnnnnnnnnnnnnnnnnnnnnnnnnnnnnnnnnnnnnnnnnnnnnnnnnnnnnnnnnnnnnnnnnnnnnnnnnnnnnnnnnnnnnnnnnnnnnnnnnnnnnnnnnnnnnnnnnnnnnnnnnnnnnnnnnnnnnnnnnnnnnnnnnnnnnnnnnnnnnnnnnnnnnnnnnnnnnnnnnnnnnnnnnnnnnnnnnnnnnnnnnnnnnnnnnnnnnnnnnnnnnnnnnnnnnnnnnnnnnnnnnnnnnnnnnnnnnnnnnnnnnnnnnnnnnnnnnnnnnnnnnnnnnnnnnnnnnnnnnnnnnnnnnnnnnnnnnnnnnnnnnnnnnnnnnnnnnnnnnnnnnnnnnnnnnnnnnnnnnnnnnnnnnnnnnnnnnnnnnnnnnnnnnnnnnnnnnnnnnnnnnnnnnnnnnnnnnnnnnnnnnnnnnnnnnnnnnnnnnnnnnnnnnnnnnnnnnnnnnnnnnnnnnnnnnnnnnnnnnnnnnnnnnnnnnnnnnnnnnnnnnnnnnnnnnnnnnnnnnnnnnnnnnnnnnnnnnnnnnnnnnnnnnnnnnnnnnnnnnnnnnnnnnnnnnnnnnnnnnnnnnnnnnnnnnnnnnnnnnnnnnnnnnnnnnnnnnnnnnnnnnnnnnnnnnnnnnnnnnnnnnnnnnnnnnnnnnnnnnnnnnnnnnnnnnnnnnnnnnnnnnnnnnnnnnnnnnnnnnnnnnnnnnnnnnnnnnnnnnnnnnnnnnnnnnnnnnnnnnnnnnnnnnnnnnnnnnnnnnnnnnnnnnnnnnnnnnnnnnnnnnnnnnnnnnnnnnnnnnnnnnnnnnnnnnnnnnnnnnnnnnnnnnnnnnnnnnnnnnnnnnnnnnnnnnnnnnnnnnnnnnnnnnnnnnnnnnnnnnnnnnnnnnnnnnnnnnnnnnnnnnnnnnnnnnnnnnnnnnnnnnnnnnnnnnnnnnnnnnnnnnnnnnnnnnnnnnnnnnnnnnnnnnnnnnnnnnnnnnnnnnnnnnnnnnnnnnnnnnnnnnnnnnnnnnnnnnnnnnnnnnnnnnnnnnnnnnnnnnnnnnnnnnnnnnnnnnnnnnnnnnnnnnnnnnnnnnnnnnnnnnnnnnnnnnnnnnnnnnnnnnnnnnnnnnnnnnnnnnnnnnnnnnnnnnnnnnnnnnnnnnnnnnnnnnnnnnnnnnnnnnnnnnnnnnnnnnnnnnnnnnnnnnnnnnnnnnnnnnnnnnnnnnnnnnnnnnnnnnnnnnnnnnnnnnnnnnnnnnnnnnnnnnnnnnnnnnnnnnnnnnnnnnnnnnnnnnnnnnnnnnnnnnnnnnnnnnnnnnnnnnnnnnnnnnnnnnnnnnnnnnnnnnnnnnnnnnnnnnnnnnnnnnnnnnnnnnnnnnnnnnnnnnnnnnnnnnnnnnnnnnnnnnnnnnnnnnnnnnnnnnnnnnnnnnnnnnnnnnnnnnnnnnnnnnnnnnnnnnnnnnnnnnnnnnnnnnnnnnnnnnnnnnnnnnnnnnnnnnnnnnnnnnnnnnnnnnnnnnnnnnnnnnnnnnnnnnnnnnnnnnnnnnnnnnnnnnnnnnnnnnnnnnnnnnnnnnnnnnnnnnnnnnnnnnnnnnnnnnnnnnnnnnnnnnnnnnnnnnnnnnnnnnnnnnnnnnnnnnnnnnnnnnnnnnnnnnnnnnnnnnnnnnnnnnnnnnnnnnnnnnnnnnnnnnnnnnnnnnnnnnnnnnnnnnnnnnnnnnnnnnnnnnnnnnnnnnnnnnnnnnnnnnnnnnnnnnnnnnnnnnnnnnnnnnnnnnnnnnnnnnnnnnnnnnnnnnnnnnnnnnnnnnnnnnnnnnnnnnnnnnnnnnnnnnnnnnnnnnnnnnnnnnnnnnnnnnnnnnnnnnnnnnnnnnnnnnnnnnnnnnnnnnnnnnnnnnnnnnnnnnnnnnnnnnnnnnnnnnnnnnnnnnnnnnnnnnnnnnnnnnnnnnnnnnnnnnnnnnnnnnnnnnnnnnnnnnnnnnnnnnnnnnnnnnnnnnnnnnnnnnnnnnnnnnnnnnnnnnnnnnnnnnnnnnnnnnnnnnnnnnnnnnnnnnnnnnnnnnnnnnnnnnnnnnnnnnnnnnnnnnnnnnnnnnnnnnnnnnnnnnnnnnnnnnnnnnnnnnnnnnnnnnnnnnnnnnnnnnnnnnnnnnnnnnnnnnnnnnnnnnnnnnnnnnnnnnnnnnnnnnnnnnnnnnnnnnnnnnnnnnnnnnnnnnnnnnnnnnnnnnnnnnnnnnnnnnnnnnnnnnnnnnnnnnnnnnnnnnnnnnnnnnnnnnnnnnnnnnnnnnnnnnnnnnnnnnnnnnnnnnnnnnnnnnnnnnnnnnnnnnnnnnnnnnnnnnnnnnnnnnnnnnnnnnnnnnnnnnnnnnnnnnnnnnnnnnnnnnnnnnnnnnnnnnnnnnnnnnnnnnnnnnnnnnnnnnnnnnnnnnnnnnnnnnnnnnnnnnnnnnnnnnnnnnnnnnnnnnnnnnnnnnnnnnnnnnnnnnnnnnnnnnnnnnnnnnnnnnnnnnnnnnnnnnnnnnnnnnnnnnnnnnnnnnnnnnnnnnnnnnnnnnnnnnnnnnnnnnnnnnnnnnnnnnnnnnnnnnnnnnnnnnnnnnnnnnnnnnnnnnnnnnnnnnnnnnnnnnnnnnnnnnnnnnnnnnnnnnnnnnnnnnnnnnnnnnnnnnnnnnnnnnnnnnnnnnnnnnnnnnnnnnnnnnnnnnnnnnnnnnnnnnnnnnnnnnnnnnnnnnnnnnnnnnnnnnnnnnnnnnnnnnnnnnnnnnnnnnnnnnnnnnnnnnnnnnnnnnnnnnnnnnnnnnnnnnnnnnnnnnnnnnnnnnnnnnnnnnnnnnnnnnnnnnnnnnnnnnnnnnnnnnnnnnnnnnnnnnnnnnnnnnnnnnnnnnnnnnnnnnnnnnnnnnnnnnnnnnnnnnnnnnnnnnnnnnnnnnnnnnnnnnnnnnnnnnnnnnnnnnnnnnnnnnnnnnnnnnnnnnnnnnnnnnnnnnnnnnnnnnnnnnnnnnnnnnnnnnnnnnnnnnnnnnnnnnnnnnnnnnnnnnnnnnnnnnnnnnnnnnnnnnnnnnnnnnnnnnnnnnnnnnnnnnnnnnnnnnnnnnnnnnnnnnnnnnnnnnnnnnnnnnnnnnnnnnnnnnnnnnnnnnnnnnnnnnnnnnnnnnnnnnnnnnnnnnnnnnnnnnnnnnnnnnnnnnnnnnnnnnnnnnnnnnnnnnnnnnnnnnnnnnnnnnnnnnnnnnnnnnnnnnnnnnnnnnnnnnnnnnnnnnnnnnnnnnnnnnnnnnnnnnnnnnnnnnnnnnnnnnnnnnnnnnnnnnnnnnnnnnnnnnnnnnnnnnnnnnnnnnnnnnnnnnnnnnnnnnnnnnnnnnnnnnnnnnnnnnnnnnnnnnnnnnnnnnnnnnnnnnnnnnnnnnnnnnnnnnnnnnnnnnnnnnnnnnnnnnnnnnnnnnnnnnnnnnnnnnnnnnnnnnnnnnnnnnnnnnnnnnnnnnnnnnnnnnnnnnnnnnnnnnnnnnnnnnnnnnnnnnnnnnnnnnnnnnnnnnnnnnnnnnnnnnnnnnnnnnnnnnnnnnnnnnnnnnnnnnnnnnnnnnnnnnnnnnnnnnnnnnnnnnnnnnnnnnnnnnnnnnnnnnnnnnnnnnnnnnnnnnnnnnnnnnnnnnnnnnnnnnnnnnnnnnnnnnnnnnnnnnnnnnnnnnnnnnnnnnnnnnnnnnnnnnnnnnnnnnnnnnnnnnnnnnnnnnnnnnnnnnnnnnnnnnnnnnnnnnnnnnnnnnnnnnnnnnnnnnnnnnnnnnnnnnnnnnnnnnnnnnnnnnnnnnnnnnnnnnnnnnnnnnnnnnnnnnnnnnnnnnnnnnnnnnnnnnnnnnnnnnnnnnnnnnnnnnnnnnnnnnnnnnnnnnnnnnnnnnnnnnnnnnnnnnnnnnnnnnnnnnnnnnnnnnnnnnnnnnnnnnnnnnnnnnnnnnnnnnnnnnnnnnnnnnnnnnnnnnnnnnnnnnnnnnnnnnnnnnnnnnnnnnnnnnnnnnnnnnnnnnnnnnnnnnnnnnnnnnnnnnnnnnnnnnnnnnnnnnnnnnnnnnnnnnnnnnnnnnnnnnnnnnnnnnnnnnnnnnnnnnnnnnnnnnnnnnnnnnnnnnnnnnnnnnnnnnnnnnnnnnnnnnnnnnnnnnnnnnnnnnnnnnnnnnnnnnnnnnnnnnnnnnnnnnnnnnnnnnnnnnnnnnnnnnnnnnnnnnnnnnnnnnnnnnnnnnnnnnnnnnnnnnnnnnnnnnnnnnnnnnnnnnnnnnnnnnnnnnnnnnnnnnnnnnnnnnnnnnnnnnnnnnnnnnnnnnnnnnnnnnnnnnnnnnnnnnnnnnnnnnnnnnnnnnnnnnnnnnnnnnnnnnnnnnnnnnnnnnnnnnnnnnnnnnnnnnnnnnnnnnnnnnnnnnnnnnnnnnnnnnnnnnnnnnnnnnnnnnnnnnnnnnnnnnnnnnnnnnnnnnnnnnnnnnnnnnnnnnnnnnnnnnnnnnnnnnnnnnnnnnnncgaatttctatcaaaaactcaaagtgcatttgagtagcccgactgcgcccctgctgcttgagggtgcaacgggcttgggcaaaacaagagcgtacttagcagcgattgctgacgcagtcgctaacggaaagcgtgtcgcacttgtactgcctacacacatgttgatagagcaactgctgaagtcttcagatgttgaagcagttgtaccaaaatcagtcacgattcaagcgtttttgccgagaagtcgctttgagtccaaacaagaatacgcagctcacaaagagtcagcacgatctgctcaaatcatgctttgcaccagtgcttcagtgatgattgatcaacgcttgcgtggtgaatacaacggttcaacgatccgagattttataatctttgacgaagctgatcagttgcctgaagcagcagcactgcaatcggactgcgagatcacaggcaaagagctagctgaactcggcatcaaagcaatttcagtaaagcaagcagcaactgaagtgctttcaaaacgagatgtgcctcaagaaatcagagcgatagctatgctgattcttgaagagatcggagagcctgtttggtacaaaagcatccgcatcacgcatgacggcggcatcatgctctatcacaagttgccagggcgactgctgaagcgcatcgcaaatcaatcaaatgtatcgttcatatcagcgactctgagcatcggtggaacatttgatgatttcaaacgctctatgggcataagtcatcaaagctcattgtcaggaatcgttgagcccaagcagcacggatcacttcagtttcatgtcgctgacttagaggtgaactctcaagaatggcttgcagcggttctcaaatcaattgctgaagcaccgaagccttgtctcgttgtgacgcctagtcatgatcttgctgaaacacttttccctttgacgcatcaaagcattttccgaacaagagatgaaacaacttcagaagcagcatcaagacttggcgcttgcgaaactctgatcgctgctggtgcatgggcagggctagacacaccgattcagtgggcgagcattgttgtgccgagaattccgtacgagagacccattgttctagatgatcaaattgaaagcagttttcttcacacaagaaatactgcgatcagaagaatgcggcaagtgatcgggcgtgggctcagaacacctgaggcacgctgcaaaatcttcatccttgacgggcgctacaagaatattgagtcgttcataccgcaacgctttcagcagcagtggaaagacaagggtgtgcttgaaggcaagaggtacgaagtgacgctttctaaggcagaacgagacccttcggttcgcagaaaagcactctcgcattatggtaaaaaatgtatcgtttgcgagtttcagcccaaagtggacagtcaacttgaggtgcatcacttgtttccgcttgcgaacggtggtgagcgtgtgacatcaatctcagatgtcaccgtcctctgtgcaaactgtcatcggttagcgcattcaacgggagctgagcccttgagtgttgaacaaatgagggcgttgagtgtgccagaagcgcagtgacagttttggttggtttcagaggtattcagacggaaaccagttagatgttcattgccatgattgacttcaagacactacacttcaaaagccgccgacacggaagtgattcttcaaggctcatctgagattttgagccacgcaacttggcatcacaatcgctggatcaccgcaatgattctcaaaaaatcattaaagatttgcctcttcatcgcagcgattgcgacgctaggcagttgcgcaacgcctcagcagagagctatagcagcgcactgtgatgcagagggtctcagagcggttcctcagcagctgattgttcagcaagtgatgcgccccatctacatgggagagcgtacgattggcagtcggaacaaatgcaagacagaaacaaaggtgtcaaagaacaagcagggtgacacggtttcaacgagagaaacaacttgtgttgatgaaccgatcactgaagctgtgtacaagaatcaactcgtgaacgaaacggtagatttaaatggacagtctcggcaaaactttgtcagagtctgtgttgctgacgcactcgcaaaaggtatgtattcgcatttgaagtagtttgatttcggttttcggagagtttggggcgaccttggtgatccgaaacggggtgccgcattgttagagcgaagtcgcagattattaaataaatagatccatatgcgtagaggattaagcgacatgtcagattttcccgatttttacagcaattatttaaacagagcgaagaccgtaaaagataccgaactactcggtttacttgactgctatgttcttaactttagatttgcaggtaatttggcaacacttaaagtgaaaggagacgatttagtcgcctatgttttcgtttcaagagttgtgttcgcatacaaagcatatgaagcggtacgcaaggcatcggaaatcgttgaaagaaatacaggcatagaaagcccgttaatccgaagaggggtaagaaagggttcactgggtaatagacttgcaaccaacgaagcaatggcacaatatcttgtgagtcaatgcaccgatcctgagattcacgataaattaaatttattttatacagatgtgtcgcccgactgttctatcatcgctgaggcgctgacaaaagttttcactcatgtaagttttacccctgctttaataaatgcaagagattcaaaacacagattaacgctcaaaaaactcgcagacgaactgctggttgtttcggatagtctttggtttactgctgtaggttccttgggacattcttcttaatttatttttaatgaatgttgagttttagttttctactctgcatatatttttcgtgacaaaggcttcaaacgcacatacacagcataattagccattaagatttggaagagtgaacgatatgagtctcatacccattcctgaagataacaggtatagcaacaccgctggcttcgtttacatcttgtcaaatccatcaatgccagggatcttaaagattggttcaacagagcgcactgttaaagagcgagttgcagagctatcggcgacgacgggcgtaccgacaccatttcgtgtggagcactatatccttaccgaagatccaaaaggcttagaacagtctttacatgaggagctgtcagagttccgagtgaacgggaatcgtgaattctttaaagtctcggtagatgagcttctgaaaaaatacagggaattgcgggttcaagaaatggtctcagaaatgcagctacttgatgaagatcaacttgagagtatctttggtgagctgaattggttgtacccaaataatccgacgcttcaaagtatcggcgaaaggagcaagtcagagatcgttgaagccttgctgagtctgagtgacgttatacttattgatgtaatccagcagatatttagaaagcgaccttccgtttggaagcaaatgtgatcaactctgctttctgcaaatgtatgagctttgtcccatgcatctagagtcatctcttccaatacgcaggtcggttgttccagcacttcgtcttgattttttcgtagccgtgatttcgcagcgtgcttgcgaaaagtctgctgatgcctttgctgtcgtaagctgagtcatcatgaaagtatgtctgaaagtgcccgattgcgtctgtgccgaacgagtttgcgattagccaatatttcggcttcactctcaaaatgacgtcttcaagatgctcaacaggtcgttcaaaatgttcaaagtattctgaagcgaagacgagatcagctttctgtttcgtgtgagatgacgctactttgaagccagcagctttgcccaagcgagacgcaagtttcgcttgcacagtgcctggaagattcgtgcccgtcactgtcgcatgtgaaaagatttctttcaacgcagctgttgtgtaaccaaatccacagcctaggtccaagactgaattcgtttgaatgtctgaaacaatgctcttgttgaaaagacttgagtctttgctgatgtctcgcagatagcgtcttgagtagcgaatccaacagagccacaattcacaaacgtagtaagtgtcagagtagactgaaaagtcaggcttcttgcccttcaatgagcgagaccagcgattcttgagatcagcgatccgcttgaggtgcttcggattgaactcacgaccatcatgcgcttgaatatgactcgttgcgatttgaagagctaaatctgtgtcaatttcagtgacagtcgcacaatcgctgaggaactgaatcaggtctgcttttgagatcctgtcaagcatcggcatgtttgggctcactgtcttctgagggttggaagcgcctcaggttattcctagccaatgatttcggttttgcgtgtaaaacctattcttttttcggatactaatgtattcgcctttgagaagtaggtcgtaatgcaactgaatgggtttgggatccttctattcaggaggtttttctcgtgctgccttcgccgcagctcttgcctcttgtctcgcagctcgctccg

SEQ ID NO: 107 - DNA, 14617 bp, Artificial Sequence; identical to SEQ ID NO: 106
  Synthetic Oligonucleotide
  misc_feature (1)..(9997): n is a, c, g, or t

SEQ ID NO: 108 - DNA, 14493 bp, Artificial Sequence
  Synthetic Oligonucleotide
  misc_feature (1)..(9891): n is a, c, g, or t
nnnnnnnnnnnnnnnnnnnnnnnnnnnnnnnnnnnnnnnnnnnnnnnnnnnnnnnnnnnnnnnnnnnnnnnnnnnnnnnnnnnnnnnnnnnnnnnnnnnnnnnnnnnnnnnnnnnnnnnnnnnnnnnnnnnnnnnnnnnnnnnnnnnnnnnnnnnnnnnnnnnnnnnnnnnnnnnnnnnnnnnnnnnnnnnnnnnnnnnnnnnnnnnnnnnnnnnnnnnnnnnnnnnnnnnnnnnnnnnnnnnnnnnnnnnnnnnnnnnnnnnnnnnnnnnnnnnnnnnnnnnnnnnnnnnnnnnnnnnnnnnnnnnnnnnnnnnnnnnnnnnnnnnnnnnnnnnnnnnnnnnnnnnnnnnnnnnnnnnnnnnnnnnnnnnnnnnnnnnnnnnnnnnnnnnnnnnnnnnnnnnnnnnnnnnnnnnnnnnnnnnnnnnnnnnnnnnnnnnnnnnnnnnnnnnnnnnnnnnnnnnnnnnnnnnnnnnnnnnnnnnnnnnnnnnnnnnnnnnnnnnnnnnnnnnnnnnnnnnnnnnnnnnnnnnnnnnnnnnnnnnnnnnnnnnnnnnnnnnnnnnnnnnnnnnnnnnnnnnnnnnnnnnnnnnnnnnnnnnnnnnnnnnnnnnnnnnnnnnnnnnnnnnnnnnnnnnnnnnnnnnnnnnnnnnnnnnnnnnnnnnnnnnnnnnnnnnnnnnnnnnnnnnnnnnnnnnnnnnnnnnnnnnnnnnnnnnnnnnnnnnnnnnnnnnnnnnnnnnnnnnnnnnnnnnnnnnnnnnnnnnnnnnnnnnnnnnnnnnnnnnnnnnnnnnnnnnnnnnnnnnnnnnnnnnnnnnnnnnnnnnnnnnnnnnnnnnnnnnnnnnnnnnnnnnnnnnnnnnnnnnnnnnnnnnnnnnnnnnnnnnnnnnnnnnnnnnnnnnnnnnnnnnnnnnnnnnnnnnnnnnnnnnnnnnnnnnnnnnnnnnnnnnnnnnnnnnnnnnnnnnnnnnnnnnnnnnnnnnnnnnnnnnnnnnnnnnnnnnnnnnnnnnnnnnnnnnnnnnnnnnnnnnnnnnnnnnnnnnnnnnnnnnnnnnnnnnnnnnnnnnnnnnnnnnnnnnnnnnnnnnnnnnnnnnnnnnnnnnnnnnnnnnnnnnnnnnnnnnnnnnnnnnnnnnnnnnnnnnnnnnnnnnnnnnnnnnnnnnnnnnnnnnnnnnnnnnnnnnnnnnnnnnnnnnnnnnnnnnnnnnnnnnnnnnnnnnnnnnnnnnnnnnnnnnnnnnnnnnnnnnnnnnnnnnnnnnnnnnnnnnnnnnnnnnnnnnnnnnnnnnnnnnnnnnnnnnnnnnnnnnnnnnnnnnnnnnnnnnnnnnnnnnnnnnnnnnnnnnnnnnnnnnnnnnnnnnnnnnnnnnnnnnnnnnnnnnnnnnnnnnnnnnnnnnnnnnnnnnnnnnnnnnnnnnnnnnnnnnnnnnnnnnnnnnnnnnnnnnnnnnnnnnnnnnnnnnnnnnnnnnnnnnnnnnnnnnnnnnnnnnnnnnnnnnnnnnnnnnnnnnnnnnnnnnnnnnnnnnnnnnnnnnnnnnnnnnnnnnnnnnnnnnnnnnnnnnnnnnnnnnnnnnnnnnnnnnnnnnnnnnnnnnnnnnnnnnnnnnnnnnnnnnnnnnnnnnnnnnnnnnnnnnnnnnnnnnnnnnnnnnnnnnnnnnnnnnnnnnnnnnnnnnnnnnnnnnnnnnnnnnnnnnnnnnnnnnnnnnnnnnnnnnnnnnnnnnnnnnnnnnnnnnnnnnnnnnnnnnnnnnnnnnnnnnnnnnnnnnnnnnnnnnnnnnnnnnnnnnnnnnnnnnnnnnnnnnnnnnnnnnnnnnnnnnnnnnnnnnnnnnnnnnnnnnnnnnnnnnnnnnnnnnnnnnnnnnnnnnnnnnnnnnnnnnnnnnnnnnnnnnnnnnnnnnnnnnnnnnnnnnnnnnnnnnnnnnnnnnnnnnnnnnnnnnnnnnnnnnnnnnnnnnnnnnnnnnnnnnnnnnnnnnnnnnnnnnnnnnnnnnnnnnnnnnnnnnnnnnnnnnnnnnnnnnnnnnnnnnnnnnnnnnnnnnnnnnnnnnnnnnnnnnnnnnnnnnnnnnnnnnnnnnnnnnnnnnnnnnnnnnnnnnnnnnnnnnnnnnnnnnnnnnnnnnnnnnnnnnnnnnnnnnnnnnnnnnnnnnnnnnnnnnnnnnnnnnnnnnnnnnnnnnnnnnnnnnnnnnnnnnnnnnnnnnnnnnnnnnnnnnnnnnnnnnnnnnnnnnnnnnnnnnnnnnnnnnnnnnnnnnnnnnnnnnnnnnnnnnnnnnnnnnnnnnnnnnnnnnnnnnnnnnnnnnnnnnnnnnnnnnnnnnnnnnnnnnnnnnnnnnnnnnnnnnnnnnnnnnnnnnnnnnnnnnnnnnnnnnnnnnnnnnnnnnnnnnnnnnnnnnnnnnnnnnnnnnnnnnnnnnnnnnnnnnnnnnnnnnnnnnnnnnnnnnnnnnnnnnnnnnnnnnnnnnnnnnnnnnnnnnnnnnnnnnnnnnnnnnnnnnnnnnnnnnnnnnnnnnnnnnnnnnnnnnnnnnnnnnnnnnnnnnnnnnnnnnnnnnnnnnnnnnnnnnnnnnnnnnnnnnnnnnnnnnnnnnnnnnnnnnnnnnnnnnnnnnnnnnnnnnnnnnnnnnnnnnnnnnnnnnnnnnnnnnnnnnnnnnnnnnnnnnnnnnnnnnnnnnnnnnnnnnnnnnnnnnnnnnnnnnnnnnnnnnnnnnnnnnnnnnnnnnnnnnnnnnnnnnnnnnnnnnnnnnnnnnnnnnnnnnnnnnnnnnnnnnnnnnnnnnnnnnnnnnnnnnnnnnnnnnnnnnnnnnnnnnnnnnnnnnnnnnnnnnnnnnnnnnnnnnnnnnnnnnnnnnnnnnnnnnnnnnnnnnnnnnnnnnnnnnnnnnnnnnnnnnnnnnnnnnnnnnnnnnnnnnnnnnnnnnnnnnnnnnnnnnnnnnnnnnnnnnnnnnnnnnnnnnnnnnnnnnnnnnnnnnnnnnnnnnnnnnnnnnnnnnnnnnnnnnnnnnnnnnnnnnnnnnnnnnnnnnnnnnnnnnnnnnnnnnnnnnnnnnnnnnnnnnnnnnnnnnnnnnnnnnnnnnnnnnnnnnnnnnnnnnnnnnnnnnnnnnnnnnnnnnnnnnnnnnnnnnnnnnnnnnnnnnnnnnnnnnnnnnnnnnnnnnnnnnnnnnnnnnnnnnnnnnnnnnnnnnnnnnnnnnnnnnnnnnnnnnnnnnnnnnnnnnnnnnnnnnnnnnnnnnnnnnnnnnnnnnnnnnnnnnnnnnnnnnnnnnnnnnnnnnnnnnnnnnnnnnnnnnnnnnnnnnnnnnnnnnnnnnnnnnnnnnnnnnnnnnnnnnnnnnnnnnnnnnnnnnnnnnnnnnnnnnnnnnnnnnnnnnnnnnnnnnnnnnnnnnnnnnnnnnnnnnnnnnnnnnnnnnnnnnnnnnnnnnnnnnnnnnnnnnnnnnnnnnnnnnnnnnnnnnnnnnnnnnnnnnnnnnnnnnnnnnnnnnnnnnnnnnnnnnnnnnnnnnnnnnnnnnnnnnnnnnnnnnnnnnnnnnnnnnnnnnnnnnnnnnnnnnnnnnnnnnnnnnnnnnnnnnnnnnnnnnnnnnnnnnnnnnnnnnnnnnnnnnnnnnnnnnnnnnnnnnnnnnnnnnnnnnnnnnnnnnnnnnnnnnnnnnnnnnnnnnnnnnnnnnnnnnnnnnnnnnnnnnnnnnnnnnnnnnnnnnnnnnnnnnnnnnnnnnnnnnnnnnnnnnnnnnnnnnnnnnnnnnnnnnnnnnnnnnnnnnnnnnnnnnnnnnnnnnnnnnnnnnnnnnnnnnnnnnnnnnnnnnnnnnnnnnnnnnnnnnnnnnnnnnnnnnnnnnnnnnnnnnnnnnnnnnnnnnnnnnnnnnnnnnnnnnnnnnnnnnnnnnnnnnnnnnnnnnnnnnnnnnnnnnnnnnnnnnnnnnnnnnnnnnnnnnnnnnnnnnnnnnnnnnnnnnnnnnnnnnnnnnnnnnnnnnnnnnnnnnnnnnnnnnnnnnnnnnnnnnnnnnnnnnnnnnnnnnnnnnnnnnnnnnnnnnnnnnnnnnnnnnnnnnnnnnnnnnnnnnnnnnnnnnnnnnnnnnnnnnnnnnnnnnnnnnnnnnnnnnnnnnnnnnnnnnnnnnnnnnnnnnnnnnnnnnnnnnnnnnnnnnnnnnnnnnnnnnnnnnnnnnnnnnnnnnnnnnnnnnnnnnnnnnnnnnnnnnnnnnnnnnnnnnnnnnnnnnnnnnnnnnnnnnnnnnnnnnnnnnnnnnnnnnnnnnnnnnnnnnnnnnnnnnnnnnnnnnnnnnnnnnnnnnnnnnnnnnnnnnnnnnnnnnnnnnnnnnnnnnnnnnnnnnnnnnnnnnnnnnnnnnnnnnnnnnnnnnnnnnnnnnnnnnnnnnnnnnnnnnnnnnnnnnnnnnnnnnnnnnnnnnnnnnnnnnnnnnnnnnnnnnnnnnnnnnnnnnnnnnnnnnnnnnnnnnnnnnnnnnnnnnnnnnnnnnnnnnnnnnnnnnnnnnnnnnnnnnnnnnnnnnnnnnnnnnnnnnnnnnnnnnnnnnnnnnnnnnnnnnnnnnnnnnnnnnnnnnnnnnnnnnnnnnnnnnnnnnnnnnnnnnnnnnnnnnnnnnnnnnnnnnnnnnnnnnnnnnnnnnnnnnnnnnnnnnnnnnnnnnnnnnnnnnnnnnnnnnnnnnnnnnnnnnnnnnnnnnnnnnnnnnnnnnnnnnnnnnnnnnnnnnnnnnnnnnnnnnnnnnnnnnnnnnnnnnnnnnnnnnnnnnnnnnnnnnnnnnnnnnnnnnnnnnnnnnnnnnnnnnnnnnnnnnnnnnnnnnnnnnnnnnnnnnnnnnnnnnnnnnnnnnnnnnnnnnnnnnnnnnnnnnnnnnnnnnnnnnnnnnnnnnnnnnnnnnnnnnnnnnnnnnnnnnnnnnnnnnnnnnnnnnnnnnnnnnnnnnnnnnnnnnnnnnnnnnnnnnnnnnnnnnnnnnnnnnnnnnnnnnnnnnnnnnnnnnnnnnnnnnnnnnnnnnnnnnnnnnnnnnnnnnnnnnnnnnnnnnnnnnnnnnnnnnnnnnnnnnnnnnnnnnnnnnnnnnnnnnnnnnnnnnnnnnnnnnnnnnnnnnnnnnnnnnnnnnnnnnnnnnnnnnnnnnnnnnnnnnnnnnnnnnnnnnnnnnnnnnnnnnnnnnnnnnnnnnnnnnnnnnnnnnnnnnnnnnnnnnnnnnnnnnnnnnnnnnnnnnnnnnnnnnnnnnnnnnnnnnnnnnnnnnnnnnnnnnnnnnnnnnnnnnnnnnnnnnnnnnnnnnnnnnnnnnnnnnnnnnnnnnnnnnnnnnnnnnnnnnnnnnnnnnnnnnnnnnnnnnnnnnnnnnnnnnnnnnnnnnnnnnnnnnnnnnnnnnnnnnnnnnnnnnnnnnnnnnnnnnnnnnnnnnnnnnnnnnnnnnnnnnnnnnnnnnnnnnnnnnnnnnnnnnnnnnnnnnnnnnnnnnnnnnnnnnnnnnnnnnnnnnnnnnnnnnnnnnnnnnnnnnnnnnnnnnnnnnnnnnnnnnnnnnnnnnnnnnnnnnnnnnnnnnnnnnnnnnnnnnnnnnnnnnnnnnnnnnnnnnnnnnnnnnnnnnnnnnnnnnnnnnnnnnnnnnnnnnnnnnnnnnnnnnnnnnnnnnnnnnnnnnnnnnnnnnnnnnnnnnnnnnnnnnnnnnnnnnnnnnnnnnnnnnnnnnnnnnnnnnnnnnnnnnnnnnnnnnnnnnnnnnnnnnnnnnnnnnnnnnnnnnnnnnnnnnnnnnnnnnnnnnnnnnnnnnnnnnnnnnnnnnnnnnnnnnnnnnnnnnnnnnnnnnnnnnnnnnnnnnnnnnnnnnnnnnnnnnnnnnnnnnnnnnnnnnnnnnnnnnnnnnnnnnnnnnnnnnnnnnnnnnnnnnnnnnnnnnnnnnnnnnnnnnnnnnnnnnnnnnnnnnnnnnnnnnnnnnnnnnnnnnnnnnnnnnnnnnnnnnnnnnnnnnnnnnnnnnnnnnnnnnnnnnnnnnnnnnnnnnnnnnnnnnnnnnnnnnnnnnnnnnnnnnnnnnnnnnnnnnnnnnnnnnnnnnnnnnnnnnnnnnnnnnnnnnnnnnnnnnnnnnnnnnnnnnnnnnnnnnnnnnnnnnnnnnnnnnnnnnnnnnnnnnnnnnnnnnnnnnnnnnnnnnnnnnnnnnnnnnnnnnnnnnnnnnnnnnnnnnnnnnnnnnnnnnnnnnnnnnnnnnnnnnnnnnnnnnnnnnnnnnnnnnnnnnnnnnnnnnnnnnnnnnnnnnnnnnnnnnnnnnnnnnnnnnnnnnnnnnnnnnnnnnnnnnnnnnnnnnnnnnnnnnnnnnnnnnnnnnnnnnnnnnnnnnnnnnnnnnnnnnnnnnnnnnnnnnnnnnnnnnnnnnnnnnnnnnnnnnnnnnnnnnnnnnnnnnnnnnnnnnnnnnnnnnnnnnnnnnnnnnnnnnnnnnnnnnnnnnnnnnnnnnnnnnnnnnnnnnnnnnnnnnnnnnnnnnnnnnnnnnnnnnnnnnnnnnnnnnnnnnnnnnnnnnnnnnnnnnnnnnnnnnnnnnnnnnnnnnnnnnnnnnnnnnnnnnnnnnnnnnnnnnnnnnnnnnnnnnnnnnnnnnnnnnnnnnnnnnnnnnnnnnnnnnnnnnnnnnnnnnnnnnnnnnnnnnnnnnnnnnnnnnnnnnnnnnnnnnnnnnnnnnnnnnnnnnnnnnnnnnnnnnnnnnnnnnnnnnnnnnnnnnnnnnnnnnnnnnnnnnnnnnnnnnnnnnnnnnnnnnnnnnnnnnnnnnnnnnnnnnnnnnnnnnnnnnnnnnnnnnnnnnnnnnnnnnnnnnnnnnnnnnnnnnnnnnnnnnnnnnnnnnnnnnnnnnnnnnnnnnnnnnnnnnnnnnnnnnnnnnnnnnnnnnnnnnnnnnnnnnnnnnnnnnnnnnnnnnnnnnnnnnnnnnnnnnnnnnnnnnnnnnnnnnnnnnnnnnnnnnnnnnnnnnnnnnnnnnnnnnnnnnnnnnnnnnnnnnnnnnnnnnnnnnnnnnnnnnnnnnnnnnnnnnnnnnnnnnnnnnnnnnnnnnnnnnnnnnnnnnnnnnnnnnnnnnnnnnnnnnnnnnnnnnnnnnnnnnnnnnnnnnnnnnnnnnnnnnnnnnnnnnnnnnnnnnnnnnnnnnnnnnnnnnnnnnnnnnnnnnnnnnnnnnnnnnnnnnnnnnnnnnnnnnnnnnnnnnnnnnnnnnnnnnnnnnnnnnnnnnnnnnnnnnnnnnnnnnnnnnnnnnnnnnnnnnnnnnnnnnnnnnnnnnnnnnnnnnnnnnnnnnnnnnnnnnnnnnnnnnnnnnnnnnnnnnnnnnnnnnnnnnnnnnnnnnnnnnnnnnnnnnnnnnnnnnnnnnnnnnnnnnnnnnnnnnnnnnnnnnnnnnnnnnnnnnnnnnnnnnnnnnnnnnnnnnnnnnnnnnnnnnnnnnnnnnnnnnnnnnnnnnnnnnnnnnnnnnnnnnnnnnnnnnnnnnnnnnnnnnnnnnnnnnnnnnnnnnnnnnnnnnnnnnnnnnnnnnnnnnnnnnnnnnnnnnnnnnnnnnnnnnnnnnnnnnnnnnnnnnnnnnnnnnnnnnnnnnnnnnnnnnnnnnnnnnnnnnnnnnnnnnnnnnnnnnnnnnnnnnnnnnnnnnnnnnnnnnnnnnnnnnnnnnnnnnnnnnnnnnnnnnnnnnnnnnnnnnnnnnnnnnnnnnnnnnnnnnnnnnnnnnnnnnnnnnnnnnnnnnnnnnnnnnnnnnnnnnnnnnnnnnnnnnnnnnnnnnnnnnnnnnnnnnnnnnnnnnnnnnnnnnnnnnnnnnnnnnnnnnnnnnnnnnnnnnnnnnnnnnnnnnnnnnnnnnnnnnnnnnnnnnnnnnnnnnnnnnnnnnnnnnnnnnnnnnnnnnnnnnnnnnnnnnnnnnnnnnnnnnnnnnnnnnnnnnnnnnnnnnnnnnnnnnnnnnnnnnnnnnnnnnnnnnnnnnnnnnnnnnnnnnnnnnnnnnnnnnnnnnnnnnnnnnnnnnnnnnnnnnnnnnnnnnnnnnnnnnnnnnnnnnnnnnnnnnnnnnnnnnnnnnnnnnnnnnnnnnnnnnnnnnnnnnnnnnnnnnnnnnnnnnnnnnnnnnnnnnnnnnnnnnnnnnnnnnnnnnnnnnnnnnnnnnnnnnnnnnnnnnnnnnnnnnnnnnnnnnnnnnnnnnnnnnnnnnnnnnnnnnnnnnnnnnnnnnnnnnnnnnnnnnnnnnnnnnnnnnnnnnnnnnnnnnnnnnnnnnnnnnnnnnnnnnnnnnnnnnnnnnnnnnnnnnnnnnnnnnnnnnnnnnnnnnnnnnnnnnnnnnnnnnnnnnnnnnnnnnnnnnnnnnnnnnnnnnnnnnnnnnnnnnnnnnnnnnnnnnnnnnnnnnnnnnnnnnnnnnnnnnnnnnnnnnnnnnnnnnnnnnnnnnnnnnnnnnnnnnnnnnnnnnnnnnnnnnnnnnnnnnnnnnnnnnnnnnnnnnnnnnnnnnnnnnnnnnnnnnnnnnnnnnnnnnnnnnnnnnnnnnnnnnnnnnnnnnnnnnnnnnnnnnnnnnnnnnnnnnnnnnnnnnnnnnnnnnnnnnnnnnnnnnnnnnnnnnnnnnnnnnnnnnnnnnnnnnnnnnnnnnnnnnnnnnnnnnnnnnnnnnnnnnnnnnnnnnnnnnnnnnnnnnnnnnnnnnnnnnnnnnnnnnnnnnnnnnnnnnnnnnnnnnnnnnnnnnnnnnnnnnnnnnnnnnnnnnnnnnnnnnnnnnnnnnnnnnnnnnnnnnnnnnnnnnnnnnnnnnnnnnnnnnnnnnnnnnnnnnnnnnnnnnnnnnnnnnnnnnnnnnnnnnnnnnnnnnnnnnnnnnnnnnnnnnnnnnnnnnnnnnnnnnnnnnnnnnnnnnnnnnnnnnnnnnnnnnnnnnnnnnnnnnnnnnnnnnnnnnnnnnnnnnnnnnnnnnnnnnnnnnnnnnnnnnnnnnnnnnnnnnnnnnnnnnnnnnnnnnnnnnnnnnnnnnnnnnnnnnnnnnnnnnnnnnnnnnnnnnnnnnnnnnnnnnnnnnnnnnnnnnnnnnnnnnnnnnnnnnnnnnnnnnnnnnnnnnnnnnnnnnnnnnnnnnnnnnnnnnnnnnnnnnnnnnnnnnnnnnnnnnnnnnnnnnnnnnnnnnnnnnnnnnnnnnnnnnnnnnnnnnnnnnnnnnnnnnnnnnnnnnnnnnnnnnnnnnnnnnnnnnnnnnnnnnnnnnnnnnnnnnnnnnnnnnnnnnnnnnnnnnnnnnnnnnnnnnnnnnnnnnnnnnnnnnnnnnnnnnnnnnnnnnnnnnnnnnnnnnnnnnnnnnnnnnnnnnnnnnnnnnnnnnnnnnnnnnnnnnnnnnnnnnnnnnnnnnnnnnnnnnnnnnnnnnnnnnnnnnnnnnnnnnnnnnnnnnnnnnnnnnnnnnnnnnnnnnnnnnnnnnnnnnnnnnnnnnnnnnnnnnnnnnnnnnnnnnnnnnnnnnnnnnnnnnnnnnnnnnnnnnnnnnnnnnnnnnnnnnnnnnnnnnnnnnnnnnnnnnnnnnnnnnnnnnnnnnnnnnnnnnnnnnnnnnnnnnnnnnnnnnnnnnnnnnnnnnnnnnnnnnnnnnnnnnnnnnnnnnnnnnnnnnnnnnnnnnnnnnnnnnnnnnnnnnnnnnnnnnnnnnnnnnnnnnnnnnnnnnnnnnnnnnnnnnnnnnnnnnnnnnnnnnnnnnnnnnnnnnnnnnnnnnnnnnnnnnnnnnnnnnnnnnnnnnnnnnnnnnnnnnnnnnnnnnnnnnnnnnnnnnnnnnnnnnnnnnnnnnnnnnnnnnnnnnnnnnnnnnnnnnnnnnnnnnnnnnnnnnnnnnnnnnnnnnnnnnnnnnnnnnnnnnnnnnnnnnnnnnnnnnnnnnnnnnnnnnnnnnnnnnnnnnnnnnnnnnnnnnnnnnnnnnnnnnnnnnnnnnnnnnnnnnnnnnnnnnnnnnnnnnnnnnnnnnnnnnnnnnnnnnnnnnnnnnnnnntattggaagtcaccgcgctcgtagcctcaagccacgctgtaaatgcgtggttactggaactcgccgtattggaagtcaccgcgctcgtagcctcaagccacgctgtaaatgcgtggttactacttttttgatagctgcttgtatggaaatcgtaggggtaacccttgtggttaccctatcacacgaatccctcaaacagggcaaccacgagggttgcccctacgtgtatctctatcagtcacattttttataaaaatgatgtttcgctcccccgaacaaaaatactttcacgatgtgctgtgtaaacacatccaccagcccgatgcaccgctcctgctagaaggcggcgtaggactgggaaagacgcgggcgtatttggcggcgttggcgcaaacttcgcacacggtggcgctggtgttgcccacgcaccagcttatcgaccaactgcttgccagtaccgatttagccgctacgggtttgtcgattgccgtttttcgccccgcccgtttgctggaaacccatgccgattaccaaaaacagcgcgaggcggcgcgtgcggcacgggtgatgctctgcacggctgccagtgtggtgattgaccagcgtttgcaaggcgaataccacggtgctacgcggcgggatatgctgatttttgacgaagccgaccagcttcccgatatggcggcgctgcaaagtgattgcgtgattgaagccagtttgctgcaaaaccagccgcttgccgtggcgctggaacgcattagcacgacttcatcccgacacattgccgccgaacaaaaagccgccgcgcgggtgatgctggaaattttggcagaacccgtgcgctacgcctcggtgggtttggatgaagcgggtaatgccgttttgcaccaccatttacccgcgcggttgatgaagaaaatcagcaatcgcaccagcacggtgtttatttctgccacgctatcgcacgcgggcaagtttgataattttcgccacgcaatggggctggaaaacatcagccgactttccaccagcatggaacccgaacgccacggcacactcgacttcaccttgcacgcgcacgaagtggaaactgaggcatggttcaccgcaaccctgcaaagcattcaaaccgccccgcgcccgactttggtcgtaacgcccagccacgccttaaccgagcgtttacaagccgcagtcggagaacaaaccgacttactcatcaaagccggagcatgggcgggatttgataccccgacgcgctggcgaagcgtgattattccccgtgtgccattcggtgcgcccgtggtggtggatggaaaagcggtgacatcctaccttgacgcgcacgccaccgccagccgccgaatgcgccaagccattgggcgcggaatccgtacaccggatgccgtttgtagcgtgacggttttggatgcacgggcaagcaaactgggggcatttgtgccggaacgcttcacgccccaatgggaacagcgccgcgtgtttgaagaaggcgcaagaatcgaatggacactctccaaagcagagcgtgatgcgggcttgcgtaaagcggctttgaagcattacggcgaaaaatgccagcatccgcaatgcaatgtgacacagccgcatttattggatgtgcatcaccttgacccgattagtgaaggcatccgcaaaaccacattgaaagatgtcaccgtgttgtgtgccaatcaccaccgcgaagcgcattttttgggatttgttagacaatcgcagcatgaacccattgattaaatcccctgaacttctcctccccgctggctctctggacaaaatgcgagccgcttacgattttggcgcagatgccgtgtatgcggggcaaccgcgctacagtttgcgggcgcgtaataacgaatttaagatcgagcaaatcgaaatcggcattcgtgaagcgcatgaacgtggcaaaaaattctttgtcaccagcaatttgctgccgcataacgacaaggttcgcacttatctgcgcgatattgaacccgtcattgcgatgaaacccgatggtctcatcatggccgaccccggtctcatcatgatggtacgcgagggcatggacaaaggcaattatgcggatgtgccaatccacctttccgtgcaagccaacaccgtgaactatatggcggtgaaattttggcaaaaagtgggcgtgaaacgcatcattttgtcgcgcgaattgagcttggacgaaatcgaaaaaatccgccaagaatgccccgatatggagctggaagtattcgtgcatggcgcgttgtgcatcgcgtattcggggcgctgtttgctgtcgggctacttcaatcgccgtgacccgaaccaaggaacgtgtaccaacgcctgccgctggaattacgccacgcagccgagcgcggaaaaccccaatacgggcgaagcgattccggtggcgatggataaaaatttcaacttcaaccaagcgcaagaggaagccgaacaatccttcgcggcgtgcggcggcagtgcgcgtcaccccgaagcggataaagtgtatttgctggaagaagcgggtcgcgcggggcaactcatgccgattatggaagacgagcacggcacgtacatcatgaacagcaaggatttacgcgccattgaacacgttgaacgcttggcgaaaatcggggtggattcgctcaaagtcgaagggcgcaccaagagcttgtactacgtcgcccgcaccgcccaagcctaccgccgcgcgattgatgacgcggtggcaggtcgcgcctttaatccgaatttaatcaccgaattagaaggattggcgaatcgcggattcaccagcggcttcttggaacgccgtccttcgcaggattaccaaaattacgaaaccggacattccgatattggacacagccattttgtgggtgaaattcgcagtattgaaaatggctgggctgaagtcgaagtgaaaaataaattcgaggtcggcgacacgatggaagtcattcaccccagcggcaatcaccgtttcaaactggaaaaaatccacaccctccaaggcgaggaattaaccaacgcgcccggtagcccgtggcaagtgcggattccgttggaagagcggtttaagggagcgttgttggcgcgggttatggcgggtgtgggcggggcagcgaccgcgtaatcaatacgtaatcgtcaacgaatcggcatccacggtgatgaccggtttgcccaaaaccgcactggtggcgcgtgcgaaggtgtgcgcccattcggattcggcaaacttggcagggccagcgccttgggcaaccacgaccacgcgatccgccatgagcaacttgcccgtagcacgcaagggttcgcattcaaaggcgataaattgttcatccagccactcgcgggcttcatcgcggggcatggcttgctcggtggtcaattcaaccgtgatggggtctttgtctttgaaaataacggtaacaaggctgtgcatagtggtttaactccaaaatatcatccccgaatcatagaacgaatttgggggctatcgtacaaatttccaataacgcccttgttggctgtcgatacggtgcagcccaaaacgattgtcggcgcgttgttcattccgaatcaaataaaacaaatccgatagcaccgaacgggtttccgcaaaatacgaatgccccaaaaagctggtatcggttcccgtagcatcaatggtttcaattcccggaacgataatcaaactgctacccgaatcacccgcacgcggattgccatgcacttttttcgatgccatgagcgccttgtctttggacgaagcgtagagggttatggggcgtttggcggcggtgagggcgggggcgatgtcgcgtttgaacacatcggcatcaatatcgggggcggtgaggataatttctttcaatcggctgcgtaccgaaggctggtcgtttagcagcgatgccaccgcccgtgtgagcgcacggttacccatgctgtgggcaatcaaatacacgttttgcgcttgcgaacgggcaaagaaatcttccaaaaaccgccgtagattcgcttgtgtccattcgatattttgctcgtctaccgtgtaacgcgattctcgaccttgtgaaggccagctataaaaaatcgggacaccatcaaaattcaggtcatacgccatttgcgccgaacgccgcgcggcatcttcaaacgtgacgttgtagccgtgaataaaaataaaagcgctgtcctttgccgattttttgatttggttggcgaggttgctaaaaaacgcatctttggcactgatggacgtagtgagcaacataacgtgcttggagggcttcttttgaaactctaaacgccagatggaaggcgattccagctcacccatacggtggtcgcgcgggatgctgacttcgcacactccatagctcaacgcggcacgctgtgtgccaaaaacggcatcgggcttcttactgccagtcacattacggtcagtggcaaaaaaggtttgcacgaccgtgtaattggcattttttgtcacgcccttatcggaatttctatccaccggaacggctgcaccactttgtacgggcatcggcggtggttcgg

SEQ ID NO: 109 - DNA, 14415 bp, Artificial Sequence
  Synthetic Oligonucleotide
  misc_feature (1)..(9597): n is a, c, g, or t
nnnnnnnnnnnnnnnnnnnnnnnnnnnnnnnnnnnnnnnnnnnnnnnnnnnnnnnnnnnnnnnnnnnnnnnnnnnnnnnnnnnnnnnnnnnnnnnnnnnnnnnnnnnnnnnnnnnnnnnnnnnnnnnnnnnnnnnnnnnnnnnnnnnnnnnnnnnnnnnnnnnnnnnnnnnnnnnnnnnnnnnnnnnnnnnnnnnnnnnnnnnnnnnnnnnnnnnnnnnnnnnnnnnnnnnnnnnnnnnnnnnnnnnnnnnnnnnnnnnnnnnnnnnnnnnnnnnnnnnnnnnnnnnnnnnnnnnnnnnnnnnnnnnnnnnnnnnnnnnnnnnnnnnnnnnnnnnnnnnnnnnnnnnnnnnnnnnnnnnnnnnnnnnnnnnnnnnnnnnnnnnnnnnnnnnnnnnnnnnnnnnnnnnnnnnnnnnnnnnnnnnnnnnnnnnnnnnnnnnnnnnnnnnnnnnnnnnnnnnnnnnnnnnnnnnnnnnnnnnnnnnnnnnnnnnnnnnnnnnnnnnnnnnnnnnnnnnnnnnnnnnnnnnnnnnnnnnnnnnnnnnnnnnnnnnnnnnnnnnnnnnnnnnnnnnnnnnnnnnnnnnnnnnnnnnnnnnnnnnnnnnnnnnnnnnnnnnnnnnnnnnnnnnnnnnnnnnnnnnnnnnnnnnnnnnnnnnnnnnnnnnnnnnnnnnnnnnnnnnnnnnnnnnnnnnnnnnnnnnnnnnnnnnnnnnnnnnnnnnnnnnnnnnnnnnnnnnnnnnnnnnnnnnnnnnnnnnnnnnnnnnnnnnnnnnnnnnnnnnnnnnnnnnnnnnnnnnnnnnnnnnnnnnnnnnnnnnnnnnnnnnnnnnnnnnnnnnnnnnnnnnnnnnnnnnnnnnnnnnnnnnnnnnnnnnnnnnnnnnnnnnnnnnnnnnnnnnnnnnnnnnnnnnnnnnnnnnnnnnnnnnnnnnnnnnnnnnnnnnnnnnnnnnnnnnnnnnnnnnnnnnnnnnnnnnnnnnnnnnnnnnnnnnnnnnnnnnnnnnnnnnnnnnnnnnnnnnnnnnnnnnnnnnnnnnnnnnnnnnnnnnnnnnnnnnnnnnnnnnnnnnnnnnnnnnnnnnnnnnnnnnnnnnnnnnnnnnnnnnnnnnnnnnnnnnnnnnnnnnnnnnnnnnnnnnnnnnnnnnnnnnnnnnnnnnnnnnnnnnnnnnnnnnnnnnnnnnnnnnnnnnnnnnnnnnnnnnnnnnnnnnnnnnnnnnnnnnnnnnnnnnnnnnnnnnnnnnnnnnnnnnnnnnnnnnnnnnnnnnnnnnnnnnnnnnnnnnnnnnnnnnnnnnnnnnnnnnnnnnnnnnnnnnnnnnnnnnnnnnnnnnnnnnnnnnnnnnnnnnnnnnnnnnnnnnnnnnnnnnnnnnnnnnnnnnnnnnnnnnnnnnnnnnnnnnnnnnnnnnnnnnnnnnnnnnnnnnnnnnnnnnnnnnnnnnnnnnnnnnnnnnnnnnnnnnnnnnnnnnnnnnnnnnnnnnnnnnnnnnnnnnnnnnnnnnnnnnnnnnnnnnnnnnnnnnnnnnnnnnnnnnnnnnnnnnnnnnnnnnnnnnnnnnnnnnnnnnnnnnnnnnnnnnnnnnnnnnnnnnnnnnnnnnnnnnnnnnnnnnnnnnnnnnnnnnnnnnnnnnnnnnnnnnnnnnnnnnnnnnnnnnnnnnnnnnnnnnnnnnnnnnnnnnnnnnnnnnnnnnnnnnnnnnnnnnnnnnnnnnnnnnnnnnnnnnnnnnnnnnnnnnnnnnnnnnnnnnnnnnnnnnnnnnnnnnnnnnnnnnnnnnnnnnnnnnnnnnnnnnnnnnnnnnnnnnnnnnnnnnnnnnnnnnnnnnnnnnnnnnnnnnnnnnnnnnnnnnnnnnnnnnnnnnnnnnnnnnnnnnnnnnnnnnnnnnnnnnnnnnnnnnnnnnnnnnnnnnnnnnnnnnnnnnnnnnnnnnnnnnnnnnnnnnnnnnnnnnnnnnnnnnnnnnnnnnnnnnnnnnnnnnnnnnnnnnnnnnnnnnnnnnnnnnnnnnnnnnnnnnnnnnnnnnnnnnnnnnnnnnnnnnnnnnnnnnnnnnnnnnnnnnnnnnnnnnnnnnnnnnnnnnnnnnnnnnnnnnnnnnnnnnnnnnnnnnnnnnnnnnnnnnnnnnnnnnnnnnnnnnnnnnnnnnnnnnnnnnnnnnnnnnnnnnnnnnnnnnnnnnnnnnnnnnnnnnnnnnnnnnnnnnnnnnnnnnnnnnnnnnnnnnnnnnnnnnnnnnnnnnnnnnnnnnnnnnnnnnnnnnnnnnnnnnnnnnnnnnnnnnnnnnnnnnnnnnnnnnnnnnnnnnnnnnnnnnnnnnnnnnnnnnnnnnnnnnnnnnnnnnnnnnnnnnnnnnnnnnnnnnnnnnnnnnnnnnnnnnnnnnnnnnnnnnnnnnnnnnnnnnnnnnnnnnnnnnnnnnnnnnnnnnnnnnnnnnnnnnnnnnnnnnnnnnnnnnnnnnnnnnnnnnnnnnnnnnnnnnnnnnnnnnnnnnnnnnnnnnnnnnnnnnnnnnnnnnnnnnnnnnnnnnnnnnnnnnnnnnnnnnnnnnnnnnnnnnnnnnnnnnnnnnnnnnnnnnnnnnnnnnnnnnnnnnnnnnnnnnnnnnnnnnnnnnnnnnnnnnnnnnnnnnnnnnnnnnnnnnnnnnnnnnnnnnnnnnnnnnnnnnnnnnnnnnnnnnnnnnnnnnnnnnnnnnnnnnnnnnnnnnnnnnnnnnnnnnnnnnnnnnnnnnnnnnnnnnnnnnnnnnnnnnnnnnnnnnnnnnnnnnnnnnnnnnnnnnnnnnnnnnnnnnnnnnnnnnnnnnnnnnnnnnnnnnnnnnnnnnnnnnnnnnnnnnnnnnnnnnnnnnnnnnnnnnnnnnnnnnnnnnnnnnnnnnnnnnnnnnnnnnnnnnnnnnnnnnnnnnnnnnnnnnnnnnnnnnnnnnnnnnnnnnnnnnnnnnnnnnnnnnnnnnnnnnnnnnnnnnnnnnnnnnnnnnnnnnnnnnnnnnnnnnnnnnnnnnnnnnnnnnnnnnnnnnnnnnnnnnnnnnnnnnnnnnnnnnnnnnnnnnnnnnnnnnnnnnnnnnnnnnnnnnnnnnnnnnnnnnnnnnnnnnnnnnnnnnnnnnnnnnnnnnnnnnnnnnnnnnnnnnnnnnnnnnnnnnnnnnnnnnnnnnnnnnnnnnnnnnnnnnnnnnnnnnnnnnnnnnnnnnnnnnnnnnnnnnnnnnnnnnnnnnnnnnnnnnnnnnnnnnnnnnnnnnnnnnnnnnnnnnnnnnnnnnnnnnnnnnnnnnnnnnnnnnnnnnnnnnnnnnnnnnnnnnnnnnnnnnnnnnnnnnnnnnnnnnnnnnnnnnnnnnnnnnnnnnnnnnnnnnnnnnnnnnnnnnnnnnnnnnnnnnnnnnnnnnnnnnnnnnnnnnnnnnnnnnnnnnnnnnnnnnnnnnnnnnnnnnnnnnnnnnnnnnnnnnnnnnnnnnnnnnnnnnnnnnnnnnnnnnnnnnnnnnnnnnnnnnnnnnnnnnnnnnnnnnnnnnnnnnnnnnnnnnnnnnnnnnnnnnnnnnnnnnnnnnnnnnnnnnnnnnnnnnnnnnnnnnnnnnnnnnnnnnnnnnnnnnnnnnnnnnnnnnnnnnnnnnnnnnnnnnnnnnnnnnnnnnnnnnnnnnnnnnnnnnnnnnnnnnnnnnnnnnnnnnnnnnnnnnnnnnnnnnnnnnnnnnnnnnnnnnnnnnnnnnnnnnnnnnnnnnnnnnnnnnnnnnnnnnnnnnnnnnnnnnnnnnnnnnnnnnnnnnnnnnnnnnnnnnnnnnnnnnnnnnnnnnnnnnnnnnnnnnnnnnnnnnnnnnnnnnnnnnnnnnnnnnnnnnnnnnnnnnnnnnnnnnnnnnnnnnnnnnnnnnnnnnnnnnnnnnnnnnnnnnnnnnnnnnnnnnnnnnnnnnnnnnnnnnnnnnnnnnnnnnnnnnnnnnnnnnnnnnnnnnnnnnnnnnnnnnnnnnnnnnnnnnnnnnnnnnnnnnnnnnnnnnnnnnnnnnnnnnnnnnnnnnnnnnnnnnnnnnnnnnnnnnnnnnnnnnnnnnnnnnnnnnnnnnnnnnnnnnnnnnnnnnnnnnnnnnnnnnnnnnnnnnnnnnnnnnnnnnnnnnnnnnnnnnnnnnnnnnnnnnnnnnnnnnnnnnnnnnnnnnnnnnnnnnnnnnnnnnnnnnnnnnnnnnnnnnnnnnnnnnnnnnnnnnnnnnnnnnnnnnnnnnnnnnnnnnnnnnnnnnnnnnnnnnnnnnnnnnnnnnnnnnnnnnnnnnnnnnnnnnnnnnnnnnnnnnnnnnnnnnnnnnnnnnnnnnnnnnnnnnnnnnnnnnnnnnnnnnnnnnnnnnnnnnnnnnnnnnnnnnnnnnnnnnnnnnnnnnnnnnnnnnnnnnnnnnnnnnnnnnnnnnnnnnnnnnnnnnnnnnnnnnnnnnnnnnnnnnnnnnnnnnnnnnnnnnnnnnnnnnnnnnnnnnnnnnnnnnnnnnnnnnnnnnnnnnnnnnnnnnnnnnnnnnnnnnnnnnnnnnnnnnnnnnnnnnnnnnnnnnnnnnnnnnnnnnnnnnnnnnnnnnnnnnnnnnnnnnnnnnnnnnnnnnnnnnnnnnnnnnnnnnnnnnnnnnnnnnnnnnnnnnnnnnnnnnnnnnnnnnnnnnnnnnnnnnnnnnnnnnnnnnnnnnnnnnnnnnnnnnnnnnnnnnnnnnnnnnnnnnnnnnnnnnnnnnnnnnnnnnnnnnnnnnnnnnnnnnnnnnnnnnnnnnnnnnnnnnnnnnnnnnnnnnnnnnnnnnnnnnnnnnnnnnnnnnnnnnnnnnnnnnnnnnnnnnnnnnnnnnnnnnnnnnnnnnnnnnnnnnnnnnnnnnnnnnnnnnnnnnnnnnnnnnnnnnnnnnnnnnnnnnnnnnnnnnnnnnnnnnnnnnnnnnnnnnnnnnnnnnnnnnnnnnnnnnnnnnnnnnnnnnnnnnnnnnnnnnnnnnnnnnnnnnnnnnnnnnnnnnnnnnnnnnnnnnnnnnnnnnnnnnnnnnnnnnnnnnnnnnnnnnnnnnnnnnnnnnnnnnnnnnnnnnnnnnnnnnnnnnnnnnnnnnnnnnnnnnnnnnnnnnnnnnnnnnnnnnnnnnnnnnnnnnnnnnnnnnnnnnnnnnnnnnnnnnnnnnnnnnnnnnnnnnnnnnnnnnnnnnnnnnnnnnnnnnnnnnnnnnnnnnnnnnnnnnnnnnnnnnnnnnnnnnnnnnnnnnnnnnnnnnnnnnnnnnnnnnnnnnnnnnnnnnnnnnnnnnnnnnnnnnnnnnnnnnnnnnnnnnnnnnnnnnnnnnnnnnnnnnnnnnnnnnnnnnnnnnnnnnnnnnnnnnnnnnnnnnnnnnnnnnnnnnnnnnnnnnnnnnnnnnnnnnnnnnnnnnnnnnnnnnnnnnnnnnnnnnnnnnnnnnnnnnnnnnnnnnnnnnnnnnnnnnnnnnnnnnnnnnnnnnnnnnnnnnnnnnnnnnnnnnnnnnnnnnnnnnnnnnnnnnnnnnnnnnnnnnnnnnnnnnnnnnnnnnnnnnnnnnnnnnnnnnnnnnnnnnnnnnnnnnnnnnnnnnnnnnnnnnnnnnnnnnnnnnnnnnnnnnnnnnnnnnnnnnnnnnnnnnnnnnnnnnnnnnnnnnnnnnnnnnnnnnnnnnnnnnnnnnnnnnnnnnnnnnnnnnnnnnnnnnnnnnnnnnnnnnnnnnnnnnnnnnnnnnnnnnnnnnnnnnnnnnnnnnnnnnnnnnnnnnnnnnnnnnnnnnnnnnnnnnnnnnnnnnnnnnnnnnnnnnnnnnnnnnnnnnnnnnnnnnnnnnnnnnnnnnnnnnnnnnnnnnnnnnnnnnnnnnnnnnnnnnnnnnnnnnnnnnnnnnnnnnnnnnnnnnnnnnnnnnnnnnnnnnnnnnnnnnnnnnnnnnnnnnnnnnnnnnnnnnnnnnnnnnnnnnnnnnnnnnnnnnnnnnnnnnnnnnnnnnnnnnnnnnnnnnnnnnnnnnnnnnnnnnnnnnnnnnnnnnnnnnnnnnnnnnnnnnnnnnnnnnnnnnnnnnnnnnnnnnnnnnnnnnnnnnnnnnnnnnnnnnnnnnnnnnnnnnnnnnnnnnnnnnnnnnnnnnnnnnnnnnnnnnnnnnnnnnnnnnnnnnnnnnnnnnnnnnnnnnnnnnnnnnnnnnnnnnnnnnnnnnnnnnnnnnnnnnnnnnnnnnnnnnnnnnnnnnnnnnnnnnnnnnnnnnnnnnnnnnnnnnnnnnnnnnnnnnnnnnnnnnnnnnnnnnnnnnnnnnnnnnnnnnnnnnnnnnnnnnnnnnnnnnnnnnnnnnnnnnnnnnnnnnnnnnnnnnnnnnnnnnnnnnnnnnnnnnnnnnnnnnnnnnnnnnnnnnnnnnnnnnnnnnnnnnnnnnnnnnnnnnnnnnnnnnnnnnnnnnnnnnnnnnnnnnnnnnnnnnnnnnnnnnnnnnnnnnnnnnnnnnnnnnnnnnnnnnnnnnnnnnnnnnnnnnnnnnnnnnnnnnnnnnnnnnnnnnnnnnnnnnnnnnnnnnnnnnnnnnnnnnnnnnnnnnnnnnnnnnnnnnnnnnnnnnnnnnnnnnnnnnnnnnnnnnnnnnnnnnnnnnnnnnnnnnnnnnnnnnnnnnnnnnnnnnnnnnnnnnnnnnnnnnnnnnnnnnnnnnnnnnnnnnnnnnnnnnnnnnnnnnnnnnnnnnnnnnnnnnnnnnnnnnnnnnnnnnnnnnnnnnnnnnnnnnnnnnnnnnnnnnnnnnnnnnnnnnnnnnnnnnnnnnnnnnnnnnnnnnnnnnnnnnnnnnnnnnnnnnnnnnnnnnnnnnnnnnnnnnnnnnnnnnnnnnnnnnnnnnnnnnnnnnnnnnnnnnnnnnnnnnnnnnnnnnnnnnnnnnnnnnnnnnnnnnnnnnnnnnnnnnnnnnnnnnnnnnnnnnnnnnnnnnnnnnnnnnnnnnnnnnnnnnnnnnnnnnnnnnnnnnnnnnnnnnnnnnnnnnnnnnnnnnnnnnnnnnnnnnnnnnnnnnnnnnnnnnnnnnnnnnnnnnnnnnnnnnnnnnnnnnnnnnnnnnnnnnnnnnnnnnnnnnnnnnnnnnnnnnnnnnnnnnnnnnnnnnnnnnnnnnnnnnnnnnnnnnnnnnnnnnnnnnnnnnnnnnnnnnnnnnnnnnnnnnnnnnnnnnnnnnnnnnnnnnnnnnnnnnnnnnnnnnnnnnnnnnnnnnnnnnnnnnnnnnnnnnnnnnnnnnnnnnnnnnnnnnnnnnnnnnnnnnnnnnnnnnnnnnnnnnnnnnnnnnnnnnnnnnnnnnnnnnnnnnnnnnnnnnnnnnnnnnnnnnnnnnnnnnnnnnnnnnnnnnnnnnnnnnnnnnnnnnnnnnnnnnnnnnnnnnnnnnnnnnnnnnnnnnnnnnnnnnnnnnnnnnnnnnnnnnnnnnnnnnnnnnnnnnnnnnnnnnnnnnnnnnnnnnnnnnnnnnnnnnnnnnnnnnnnnnnnnnnnnnnnnnnnnnnnnnnnnnnnnnnnnnnnnnnnnnnnnnnnnnnnnnnnnnnnnnnnnnnnnnnnnnnnnnnnnnnnnnnnnnnnnnnnnnnnnnnnnnnnnnnnnnnnnnnnnnnnnnnnnnnnnnnnnnnnnnnnnnnnnnnnnnnnnnnnnnnnnnnnnnnnnnnnnnnnnnnnnnnnnnnnnnnnnnnnnnnnnnnnnnnnnnnnnnnnnnnnnnnnnnnnnnnnnnnnnnnnnnnnnnnnnnnnnnnnnnnnnnnnnnnnnnnnnnnnnnnnnnnnnnnnnnnnnnnnnnnnnnnnnnnnnnnnnnnnnnnnnnnnnnnnnnnnnnnnnnnnnnnnnnnnnnnnnnnnnnnnnnnnnnnnnnnnnnnnnnnnnnnnnnnnnnnnnnnnnnnnnnnnnnnnnnnnnnnnnnnnnnnnnnnnnnnnnnnnnnnnnnnnnnnnnnnnnnnnnnnnnnnnnnnnnnnnnnnnnnnnnnnnnnnnnnnnnnnnnnnnnnnnnnnnnnnnnnnnnnnnnnnnnnnnnnnnnnnnnnnnnnnnnnnnnnnnnnnnnnnnnnnnnnnnnnnnnnnnnnnnnnnnnnnnnnnnnnnnnnnnnnnnnnnnnnnnnnnnnnnnnnnnnnnnnnnnnnnnnnnnnnnnnnnnnnnnnnnnnnnnnnnnnnnnnnnnnnnnnnnnnnnnnnnnnnnnnnnnnnnnnnnnnnnnnnnnnnnnnnnnnnnnnnnnnnnnnnnnnnnnnnnnnnnnnnnnnnnnnnnnnnnnnnnnnnnnnnnnnnnnnnnnnnnnnnnnnnnnnnnnnnnnnnnnnnnnnnnnnnnnnnnnnnnnnnnnnnnnnnnnnnnnnnnnnnnnnnnnnnnnnnnnnnnnnnnnnnnnnnnnnnnnnnnnnnnnnnnnnnnnnnnnnnnnnnnnnnnnnnnnnnnnnnnnnnnnnnnnnnnnnnnnnnnnnnnnnnnnnnnnnnnnnnnnnnnnnnnnnnnnnnnnnnnnnnnnnnnnnnnnnnnnnnnnnnnnnnnnnnnnnnnnnnnnnnnnnnnnnnnnnnnnnnnnnnnnnnnnnnnnnnnnnnnnnnnnnnnnnnnnnnnnnnnnnnnnnnnnnnnnnnnnnnnnnnnnnnnnnnnnnnnnnnnnnnnnnnnnnnnnnnnnnnnnnnnnnnnnnnnnnnnnnnnnnnnnnnnnnnnnnnnnnnnnnnnnnnnnnnnnnnnnnnnnnnnnnnnnnnnnnnnnnnnnnnnnnnnnnnnnnnnnnnnnnnnnnnnnnnnnnnnnnnnnnnnnnnnnnnnnnnnnnnnnnnnnnnnnnnnnnnnnnnnnnnnnnnnnnnnnnnnnnnnnnnnnnnnnnnnnnnnnnnnnnnnnnnnnnnnnnnnnnnnnnnnnnnnnnnnnnnnnnnnnnnnnnnnnnnnnnnnnnnnnnnnnnnnnnnnnnnnnnnnnnnnnnnnnnnnnnnnnnnnnnnnnnnnnnnnnnnnnnnnnnnnnnnnnnnnnnnnnnnnnnnnnnnnnnnnnnnnnnnnnnnnnnnnnnnnnnnnnnnnnnnnnnnnnnnnnnnnnnnnnnnnnnnnnnnnnnnnnnnnnnnnnnnnnnnnnnnnnnnnnnnnnnnnnnnnnnnnnnnnnnnnnnnnnnnnnnnnnnnnnnnnnnnnnnnnnnnnnnnnnnnnnnnnnnnnnnnnnnnnnnnnnnnnnnnnnnnnnnnnnnnnnnnnnnnnnnnnnnnnnnnnnnnnnnnnnnnnnnnnnnnnnnnnnnnnnnnnnnnnnnnnnnnnnnnnnnnnnnnnnnnnnnnnnnnnnnnnnnnnnnnnnnnnnnnnnnnnnnnnnnnnnnnnnnnnnnnnnnnnnnnnnnnnnnnnnnnnnnnnnnnnnnnnnnnnnnnnnnnnnnnnnnnnnnnnnnnnnnnnnnnnnnnnnnnnnnnnnnnnnnnnnnnnnnnnnnnnnnnnnnnnnnnnnnnnnnnnnnnnnnnnnnnnnnnnnnnnnnnnnnnnnnnnnnnnnnnnnnnnnnnnnnnnnnnnnnnnnnnnnnnnnnnnnnnnnnnnnnnnnnnnnnnnnnnnnnnnnnnnnnnnnnnnnnnnnnnnnnnnnnnnnnnnnnnnnnnnnnnnnnnnnnnnnnnnnnnnnnnnnnnnnnnnnnnnnnnnnnnnnnnnnnnnnnnnnnnnnnnnnnnnnnnnnnnnnnnnnnnnnnnnnnnnnnnnnnnnnnnnnnnnnnnnnnnnnnnnnnnnnnnnnnnnntttgggtggtcattgcaactacctacaccagcgcttgccgcaggccatcggtgcggccaccctgatttccggtggtcattgcaactttctggacgggccgcattttgaattgttggtgcggccaccctgatttcgggtggtcattgcaagggtgtagtgaaccgatccacctcatccccgaggtccggccatcctgttttcgggtggtcattgcaacaattccgccgtgaagccgaaggtcggctggggtggggccacccggatttcgggtggtcattgaaagatgtcatcgggagtgttgtcgttcccgcccattaggccatgtccaaagaacgtggtcaggttcttcgcatacaacatcaaatatctccttccatcatctccaacaaggattcgccccagatgtttcgcagcagcgaacagcggctattccatgaaatcgtcgcgcggcattttgctgcccccatccggcctttgctcgcccaggcggcgacagggcttgggaagacgcgtgcctatcttgccgccgccgcgcaggccgccagccacggccagcgcatcgccatcgccctgccaagttgggcgctgattgatcaattgctggcctcggaagatttggcgctcacgcgcggcacgttgaacatcgccaccttccggccccgccggctttgcgacaatgcggcagaatatgaggcccaagcggaagcggcgcgttccagccatatcatgctctgcaccgctgcggcggtgttgattgataacgcggcgcagggcgcctattgcggcgccattgaacgcagcatcatttttgatgaggcggatcaattgccggatgcggccgccttgcgcgcggatgtggaaaccacccctgccgaattacgcgacctgaatatctcggcagcatcggctgaagccattgccgctgccgtggtggcgcacccccgcgccacaacggaacaacgcgccatcgcccggctggtgcaggaatacgctgcggaagcacccggctacgcgctggccggcagaacagaccaaggtggcatcgccgtatatcatccaaggccaggacgcatgctgaagcgcatcagcaacctgcccagcagcattttcatctccgccaccctgcaacttcgcggaagttttgacgccttccgccgagccatggcgattcaggagatctcgcccctttccacagccattgaaccaaaacgccacggggacctctccttcatctatcagcccaaggcgcccgatacggaagactggttcactgaggttatcagcagcatcgcgaccgcgccgcgcccctgtttggtgctggtgccaagccatgatttggccgagcgcattggcgccgcggctggtgggcgtgtgcgcggccgcgatgaacctttgcgggaagctgctgcggaagctgaaagccaagggcttttcatcgcagccggcgcttgggccgggctggatacgcctacacgctgggcaagcctggtcattccccgcgcgcctttccccaggctgcgggttctggagggggaggcggtagatcattacctggatagccatgcagccacagtccggcgccttgggcaggggcttggccgcgtactgcgctttccggaggcacgggccaaggtgatcattctggaccagcgccttgtcactcacggcctggaaagctgcgtgccggaacgcttccgtcccgcgtgggaggaagccaagcgcgccgctctttctcaggggttcgacgaaggcacacggtttgaaatgaccttgagccgggcggaacgcgaccctgcgcttcgcaaggcggcgctcagccattacgggctgcgctgcaccgaatgcggctttgtgccgcaagtttcatcgcaattagatgttcaccacctgaacccaatcgccgagggcaagcgcaggacagtgctgacggatgtgacggttctctgcgccaattgtcaccggctggcgcatgcgcgccttcgcgccgcttcatcggagggggaggcggtgtgaaaccttaaccgatgtaggtccttcaagggcgctcggtcatgaaaggcgcgctgcgccattgagagggcattcctatcgtggcgcggaacgttgctcgcctgagggtctctgctgggcggacaggcaagtgggcttgcggcggattgactttgctatcgcagggaagaccagcttagcattggtcaccccagccagggataaatgaccctggcgagttgagcatcgcttaaggaggaagaaaatggccaaagcattgatcggctttctgatagcggtgttatttctggccctacctcatcaggcccgcgctcaagaggaaaattggccatcacgtcccatcactatggtaatacctttttcaaccggcggatcggtggatgcggtgttgcgcgtcctgaagccgatgctcgaagccgaattgaagcagccgatcattccggattatcggcctggcggcgcaacggcacttggtgcggccacagtcgcccgcgcccggcctgacggctatactttcggcatcgtcgtggatgccctcgcggtaaatgccacgctctatcgcaaccttccgtatgatacgttgacggatttgatgccggtctctctgcttgggaaaatgccgctggtgatgatcgttcatccggctgcaccattcaatgatcttgcggcaatcgtgtcggcggctcgcgcaagaccaggggcattgacctatgcgtcggtcggcgtgggcagcatcaatcatttggcgatggagttactcaatcggcaaagtggcgtcagcatgacacatgtgccgtatcgcggtggcggtcctgcggtgaccgatctgctgggccggcatgtggatatgatgttgatgtccctcgcgcttgctcgcgcccagcttgatgccggtacgctcaaggcagtggccgtcacctcggcaagccgcctcgcagcactgccaaaccttcccaccgcaagcgaaggcggcatccctggctttaccgcatttgcttggcagggcgtggtggcgccacctggaacgcccatcaccgtgattgggcggtttcaccagatattgcgcaatgtggctgccgaaccgcgcatacgcgaagggctggagaatctgggaatgcaggctgaggtatcctctccaagcgagttcagccaattcctacgcgagcagatcaacacttggggcgctgtgattcgagaagctgatatcaagccggagtgaagcggcttggcattcatgtcaccctacgcctcgccgcatctgcgcgcactcggcgcagcactgccggcggggctgaggcgttttcacgccgatgccgaacggcgcacagtttccgggcaggcaagggtcacgacaggcggcgtgtttgcacgtgttatgcttcgtctgcttggccttcatatccgcgatggaacgcagccgctggacgtcacctttatgcccgatggtagcggcacaatctgggatcggcgcttcgggacgggccgctttatcagccggattgaagccggcggcatcggctttctaatcgaaacctttggtcccattaccttgcgatttcggctggcccctgatggagacgcggtttcatggacgctgcagcgcgctgcggtatttggcctttccattccctcatttctggcgccgcgtatcgctgctcgcgaatggttggccgctgacaaagcctatgcaatgtccgtggtggtcgggctgccgctacttggtttgatattgcgatatgagggtgagctttatctaccgcagtttagtgagccagactgagaaggggcacgcagccaaccgttgtctcaacctaccaaccgcgaccgctgctccggtgtcagcaggctgcaatgctcatgatgcccaaaccagcgatatcgattgcgggcaacaagcctgtacagtgcatcgcggagggtctcaggaatcatgcgggtaatctcaagcaagcgccaagctccgccgagtaccggcaaaaggcgcagatagccaccgctcatgccccagcaatgtccgtccttgatgagcagatatgtggtgtcaatttccacgccgaagtggcggtacagcgaagcgccaagcgcgccttgtgcggatgtataaaggatctttccttgctggtcggcagacatcaaccagcgcaccccgccggagcaaagcccacaatgcccgtcaaacacgaaaagcggacggctttcgtcaaacaccggcacattaggatcgtcgcgccaggagaaggcttctgaggaatagcgtgtcatgcccgtattgccgtaatatccagcgacttcagggcgccaagatactcgtccaggctgatgaggtcgaggcaaggccgcgcaccggcagggattgacccgccatttgcaaggcgtcgggcaatcaagattgacggaatgcaggggatattcggcccgtggccagagcgggcgatgatgcgctcggtccgggtcagcgctttgccgtcatgccctttcccgctgattcgcatgtgaaagccactgcgcgcgccaccccgccaatcaaaaaggaatgagcctttcaacaacgcgtttgaccagcggtcgagccttggcaacaagccacaacgtactccccatgaaagcagccatgtgccgaaatgcagaaatgcgatttcatgcccggcgccgaagcgtatccgcttgagggttgggtagcgaaggggaaacaaatccaggtctggcacatcgcaatagccaaaccagcgacgacctaattcgggatagacttcactatgaagtccctgccagccgaatacccgctgcatgcgtccatccatgagtgtg

SEQ ID NO: 110 - DNA, 14377 bp, Artificial Sequence
  Synthetic Oligonucleotide
  misc_feature (1)..(9854): n is a, c, g, or t
nnnnnnnnnnnnnnnnnnnnnnnnnnnnnnnnnnnnnnnnnnnnnnnnnnnnnnnnnnnnnnnnnnnnnnnnnnnnnnnnnnnnnnnnnnnnnnnnnnnnnnnnnnnnnnnnnnnnnnnnnnnnnnnnnnnnnnnnnnnnnnnnnnnnnnnnnnnnnnnnnnnnnnnnnnnnnnnnnnnnnnnnnnnnnnnnnnnnnnnnnnnnnnnnnnnnnnnnnnnnnnnnnnnnnnnnnnnnnnnnnnnnnnnnnnnnnnnnnnnnnnnnnnnnnnnnnnnnnnnnnnnnnnnnnnnnnnnnnnnnnnnnnnnnnnnnnnnnnnnnnnnnnnnnnnnnnnnnnnnnnnnnnnnnnnnnnnnnnnnnnnnnnnnnnnnnnnnnnnnnnnnnnnnnnnnnnnnnnnnnnnnnnnnnnnnnnnnnnnnnnnnnnnnnnnnnnnnnnnnnnnnnnnnnnnnnnnnnnnnnnnnnnnnnnnnnnnnnnnnnnnnnnnnnnnnnnnnnnnnnnnnnnnnnnnnnnnnnnnnnnnnnnnnnnnnnnnnnnnnnnnnnnnnnnnnnnnnnnnnnnnnnnnnnnnnnnnnnnnnnnnnnnnnnnnnnnnnnnnnnnnnnnnnnnnnnnnnnnnnnnnnnnnnnnnnnnnnnnnnnnnnnnnnnnnnnnnnnnnnnnnnnnnnnnnnnnnnnnnnnnnnnnnnnnnnnnnnnnnnnnnnnnnnnnnnnnnnnnnnnnnnnnnnnnnnnnnnnnnnnnnnnnnnnnnnnnnnnnnnnnnnnnnnnnnnnnnnnnnnnnnnnnnnnnnnnnnnnnnnnnnnnnnnnnnnnnnnnnnnnnnnnnnnnnnnnnnnnnnnnnnnnnnnnnnnnnnnnnnnnnnnnnnnnnnnnnnnnnnnnnnnnnnnnnnnnnnnnnnnnnnnnnnnnnnnnnnnnnnnnnnnnnnnnnnnnnnnnnnnnnnnnnnnnnnnnnnnnnnnnnnnnnnnnnnnnnnnnnnnnnnnnnnnnnnnnnnnnnnnnnnnnnnnnnnnnnnnnnnnnnnnnnnnnnnnnnnnnnnnnnnnnnnnnnnnnnnnnnnnnnnnnnnnnnnnnnnnnnnnnnnnnnnnnnnnnnnnnnnnnnnnnnnnnnnnnnnnnnnnnnnnnnnnnnnnnnnnnnnnnnnnnnnnnnnnnnnnnnnnnnnnnnnnnnnnnnnnnnnnnnnnnnnnnnnnnnnnnnnnnnnnnnnnnnnnnnnnnnnnnnnnnnnnnnnnnnnnnnnnnnnnnnnnnnnnnnnnnnnnnnnnnnnnnnnnnnnnnnnnnnnnnnnnnnnnnnnnnnnnnnnnnnnnnnnnnnnnnnnnnnnnnnnnnnnnnnnnnnnnnnnnnnnnnnnnnnnnnnnnnnnnnnnnnnnnnnnnnnnnnnnnnnnnnnnnnnnnnnnnnnnnnnnnnnnnnnnnnnnnnnnnnnnnnnnnnnnnnnnnnnnnnnnnnnnnnnnnnnnnnnnnnnnnnnnnnnnnnnnnnnnnnnnnnnnnnnnnnnnnnnnnnnnnnnnnnnnnnnnnnnnnnnnnnnnnnnnnnnnnnnnnnnnnnnnnnnnnnnnnnnnnnnnnnnnnnnnnnnnnnnnnnnnnnnnnnnnnnnnnnnnnnnnnnnnnnnnnnnnnnnnnnnnnnnnnnnnnnnnnnnnnnnnnnnnnnnnnnnnnnnnnnnnnnnnnnnnnnnnnnnnnnnnnnnnnnnnnnnnnnnnnnnnnnnnnnnnnnnnnnnnnnnnnnnnnnnnnnnnnnnnnnnnnnnnnnnnnnnnnnnnnnnnnnnnnnnnnnnnnnnnnnnnnnnnnnnnnnnnnnnnnnnnnnnnnnnnnnnnnnnnnnnnnnnnnnnnnnnnnnnnnnnnnnnnnnnnnnnnnnnnnnnnnnnnnnnnnnnnnnnnnnnnnnnnnnnnnnnnnnnnnnnnnnnnnnnnnnnnnnnnnnnnnnnnnnnnnnnnnnnnnnnnnnnnnnnnnnnnnnnnnnnnnnnnnnnnnnnnnnnnnnnnnnnnnnnnnnnnnnnnnnnnnnnnnnnnnnnnnnnnnnnnnnnnnnnnnnnnnnnnnnnnnnnnnnnnnnnnnnnnnnnnnnnnnnnnnnnnnnnnnnnnnnnnnnnnnnnnnnnnnnnnnnnnnnnnnnnnnnnnnnnnnnnnnnnnnnnnnnnnnnnnnnnnnnnnnnnnnnnnnnnnnnnnnnnnnnnnnnnnnnnnnnnnnnnnnnnnnnnnnnnnnnnnnnnnnnnnnnnnnnnnnnnnnnnnnnnnnnnnnnnnnnnnnnnnnnnnnnnnnnnnnnnnnnnnnnnnnnnnnnnnnnnnnnnnnnnnnnnnnnnnnnnnnnnnnnnnnnnnnnnnnnnnnnnnnnnnnnnnnnnnnnnnnnnnnnnnnnnnnnnnnnnnnnnnnnnnnnnnnnnnnnnnnnnnnnnnnnnnnnnnnnnnnnnnnnnnnnnnnnnnnnnnnnnnnnnnnnnnnnnnnnnnnnnnnnnnnnnnnnnnnnnnnnnnnnnnnnnnnnnnnnnnnnnnnnnnnnnnnnnnnnnnnnnnnnnnnnnnnnnnnnnnnnnnnnnnnnnnnnnnnnnnnnnnnnnnnnnnnnnnnnnnnnnnnnnnnnnnnnnnnnnnnnnnnnnnnnnnnnnnnnnnnnnnnnnnnnnnnnnnnnnnnnnnnnnnnnnnnnnnnnnnnnnnnnnnnnnnnnnnnnnnnnnnnnnnnnnnnnnnnnnnnnnnnnnnnnnnnnnnnnnnnnnnnnnnnnnnnnnnnnnnnnnnnnnnnnnnnnnnnnnnnnnnnnnnnnnnnnnnnnnnnnnnnnnnnnnnnnnnnnnnnnnnnnnnnnnnnnnnnnnnnnnnnnnnnnnnnnnnnnnnnnnnnnnnnnnnnnnnnnnnnnnnnnnnnnnnnnnnnnnnnnnnnnnnnnnnnnnnnnnnnnnnnnnnnnnnnnnnnnnnnnnnnnnnnnnnnnnnnnnnnnnnnnnnnnnnnnnnnnnnnnnnnnnnnnnnnnnnnnnnnnnnnnnnnnnnnnnnnnnnnnnnnnnnnnnnnnnnnnnnnnnnnnnnnnnnnnnnnnnnnnnnnnnnnnnnnnnnnnnnnnnnnnnnnnnnnnnnnnnnnnnnnnnnnnnnnnnnnnnnnnnnnnnnnnnnnnnnnnnnnnnnnnnnnnnnnnnnnnnnnnnnnnnnnnnnnnnnnnnnnnnnnnnnnnnnnnnnnnnnnnnnnnnnnnnnnnnnnnnnnnnnnnnnnnnnnnnnnnnnnnnnnnnnnnnnnnnnnnnnnnnnnnnnnnnnnnnnnnnnnnnnnnnnnnnnnnnnnnnnnnnnnnnnnnnnnnnnnnnnnnnnnnnnnnnnnnnnnnnnnnnnnnnnnnnnnnnnnnnnnnnnnnnnnnnnnnnnnnnnnnnnnnnnnnnnnnnnnnnnnnnnnnnnnnnnnnnnnnnnnnnnnnnnnnnnnnnnnnnnnnnnnnnnnnnnnnnnnnnnnnnnnnnnnnnnnnnnnnnnnnnnnnnnnnnnnnnnnnnnnnnnnnnnnnnnnnnnnnnnnnnnnnnnnnnnnnnnnnnnnnnnnnnnnnnnnnnnnnnnnnnnnnnnnnnnnnnnnnnnnnnnnnnnnnnnnnnnnnnnnnnnnnnnnnnnnnnnnnnnnnnnnnnnnnnnnnnnnnnnnnnnnnnnnnnnnnnnnnnnnnnnnnnnnnnnnnnnnnnnnnnnnnnnnnnnnnnnnnnnnnnnnnnnnnnnnnnnnnnnnnnnnnnnnnnnnnnnnnnnnnnnnnnnnnnnnnnnnnnnnnnnnnnnnnnnnnnnnnnnnnnnnnnnnnnnnnnnnnnnnnnnnnnnnnnnnnnnnnnnnnnnnnnnnnnnnnnnnnnnnnnnnnnnnnnnnnnnnnnnnnnnnnnnnnnnnnnnnnnnnnnnnnnnnnnnnnnnnnnnnnnnnnnnnnnnnnnnnnnnnnnnnnnnnnnnnnnnnnnnnnnnnnnnnnnnnnnnnnnnnnnnnnnnnnnnnnnnnnnnnnnnnnnnnnnnnnnnnnnnnnnnnnnnnnnnnnnnnnnnnnnnnnnnnnnnnnnnnnnnnnnnnnnnnnnnnnnnnnnnnnnnnnnnnnnnnnnnnnnnnnnnnnnnnnnnnnnnnnnnnnnnnnnnnnnnnnnnnnnnnnnnnnnnnnnnnnnnnnnnnnnnnnnnnnnnnnnnnnnnnnnnnnnnnnnnnnnnnnnnnnnnnnnnnnnnnnnnnnnnnnnnnnnnnnnnnnnnnnnnnnnnnnnnnnnnnnnnnnnnnnnnnnnnnnnnnnnnnnnnnnnnnnnnnnnnnnnnnnnnnnnnnnnnnnnnnnnnnnnnnnnnnnnnnnnnnnnnnnnnnnnnnnnnnnnnnnnnnnnnnnnnnnnnnnnnnnnnnnnnnnnnnnnnnnnnnnnnnnnnnnnnnnnnnnnnnnnnnnnnnnnnnnnnnnnnnnnnnnnnnnnnnnnnnnnnnnnnnnnnnnnnnnnnnnnnnnnnnnnnnnnnnnnnnnnnnnnnnnnnnnnnnnnnnnnnnnnnnnnnnnnnnnnnnnnnnnnnnnnnnnnnnnnnnnnnnnnnnnnnnnnnnnnnnnnnnnnnnnnnnnnnnnnnnnnnnnnnnnnnnnnnnnnnnnnnnnnnnnnnnnnnnnnnnnnnnnnnnnnnnnnnnnnnnnnnnnnnnnnnnnnnnnnnnnnnnnnnnnnnnnnnnnnnnnnnnnnnnnnnnnnnnnnnnnnnnnnnnnnnnnnnnnnnnnnnnnnnnnnnnnnnnnnnnnnnnnnnnnnnnnnnnnnnnnnnnnnnnnnnnnnnnnnnnnnnnnnnnnnnnnnnnnnnnnnnnnnnnnnnnnnnnnnnnnnnnnnnnnnnnnnnnnnnnnnnnnnnnnnnnnnnnnnnnnnnnnnnnnnnnnnnnnnnnnnnnnnnnnnnnnnnnnnnnnnnnnnnnnnnnnnnnnnnnnnnnnnnnnnnnnnnnnnnnnnnnnnnnnnnnnnnnnnnnnnnnnnnnnnnnnnnnnnnnnnnnnnnnnnnnnnnnnnnnnnnnnnnnnnnnnnnnnnnnnnnnnnnnnnnnnnnnnnnnnnnnnnnnnnnnnnnnnnnnnnnnnnnnnnnnnnnnnnnnnnnnnnnnnnnnnnnnnnnnnnnnnnnnnnnnnnnnnnnnnnnnnnnnnnnnnnnnnnnnnnnnnnnnnnnnnnnnnnnnnnnnnnnnnnnnnnnnnnnnnnnnnnnnnnnnnnnnnnnnnnnnnnnnnnnnnnnnnnnnnnnnnnnnnnnnnnnnnnnnnnnnnnnnnnnnnnnnnnnnnnnnnnnnnnnnnnnnnnnnnnnnnnnnnnnnnnnnnnnnnnnnnnnnnnnnnnnnnnnnnnnnnnnnnnnnnnnnnnnnnnnnnnnnnnnnnnnnnnnnnnnnnnnnnnnnnnnnnnnnnnnnnnnnnnnnnnnnnnnnnnnnnnnnnnnnnnnnnnnnnnnnnnnnnnnnnnnnnnnnnnnnnnnnnnnnnnnnnnnnnnnnnnnnnnnnnnnnnnnnnnnnnnnnnnnnnnnnnnnnnnnnnnnnnnnnnnnnnnnnnnnnnnnnnnnnnnnnnnnnnnnnnnnnnnnnnnnnnnnnnnnnnnnnnnnnnnnnnnnnnnnnnnnnnnnnnnnnnnnnnnnnnnnnnnnnnnnnnnnnnnnnnnnnnnnnnnnnnnnnnnnnnnnnnnnnnnnnnnnnnnnnnnnnnnnnnnnnnnnnnnnnnnnnnnnnnnnnnnnnnnnnnnnnnnnnnnnnnnnnnnnnnnnnnnnnnnnnnnnnnnnnnnnnnnnnnnnnnnnnnnnnnnnnnnnnnnnnnnnnnnnnnnnnnnnnnnnnnnnnnnnnnnnnnnnnnnnnnnnnnnnnnnnnnnnnnnnnnnnnnnnnnnnnnnnnnnnnnnnnnnnnnnnnnnnnnnnnnnnnnnnnnnnnnnnnnnnnnnnnnnnnnnnnnnnnnnnnnnnnnnnnnnnnnnnnnnnnnnnnnnnnnnnnnnnnnnnnnnnnnnnnnnnnnnnnnnnnnnnnnnnnnnnnnnnnnnnnnnnnnnnnnnnnnnnnnnnnnnnnnnnnnnnnnnnnnnnnnnnnnnnnnnnnnnnnnnnnnnnnnnnnnnnnnnnnnnnnnnnnnnnnnnnnnnnnnnnnnnnnnnnnnnnnnnnnnnnnnnnnnnnnnnnnnnnnnnnnnnnnnnnnnnnnnnnnnnnnnnnnnnnnnnnnnnnnnnnnnnnnnnnnnnnnnnnnnnnnnnnnnnnnnnnnnnnnnnnnnnnnnnnnnnnnnnnnnnnnnnnnnnnnnnnnnnnnnnnnnnnnnnnnnnnnnnnnnnnnnnnnnnnnnnnnnnnnnnnnnnnnnnnnnnnnnnnnnnnnnnnnnnnnnnnnnnnnnnnnnnnnnnnnnnnnnnnnnnnnnnnnnnnnnnnnnnnnnnnnnnnnnnnnnnnnnnnnnnnnnnnnnnnnnnnnnnnnnnnnnnnnnnnnnnnnnnnnnnnnnnnnnnnnnnnnnnnnnnnnnnnnnnnnnnnnnnnnnnnnnnnnnnnnnnnnnnnnnnnnnnnnnnnnnnnnnnnnnnnnnnnnnnnnnnnnnnnnnnnnnnnnnnnnnnnnnnnnnnnnnnnnnnnnnnnnnnnnnnnnnnnnnnnnnnnnnnnnnnnnnnnnnnnnnnnnnnnnnnnnnnnnnnnnnnnnnnnnnnnnnnnnnnnnnnnnnnnnnnnnnnnnnnnnnnnnnnnnnnnnnnnnnnnnnnnnnnnnnnnnnnnnnnnnnnnnnnnnnnnnnnnnnnnnnnnnnnnnnnnnnnnnnnnnnnnnnnnnnnnnnnnnnnnnnnnnnnnnnnnnnnnnnnnnnnnnnnnnnnnnnnnnnnnnnnnnnnnnnnnnnnnnnnnnnnnnnnnnnnnnnnnnnnnnnnnnnnnnnnnnnnnnnnnnnnnnnnnnnnnnnnnnnnnnnnnnnnnnnnnnnnnnnnnnnnnnnnnnnnnnnnnnnnnnnnnnnnnnnnnnnnnnnnnnnnnnnnnnnnnnnnnnnnnnnnnnnnnnnnnnnnnnnnnnnnnnnnnnnnnnnnnnnnnnnnnnnnnnnnnnnnnnnnnnnnnnnnnnnnnnnnnnnnnnnnnnnnnnnnnnnnnnnnnnnnnnnnnnnnnnnnnnnnnnnnnnnnnnnnnnnnnnnnnnnnnnnnnnnnnnnnnnnnnnnnnnnnnnnnnnnnnnnnnnnnnnnnnnnnnnnnnnnnnnnnnnnnnnnnnnnnnnnnnnnnnnnnnnnnnnnnnnnnnnnnnnnnnnnnnnnnnnnnnnnnnnnnnnnnnnnnnnnnnnnnnnnnnnnnnnnnnnnnnnnnnnnnnnnnnnnnnnnnnnnnnnnnnnnnnnnnnnnnnnnnnnnnnnnnnnnnnnnnnnnnnnnnnnnnnnnnnnnnnnnnnnnnnnnnnnnnnnnnnnnnnnnnnnnnnnnnnnnnnnnnnnnnnnnnnnnnnnnnnnnnnnnnnnnnnnnnnnnnnnnnnnnnnnnnnnnnnnnnnnnnnnnnnnnnnnnnnnnnnnnnnnnnnnnnnnnnnnnnnnnnnnnnnnnnnnnnnnnnnnnnnnnnnnnnnnnnnnnnnnnnnnnnnnnnnnnnnnnnnnnnnnnnnnnnnnnnnnnnnnnnnnnnnnnnnnnnnnnnnnnnnnnnnnnnnnnnnnnnnnnnnnnnnnnnnnnnnnnnnnnnnnnnnnnnnnnnnnnnnnnnnnnnnnnnnnnnnnnnnnnnnnnnnnnnnnnnnnnnnnnnnnnnnnnnnnnnnnnnnnnnnnnnnnnnnnnnnnnnnnnnnnnnnnnnnnnnnnnnnnnnnnnnnnnnnnnnnnnnnnnnnnnnnnnnnnnnnnnnnnnnnnnnnnnnnnnnnnnnnnnnnnnnnnnnnnnnnnnnnnnnnnnnnnnnnnnnnnnnnnnnnnnnnnnnnnnnnnnnnnnnnnnnnnnnnnnnnnnnnnnnnnnnnnnnnnnnnnnnnnnnnnnnnnnnnnnnnnnnnnnnnnnnnnnnnnnnnnnnnnnnnnnnnnnnnnnnnnnnnnnnnnnnnnnnnnnnnnnnnnnnnnnnnnnnnnnnnnnnnnnnnnnnnnnnnnnnnnnnnnnnnnnnnnnnnnnnnnnnnnnnnnnnnnnnnnnnnnnnnnnnnnnnnnnnnnnnnnnnnnnnnnnnnnnnnnnnnnnnnnnnnnnnnnnnnnnnnnnnnnnnnnnnnnnnnnnnnnnnnnnnnnnnnnnnnnnnnnnnnnnnnnnnnnnnnnnnnnnnnnnnnnnnnnnnnnnnnnnnnnnnnnnnnnnnnnnnnnnnnnnnnnnnnnnnnnnnnnnnnnnnnnnnnnnnnnnnnnnnnnnnnnnnnnnnnnnnnnnnnnnnnnnnnnnnnnnnnnnnnnnnnnnnnnnnnnnnnnnnnnnnnnnnnnnnnnnnnnnnnnnnnnnnnnnnnnnnnnnnnnnnnnnnnnnnnnnnnnnnnnnnnnnnnnnnnnnnnnnnnnnnnnnnnnnnnnnnnnnnnnnnnnnnnnnnnnnnnnnnnnnnnnnnnnnnnnnnnnnnnnnnnnnnnnnnnnnnnnnnnnnnnnnnnnnnnnnnnnnnnnnnnnnnnnnnnnnnnnnnnnnnnnnnnnnnnnnnnnnnnnnnnnnnnnnnnnnnnnnnnnnnnnnnnnnnnnnnnnnnnnnnnnnnnnnnnnnnnnnnnnnnnnnnnnnnnnnnnnnnnnnnnnnnnnnnnnnnnnnnnnnnnnnnnnnnnnnnnnnnnnnnnnnnnnnnnnnnnnnnnnnnnnnnnnnnnnnnnnnnnnnnnnnnnnnnnnnnnnnnnnnnnnnnnnnnnnnnnnnnnnnnnnnnnnnnnnnnnnnnnnnnnnnnnnnnnnnnnnnnnnnnnnnnnnnnnnnnnnnnnnnnnnnnnnnnnnnnnnnnnnnnnnnnnnnnnnnnnnnnnnnnnnnnnnnnnnnnnnnnnnnnnnnnnnnnnnnnnnnnnnnnnnnnnnnnnnnnnnnnnnnnnnnnnnnnnnnnnnnnnnnnnnnnnnnnnnnnnnnnnnnnnnnnnnnnnnnnnnnnnnnnnnnnnnnnnnnnnnnnnnnnnnnnnnnnnnnnnnnnnnnnnnnnnnnnnnnnnnnnnnnnnnnnnnnnnnnnnnnnnnnnnnnnnnnnnnnnnnnnnnnnnnnnnnnnnnnnnnnnnnnnnnnnnnnnnnnnnnnnnnnnnnnnnnnnnnnnnnnnnnnnnnnnnnnnnnnnnnnnnnnnnnnnnnnnnnnnnnnnnnnnnnnnnnnnnnnnnnnnnnnnnnnnnnnnnnnnnnnnnnnnnnnnnnnnnnnnnnnnnnnnnnnnnnnnnnnnnnnnnnnnnnnnnnnnnnnnnnnnnnnnnnnnnnnnnnnnnnnnnnnnnnnnnnnnnnnnnnnnnnnnnnnnnnnnnnnnnnnnnnnnnnnnnnnnnnnnnnnnnnnnnnnnnnnnnnnnnnnnnnnnnnnnnnnnnnnnnnnnnnnnnnnnnnnnnnnnnnnnnnnnnnnnnnnnnnnnnnnnnnnnnnnnnnnnnnnnnnnnnnnnnnnnnnnnnnnnnnnnnnnnnnnnnnnnnnnnnnnnnnnnnnnnnnnnnnnnnnnnnnnnnnnnnnnnnnnnnnnnnnnnnnnnnnnnnnnnnnnnnnnnnnnnnnnnnnnnnnnnnnnnnnnnnnnnnnnnnnnnnnnnnnnnnnnnnnnnnnnnnnnnnnnnnnnnnnnnnnnnnnnnnnnnnnnnnnnnnnnnnnnnnnnnnnnnnnnnnnnnnnnnnnnnnnnnnnnnnnnnnnnnnnnnnnnnnnnnnnnnnnnnnnnnnnnnnnnnnnnnnnnnnnnnnnnnnnnnnnnnnnnnnnnnnnnnnnnnnnnnnnnnnnnnnnnnnnnnnnnnnnnnnnnnnnnnnnnnnnnnnnnnnnnnnnnnnnnnnnnnnnnnnnnnnnnnnnnnnnnnnnnnnnnnnnnnnnnnnnnnnnnnnnnnnnnnnnnnnnnnnnnnnnnnnnnnntgcttttccgcactccggtgggtgaagccaccattggtttgagtggctgtttaatagtgcaagcccgcttagacgtgagtcgagacggcttcattgaagagcgataaggtaaagtgacaagataagttgtcacttcgctaagttcatgttccgctcagtagagcaagagaactttcacaagctggtggcctcgcacatggagaggcccgacgcgcccttgcttctagagggcacgactggcattggcaagacccgtgcatacttgcttgcggtgatggatgccgcagctgcgggccgcaggatagccatcgtgcttcccagtcatgccctgattgaccagctgtgtgcctcttccgaccttgctgcaactcagcgagacacggttcgcgtcgccgcatttcgcccacggcgatggtttgcgacgagaggcgaatacgagcagcaaaagatatcagcgttggaggcgcagattcttgtctgcacaagcgcctccgtcatcatcgaccagcggctgagtggtggctacaacggctccacgctgcgcgactacattcttttcgacgaggccgaccagttgcccgatgcggctgcattacagagcgactgtgagatcacggctgaccagctcaaagacctaggaatcgttgcgcaaagcgctcagcaggcagcgagggcagttatcaacaaagaaagcagcgagccggaagtaaaagctgccgcgatgctaattttggaggcgattgacgaaccagcgtggtaccagagcacgggcctgaccgaagaaggcggcatcatgctgtaccacaagctgccggggcgcttattgaagcgaaccgcgaaccgaaaggacgcggcattcgtaagcgcaacattgtcgatcaatggcaagtttgatgactttaagcgttccctcggtattagcgcgcaaagtgaactatcttccatcttagaacccatccgtcacgggcagcttaagtttgaggtgtcagacgttgagatcaacacacccgaatggtcaagcctgatcaagcgcaccgtagaacaagcggcccagcaagggaaggtactcgttgccacgccaagcaacgagcttgcaatgactctaggccacttgattgccagtgcgacggtcaggacagacgagaccacgggcgaagcggcggctcgtatgggcaacagcaacgtcttaatagctgccggcgcatgggcgggactcgacacacccatccaatggcacagcatcgtcgtcccgcgaattccctatgagcgaccgatcaagctcgacgggcacttggagagcagttttctagactctcgtaacacggcggtccgtaggatgcgccaagtgatcggtcgtggcttgcgaagcccgagtgccacatgcacggtctacattctcgattcgcgctataagaacatcgaagccttcatacccaatcgctttcgcacggattgggcggggaagcgatttttggagggccggcagcaggaacacatgctttccgattttgagcgcaattcttccgtgagaaaaaacgcgttgcaacattacggtatgaagtgtatgagttgcggatttcttccgcgcgacagtaggcaattggatgtgcaccatctacatccgctctctgagggcgaacgccggacgtcgcttgacgatctcgcggtgctgtgcgcgaactgccaccggcttgcgcactcggttagccccccaatcccgatccctgagttgaagcggctgcacacaaacgaagcgtaacgcgagagcaaccattggctgagtacccgtgccaaacgtaaacaacgccaagcggcccgctcgaactgacaggggctcacgtcgcagccatcaaaagcgcttcttcgggggtaagtcgcaggcggcactgactcttatcgatacgtaatggccactcgtatactcagtgaaactatgcgaagtgtacgtcccagtccgccgatcaatcttgcctccggtgtctatatttcttgccactgtgccgggggggaaatcaatcggttcaggggagcacttgatctccgattccgaccaaacacacgggacactgatggtcaccgggctcccgctctgcattgtcagggtaatgaactgcccgttttgaaatttcttaacctcccgatacacctgagtttctgttcctctgagtgaagattcgctaatcatcgtaccaacacatataagttctaagttgccctcctttttttgggcaattgaatcccctgcggtcaccagcgcaagaatcgctattgaacgaacgacttgtgtcttcaccaaagtttagtaataacgcttcatgcccgcccgacttctaagcgacactgaattgttctgaatccactttgagcccaaaggcgtagtgagattattaaaaaaagtgaagaatactttgctcagaaacatctaatcaagttgttcacggctgagcaattcatggttcggttacccggtagggtgatcgaataattctgcatctgtggtcgcgtgggtggcactggcggaagccctgacatagctcggcccgcatttgcaacattttcagagaaatggggggacgttccagagccaagcgcaaaaaagaacttactcgcgttaaaccacgcattggcttcacgaaggttcttttgtctttcaacttccttttcatacgccactttttgttcttcataccggcgcatatcttcgtcatacgcacgctgccgcgcagccaaatcctgccgcgcaagatcgatcttctgacgacactcggcgtaatgaggcgtccccagacggaacccatactggtaacaagtttgatggtctgcgctaccgtcaccacgggccaagtcctcttcctgtgcccgctgttgttgctgtgcatcctgtctctgctgctgctccgctcttacccgctcaccttgcgcttgtgagcccttagcccgccgatctagctcaaggacgcactctccatatgctggagtacgctttttaaagccaagctcttggcatgtcttctcgtactccgacagattcgcagcaaatacaactccgccaagtagaccaagagctacaagcgctactttgataattggagtacgcattttccgtatgcctccgtgtttggtttgaagcctagatcagtgcactgcttctttgcttcgcccattgtgaatctcggtgcgggggtcggtgcttgactttgctcggctgcagcggggctcggggatggtgccctgacagcttcgggtcgctgccgtgtctctctttcgcgctctaatcggatcgtcactttcacctgttcgactaaacggatcatcgcttgcgcatcagaataaagcttcgccccatagtctccgtacttgtgcctttccgttggaaggacctgaatgacgctttcgaaatccgaaatagccaagtcaaattcctttaatttcagctgtgccaaccctctttggaagtaatgaattgacactttgtagtttctatcatagccgcggctttgtgcaataattaacccctgcgtagcgctctcaactgcgcgccgatagtctcccttcttgtaccattcggcggcttgatcggtataagcactcacaagaagatagggatcagtctggcacccgacaatgcccattgccagagaagtgcataaagctatcttgataattggagcacgcattttccgtgtgcctccgttccagccttaaaaccgaggtcggcgcactgcctccttgcctcgtccattgtgaatctcggtgctgatgccggcgcttgatcagatgggcgctttggggtgtcgaggacagaggactggactagcctgtcaccttcccacctgcctgattcaagaatcgatccgttcgccgcgtagagagtcccctgaccgttgcgcttaccatcccgccactcaccgacatactcctcaccgctcgggagtgtgtacctcccctgaccgtggtacttgccatcccaccactcaccgacgtacctccagcctctcgggaatgtgtacgtcccgataccgtggtacttgccatcccgccaatcgccggcgtacctctcgccgctcgagtacgtgagcatcccaaaacagttgtgccaatattcggcttgacgcgtagggcatacgggtaggaaggattgcgcgctggcgttcccggtgaacgctaccaacagccaaatcatggcaatgaagcgcatgggggatgtgaacgctctaggggttatgtcagacgcaagctgccggtgagagtgttcccgtgcaaggtcgttcctccaaaacccactgcacggggtgatagggatgtttggtcgaaagcggggtgtaccccccccggggggggtccggatagcagaaaagctggcacttcgccgcatgtcaaaaattggactcctcctcgcagtgtttagcaagagttcgcggaactctgatcttcacccagctgcacaagcacccagccgtttaaggcggtgcccccgggggtgggggtcacgaatcgaggatgcgcgccagtatgaggacgga

SEQ ID NO: 111 - DNA, 14215 bp, Artificial Sequence
  Synthetic Oligonucleotide
  misc_feature (1)..(9069): n is a, c, g, or t
nnnnnnnnnnnnnnnnnnnnnnnnnnnnnnnnnnnnnnnnnnnnnnnnnnnnnnnnnnnnnnnnnnnnnnnnnnnnnnnnnnnnnnnnnnnnnnnnnnnnnnnnnnnnnnnnnnnnnnnnnnnnnnnnnnnnnnnnnnnnnnnnnnnnnnnnnnnnnnnnnnnnnnnnnnnnnnnnnnnnnnnnnnnnnnnnnnnnnnnnnnnnnnnnnnnnnnnnnnnnnnnnnnnnnnnnnnnnnnnnnnnnnnnnnnnnnnnnnnnnnnnnnnnnnnnnnnnnnnnnnnnnnnnnnnnnnnnnnnnnnnnnnnnnnnnnnnnnnnnnnnnnnnnnnnnnnnnnnnnnnnnnnnnnnnnnnnnnnnnnnnnnnnnnnnnnnnnnnnnnnnnnnnnnnnnnnnnnnnnnnnnnnnnnnnnnnnnnnnnnnnnnnnnnnnnnnnnnnnnnnnnnnnnnnnnnnnnnnnnnnnnnnnnnnnnnnnnnnnnnnnnnnnnnnnnnnnnnnnnnnnnnnnnnnnnnnnnnnnnnnnnnnnnnnnnnnnnnnnnnnnnnnnnnnnnnnnnnnnnnnnnnnnnnnnnnnnnnnnnnnnnnnnnnnnnnnnnnnnnnnnnnnnnnnnnnnnnnnnnnnnnnnnnnnnnnnnnnnnnnnnnnnnnnnnnnnnnnnnnnnnnnnnnnnnnnnnnnnnnnnnnnnnnnnnnnnnnnnnnnnnnnnnnnnnnnnnnnnnnnnnnnnnnnnnnnnnnnnnnnnnnnnnnnnnnnnnnnnnnnnnnnnnnnnnnnnnnnnnnnnnnnnnnnnnnnnnnnnnnnnnnnnnnnnnnnnnnnnnnnnnnnnnnnnnnnnnnnnnnnnnnnnnnnnnnnnnnnnnnnnnnnnnnnnnnnnnnnnnnnnnnnnnnnnnnnnnnnnnnnnnnnnnnnnnnnnnnnnnnnnnnnnnnnnnnnnnnnnnnnnnnnnnnnnnnnnnnnnnnnnnnnnnnnnnnnnnnnnnnnnnnnnnnnnnnnnnnnnnnnnnnnnnnnnnnnnnnnnnnnnnnnnnnnnnnnnnnnnnnnnnnnnnnnnnnnnnnnnnnnnnnnnnnnnnnnnnnnnnnnnnnnnnnnnnnnnnnnnnnnnnnnnnnnnnnnnnnnnnnnnnnnnnnnnnnnnnnnnnnnnnnnnnnnnnnnnnnnnnnnnnnnnnnnnnnnnnnnnnnnnnnnnnnnnnnnnnnnnnnnnnnnnnnnnnnnnnnnnnnnnnnnnnnnnnnnnnnnnnnnnnnnnnnnnnnnnnnnnnnnnnnnnnnnnnnnnnnnnnnnnnnnnnnnnnnnnnnnnnnnnnnnnnnnnnnnnnnnnnnnnnnnnnnnnnnnnnnnnnnnnnnnnnnnnnnnnnnnnnnnnnnnnnnnnnnnnnnnnnnnnnnnnnnnnnnnnnnnnnnnnnnnnnnnnnnnnnnnnnnnnnnnnnnnnnnnnnnnnnnnnnnnnnnnnnnnnnnnnnnnnnnnnnnnnnnnnnnnnnnnnnnnnnnnnnnnnnnnnnnnnnnnnnnnnnnnnnnnnnnnnnnnnnnnnnnnnnnnnnnnnnnnnnnnnnnnnnnnnnnnnnnnnnnnnnnnnnnnnnnnnnnnnnnnnnnnnnnnnnnnnnnnnnnnnnnnnnnnnnnnnnnnnnnnnnnnnnnnnnnnnnnnnnnnnnnnnnnnnnnnnnnnnnnnnnnnnnnnnnnnnnnnnnnnnnnnnnnnnnnnnnnnnnnnnnnnnnnnnnnnnnnnnnnnnnnnnnnnnnnnnnnnnnnnnnnnnnnnnnnnnnnnnnnnnnnnnnnnnnnnnnnnnnnnnnnnnnnnnnnnnnnnnnnnnnnnnnnnnnnnnnnnnnnnnnnnnnnnnnnnnnnnnnnnnnnnnnnnnnnnnnnnnnnnnnnnnnnnnnnnnnnnnnnnnnnnnnnnnnnnnnnnnnnnnnnnnnnnnnnnnnnnnnnnnnnnnnnnnnnnnnnnnnnnnnnnnnnnnnnnnnnnnnnnnnnnnnnnnnnnnnnnnnnnnnnnnnnnnnnnnnnnnnnnnnnnnnnnnnnnnnnnnnnnnnnnnnnnnnnnnnnnnnnnnnnnnnnnnnnnnnnnnnnnnnnnnnnnnnnnnnnnnnnnnnnnnnnnnnnnnnnnnnnnnnnnnnnnnnnnnnnnnnnnnnnnnnnnnnnnnnnnnnnnnnnnnnnnnnnnnnnnnnnnnnnnnnnnnnnnnnnnnnnnnnnnnnnnnnnnnnnnnnnnnnnnnnnnnnnnnnnnnnnnnnnnnnnnnnnnnnnnnnnnnnnnnnnnnnnnnnnnnnnnnnnnnnnnnnnnnnnnnnnnnnnnnnnnnnnnnnnnnnnnnnnnnnnnnnnnnnnnnnnnnnnnnnnnnnnnnnnnnnnnnnnnnnnnnnnnnnnnnnnnnnnnnnnnnnnnnnnnnnnnnnnnnnnnnnnnnnnnnnnnnnnnnnnnnnnnnnnnnnnnnnnnnnnnnnnnnnnnnnnnnnnnnnnnnnnnnnnnnnnnnnnnnnnnnnnnnnnnnnnnnnnnnnnnnnnnnnnnnnnnnnnnnnnnnnnnnnnnnnnnnnnnnnnnnnnnnnnnnnnnnnnnnnnnnnnnnnnnnnnnnnnnnnnnnnnnnnnnnnnnnnnnnnnnnnnnnnnnnnnnnnnnnnnnnnnnnnnnnnnnnnnnnnnnnnnnnnnnnnnnnnnnnnnnnnnnnnnnnnnnnnnnnnnnnnnnnnnnnnnnnnnnnnnnnnnnnnnnnnnnnnnnnnnnnnnnnnnnnnnnnnnnnnnnnnnnnnnnnnnnnnnnnnnnnnnnnnnnnnnnnnnnnnnnnnnnnnnnnnnnnnnnnnnnnnnnnnnnnnnnnnnnnnnnnnnnnnnnnnnnnnnnnnnnnnnnnnnnnnnnnnnnnnnnnnnnnnnnnnnnnnnnnnnnnnnnnnnnnnnnnnnnnnnnnnnnnnnnnnnnnnnnnnnnnnnnnnnnnnnnnnnnnnnnnnnnnnnnnnnnnnnnnnnnnnnnnnnnnnnnnnnnnnnnnnnnnnnnnnnnnnnnnnnnnnnnnnnnnnnnnnnnnnnnnnnnnnnnnnnnnnnnnnnnnnnnnnnnnnnnnnnnnnnnnnnnnnnnnnnnnnnnnnnnnnnnnnnnnnnnnnnnnnnnnnnnnnnnnnnnnnnnnnnnnnnnnnnnnnnnnnnnnnnnnnnnnnnnnnnnnnnnnnnnnnnnnnnnnnnnnnnnnnnnnnnnnnnnnnnnnnnnnnnnnnnnnnnnnnnnnnnnnnnnnnnnnnnnnnnnnnnnnnnnnnnnnnnnnnnnnnnnnnnnnnnnnnnnnnnnnnnnnnnnnnnnnnnnnnnnnnnnnnnnnnnnnnnnnnnnnnnnnnnnnnnnnnnnnnnnnnnnnnnnnnnnnnnnnnnnnnnnnnnnnnnnnnnnnnnnnnnnnnnnnnnnnnnnnnnnnnnnnnnnnnnnnnnnnnnnnnnnnnnnnnnnnnnnnnnnnnnnnnnnnnnnnnnnnnnnnnnnnnnnnnnnnnnnnnnnnnnnnnnnnnnnnnnnnnnnnnnnnnnnnnnnnnnnnnnnnnnnnnnnnnnnnnnnnnnnnnnnnnnnnnnnnnnnnnnnnnnnnnnnnnnnnnnnnnnnnnnnnnnnnnnnnnnnnnnnnnnnnnnnnnnnnnnnnnnnnnnnnnnnnnnnnnnnnnnnnnnnnnnnnnnnnnnnnnnnnnnnnnnnnnnnnnnnnnnnnnnnnnnnnnnnnnnnnnnnnnnnnnnnnnnnnnnnnnnnnnnnnnnnnnnnnnnnnnnnnnnnnnnnnnnnnnnnnnnnnnnnnnnnnnnnnnnnnnnnnnnnnnnnnnnnnnnnnnnnnnnnnnnnnnnnnnnnnnnnnnnnnnnnnnnnnnnnnnnnnnnnnnnnnnnnnnnnnnnnnnnnnnnnnnnnnnnnnnnnnnnnnnnnnnnnnnnnnnnnnnnnnnnnnnnnnnnnnnnnnnnnnnnnnnnnnnnnnnnnnnnnnnnnnnnnnnnnnnnnnnnnnnnnnnnnnnnnnnnnnnnnnnnnnnnnnnnnnnnnnnnnnnnnnnnnnnnnnnnnnnnnnnnnnnnnnnnnnnnnnnnnnnnnnnnnnnnnnnnnnnnnnnnnnnnnnnnnnnnnnnnnnnnnnnnnnnnnnnnnnnnnnnnnnnnnnnnnnnnnnnnnnnnnnnnnnnnnnnnnnnnnnnnnnnnnnnnnnnnnnnnnnnnnnnnnnnnnnnnnnnnnnnnnnnnnnnnnnnnnnnnnnnnnnnnnnnnnnnnnnnnnnnnnnnnnnnnnnnnnnnnnnnnnnnnnnnnnnnnnnnnnnnnnnnnnnnnnnnnnnnnnnnnnnnnnnnnnnnnnnnnnnnnnnnnnnnnnnnnnnnnnnnnnnnnnnnnnnnnnnnnnnnnnnnnnnnnnnnnnnnnnnnnnnnnnnnnnnnnnnnnnnnnnnnnnnnnnnnnnnnnnnnnnnnnnnnnnnnnnnnnnnnnnnnnnnnnnnnnnnnnnnnnnnnnnnnnnnnnnnnnnnnnnnnnnnnnnnnnnnnnnnnnnnnnnnnnnnnnnnnnnnnnnnnnnnnnnnnnnnnnnnnnnnnnnnnnnnnnnnnnnnnnnnnnnnnnnnnnnnnnnnnnnnnnnnnnnnnnnnnnnnnnnnnnnnnnnnnnnnnnnnnnnnnnnnnnnnnnnnnnnnnnnnnnnnnnnnnnnnnnnnnnnnnnnnnnnnnnnnnnnnnnnnnnnnnnnnnnnnnnnnnnnnnnnnnnnnnnnnnnnnnnnnnnnnnnnnnnnnnnnnnnnnnnnnnnnnnnnnnnnnnnnnnnnnnnnnnnnnnnnnnnnnnnnnnnnnnnnnnnnnnnnnnnnnnnnnnnnnnnnnnnnnnnnnnnnnnnnnnnnnnnnnnnnnnnnnnnnnnnnnnnnnnnnnnnnnnnnnnnnnnnnnnnnnnnnnnnnnnnnnnnnnnnnnnnnnnnnnnnnnnnnnnnnnnnnnnnnnnnnnnnnnnnnnnnnnnnnnnnnnnnnnnnnnnnnnnnnnnnnnnnnnnnnnnnnnnnnnnnnnnnnnnnnnnnnnnnnnnnnnnnnnnnnnnnnnnnnnnnnnnnnnnnnnnnnnnnnnnnnnnnnnnnnnnnnnnnnnnnnnnnnnnnnnnnnnnnnnnnnnnnnnnnnnnnnnnnnnnnnnnnnnnnnnnnnnnnnnnnnnnnnnnnnnnnnnnnnnnnnnnnnnnnnnnnnnnnnnnnnnnnnnnnnnnnnnnnnnnnnnnnnnnnnnnnnnnnnnnnnnnnnnnnnnnnnnnnnnnnnnnnnnnnnnnnnnnnnnnnnnnnnnnnnnnnnnnnnnnnnnnnnnnnnnnnnnnnnnnnnnnnnnnnnnnnnnnnnnnnnnnnnnnnnnnnnnnnnnnnnnnnnnnnnnnnnnnnnnnnnnnnnnnnnnnnnnnnnnnnnnnnnnnnnnnnnnnnnnnnnnnnnnnnnnnnnnnnnnnnnnnnnnnnnnnnnnnnnnnnnnnnnnnnnnnnnnnnnnnnnnnnnnnnnnnnnnnnnnnnnnnnnnnnnnnnnnnnnnnnnnnnnnnnnnnnnnnnnnnnnnnnnnnnnnnnnnnnnnnnnnnnnnnnnnnnnnnnnnnnnnnnnnnnnnnnnnnnnnnnnnnnnnnnnnnnnnnnnnnnnnnnnnnnnnnnnnnnnnnnnnnnnnnnnnnnnnnnnnnnnnnnnnnnnnnnnnnnnnnnnnnnnnnnnnnnnnnnnnnnnnnnnnnnnnnnnnnnnnnnnnnnnnnnnnnnnnnnnnnnnnnnnnnnnnnnnnnnnnnnnnnnnnnnnnnnnnnnnnnnnnnnnnnnnnnnnnnnnnnnnnnnnnnnnnnnnnnnnnnnnnnnnnnnnnnnnnnnnnnnnnnnnnnnnnnnnnnnnnnnnnnnnnnnnnnnnnnnnnnnnnnnnnnnnnnnnnnnnnnnnnnnnnnnnnnnnnnnnnnnnnnnnnnnnnnnnnnnnnnnnnnnnnnnnnnnnnnnnnnnnnnnnnnnnnnnnnnnnnnnnnnnnnnnnnnnnnnnnnnnnnnnnnnnnnnnnnnnnnnnnnnnnnnnnnnnnnnnnnnnnnnnnnnnnnnnnnnnnnnnnnnnnnnnnnnnnnnnnnnnnnnnnnnnnnnnnnnnnnnnnnnnnnnnnnnnnnnnnnnnnnnnnnnnnnnnnnnnnnnnnnnnnnnnnnnnnnnnnnnnnnnnnnnnnnnnnnnnnnnnnnnnnnnnnnnnnnnnnnnnnnnnnnnnnnnnnnnnnnnnnnnnnnnnnnnnnnnnnnnnnnnnnnnnnnnnnnnnnnnnnnnnnnnnnnnnnnnnnnnnnnnnnnnnnnnnnnnnnnnnnnnnnnnnnnnnnnnnnnnnnnnnnnnnnnnnnnnnnnnnnnnnnnnnnnnnnnnnnnnnnnnnnnnnnnnnnnnnnnnnnnnnnnnnnnnnnnnnnnnnnnnnnnnnnnnnnnnnnnnnnnnnnnnnnnnnnnnnnnnnnnnnnnnnnnnnnnnnnnnnnnnnnnnnnnnnnnnnnnnnnnnnnnnnnnnnnnnnnnnnnnnnnnnnnnnnnnnnnnnnnnnnnnnnnnnnnnnnnnnnnnnnnnnnnnnnnnnnnnnnnnnnnnnnnnnnnnnnnnnnnnnnnnnnnnnnnnnnnnnnnnnnnnnnnnnnnnnnnnnnnnnnnnnnnnnnnnnnnnnnnnnnnnnnnnnnnnnnnnnnnnnnnnnnnnnnnnnnnnnnnnnnnnnnnnnnnnnnnnnnnnnnnnnnnnnnnnnnnnnnnnnnnnnnnnnnnnnnnnnnnnnnnnnnnnnnnnnnnnnnnnnnnnnnnnnnnnnnnnnnnnnnnnnnnnnnnnnnnnnnnnnnnnnnnnnnnnnnnnnnnnnnnnnnnnnnnnnnnnnnnnnnnnnnnnnnnnnnnnnnnnnnnnnnnnnnnnnnnnnnnnnnnnnnnnnnnnnnnnnnnnnnnnnnnnnnnnnnnnnnnnnnnnnnnnnnnnnnnnnnnnnnnnnnnnnnnnnnnnnnnnnnnnnnnnnnnnnnnnnnnnnnnnnnnnnnnnnnnnnnnnnnnnnnnnnnnnnnnnnnnnnnnnnnnnnnnnnnnnnnnnnnnnnnnnnnnnnnnnnnnnnnnnnnnnnnnnnnnnnnnnnnnnnnnnnnnnnnnnnnnnnnnnnnnnnnnnnnnnnnnnnnnnnnnnnnnnnnnnnnnnnnnnnnnnnnnnnnnnnnnnnnnnnnnnnnnnnnnnnnnnnnnnnnnnnnnnnnnnnnnnnnnnnnnnnnnnnnnnnnnnnnnnnnnnnnnnnnnnnnnnnnnnnnnnnnnnnnnnnnnnnnnnnnnnnnnnnnnnnnnnnnnnnnnnnnnnnnnnnnnnnnnnnnnnnnnnnnnnnnnnnnnnnnnnnnnnnnnnnnnnnnnnnnnnnnnnnnnnnnnnnnnnnnnnnnnnnnnnnnnnnnnnnnnnnnnnnnnnnnnnnnnnnnnnnnnnnnnnnnnnnnnnnnnnnnnnnnnnnnnnnnnnnnnnnnnnnnnnnnnnnnnnnnnnnnnnnnnnnnnnnnnnnnnnnnnnnnnnnnnnnnnnnnnnnnnnnnnnnnnnnnnnnnnnnnnnnnnnnnnnnnnnnnnnnnnnnnnnnnnnnnnnnnnnnnnnnnnnnnnnnnnnnnnnnnnnnnnnnnnnnnnnnnnnnnnnnnnnnnnnnnnnnnnnnnnnnnnnnnnnnnnnnnnnnnnnnnnnnnnnnnnnnnnnnnnnnnnnnnnnnnnnnnnnnnnnnnnnnnnnnnnnnnnnnnnnnnnnnnnnnnnnnnnnnnnnnnnnnnnnnnnnnnnnnnnnnnnnnnnnnnnnnnnnnnnnnnnnnnnnnnnnnnnnnnnnnnnnnnnnnnnnnnnnnnnnnnnnnnnnnnnnnnnnnnnnnnnnnnnnnnnnnnnnnnnnnnnnnnnnnnnnnnnnnnnnnnnnnnnnnnnnnnnnnnnnnnnnnnnnnnnnnnnnnnnnnnnnnnnnnnnnnnnnnnnnnnnnnnnnnnnnnnnnnnnnnnnnnnnnnnnnnnnnnnnnnnnnnnnnnnnnnnnnnnnnnnnnnnnnnnnnnnnnnnnnnnnnnnnnnnnnnnnnnnnnnnnnnnnnnnnnnnnnnnnnnnnnnnnnnnnnnnnnnnnnnnnnnnnnnnnnnnnnnnnnnnnnnnnnnnnnnnnnnnnnnnnnnnnnnnnnnnnnnnnnnnnnnnnnnnnnnnnnnnnnnnnnnnnnnnnnnnnnnnnnnnnnnnnnnnnnnnnnnnnnnnnnnnnnnnnnnnnnnnnnnnnnnnnnnnnnnnnnnnnnnnnnnnnnnnnnnnnnnnnnnnnnnnnnnnnnnnnnnnnnnnnnnnnnnnnnnnnnnnnnnnnnnnnnnnnnnnnnnnnnnnnnnnnnnnnnnnnnnnnnnnnnnnnnnnnnnnnnnnnnnnnnnnnnnnnnnnnnnnnnnnnnnnnnnnnnnnnnnnnnnnnnnnnnnnnnnnnnnnnnnnnnnnnnnnnnnnnnnnnnnnnnnnnnnnnnnnnnnnnnnnnnnnnnnnnnnnnnnnnnnnnnnnnnnnnnnnnnnnnnnnnnnnnnnnnnnnnnnnnnnnnnnnnnnnnnnnnnnnnnnnnnnnnnnnnnnnnnnnnnnnnnnnnnnnnnnnnnnnnnnnnnnnnnnnnnnnnnnnnnnnnnnnnnnnnnnnnnnnnnnnnnnnnnnnnnnnnnnnnnnnnnnnnnnnnnnnnnnnnnnnnnnnnnnnnnnnnnnnnnnnnnnnnnnnnnnnnnnnnnnnnnnnnnnnnnnnnnnnnnnnnnnnnnnnnnnnnnnnnnnnnnnnnnnnnnnnnnnnnnnnnnnnnnnnnnnnnnnnnnnnnnnnnnnnnnnnnnnnnnnnnnnnnnnnnnnnnnnnnnnnnnnnnnnnnnnnnnnnnnnnnnnnnnnnnnnnnnnnnnnnnnnnnnnnnnnnnnnnnnnnnnnnnnnnnnnnnnnnnnnnnnnnnnnnnnnnnnnnnnnnnnnnnnnnnnnnnnnnnnnnnnnnnnnnnnnnnnnnnnnnnnnnnnnnnnnnnnnnnnnnnnnnnnnnnnnnnnnnnnnnnnnnnnnnnnnnnnnnnnnnnnnnnnnnnnnnnnnnnnnnnnnnnnnnnnnnnnnnnnnnnnnnnnnnnnnnnnnnnnnnnnnnnnnnnnnnnnnnnnnnnnnnnnnnnnnnnnnnnnnnnnctactggaacgttgacgaacgccacacgattagacagtgaggtcaagccaccctgaaattgggtggctactggaacacatactgcgttgaatacatctacaaacctggtcaagccaccctgaaattgggtggctactggaacagcgtccatatgcgcaatgcgttcccagctggtcaagccaccctgaaattgggtggctactggaacaatatacgattgggacacaaaagacatttgggtcaagccaccctgaaattgggtggctactggaacgacggtggctatgtcagaccaactgtttaaggtcaagccaccctgaaattgggtggctactggaacacaaatagacaatgcccgtcggtacccgctaggtcaagccaccctgaaattgggtggctactggaacttggccgatgctttgcactgttgctgggctggtcaagccaccctgaaattgggtggctactggaacagtgcaggcaacatagaggatgcgagttgaggtcaagccaccctgaaattgggtggctactggaacagtgcgtgctgagttagctgatgaatcacgggtcaagccaccctgaaattgggtggctactggaactaaaacacattacgcttctcatcgtactccggtcaagccaccctgaaattgggtggctactggaactagtaactgccctcgatagcagcatgaaaaggtcaagccaccctgaaattgggtggctactggaaccgtggacatctatccgacctgctgcccagcggtcaagccaccctgaaattgggtggctactggaactagtcagtgagatatttataaatgacttttggtcaagccaccctgaaattgggtggctactgcattgtgtgcaacctccccccggttggtgtaacttacttcgttagtgacctcgcaaaaggtattcatgtttcgcagcccagagcagcagcactttagtgccatagtcagtaagcacattgctcaacccgatgccccgttattactagagggtggtacgggcttgggcaagacacgcgcatacctagcttcgattgggcaagcacgtgtggcgatcgttctgccgacccatcaacttatcgatcaaatgctcggatcagcagatcttcgggcggttggtctgacggatgtgaaagcctttcgtcctgctagattttatgaggcccgtgcggaatatgaaaaagctcgtgaacaggcaaaaaacgcgcaagtcatgctttgcacggcagcctcagtcattatcgatcagcgcttagacggggaatacaacggtatcaccacggaccgtgagtacattatcttcgacgaggcagaccagttgcccgacatggcagcgttgcagtcagatttcactatttctcagcatgacctgtccgaacttggtatcaagctaataacagccgatcaggcattggcagacatcgtggctaaaaagccgcgtacagttcaacccgagctccgtgcggcagccaagttaatgcttgaggtgctggcgcaacctgcgtggtaccacgcctgtggtcaagatgatcagggtggccttgttctgacacacaagctcccgggaaggttgttgaagaaaatcagtaataggccccgcacggcttttatcagtgcaacgctatcggtgtctggaaagtttcaaaatttcaaaatgtcgatgggtattgaaaacgaatcgatgctgtcgaccattattgagcctattagacacggttctcttacctttcataccgttgatgccgttgttgatacacccgagtggattgatgctgttgtcgatgccgtcaaccaatctcccaaaccaaccttggttgcgactacttctcatgacctgactcaagttttagctaagcgactgccagacgccacagcgcgtttaaatgatgagaccgctgccatggcttccgaacgggttgatcagggtggcgttcttatagcagcaggagcatgggcagggcttgacacggcggttcgctggcgttcgatcgtagtaccgagagtgccatacagcaagccagtggtcgttgagggtgatgtgacaacaagttaccttgatgcaagaaacactgccatacgacgcctgaggcaagtcatagggcgagggctgagaacgccagacgcagtgtgtgacatctatatcttagacggacgttatgatcgtttggaagcgtttgtgccggagagatttaagactgcttggagagatcgagataaccaatctttcttagaaggtgcgaggaaagaagttgttttgagtaaagccgagcgtgatccgatgctgcgccaaacagcaatacggaaatatggtttggtatgtatggcttgtggctatgttccaaaggtatcaacgcaaatagacgttcatcacaaggatccaattgcggagggtgagcgtaaaacaacggtagccgacgtacttgttttgtgtgcgaattgtcacagatttgcgcatagcgagtcacctccgcttgaacttgaagcaatacgtctttaagttaggttgtaaactaaaaatcaagggcagaagaccggctgcataagtgtccatccgtttattaaaaaataaaatcttatgatcaagttagccctacttacggtatccatagctgctagcgcgatgagtgtggctagttcgtatacacccgagcaggtgcgatctgcagtcaaacaggcagggggtgctgagcgctttattgtcgagattgcacagaacacggcaaagatgtcgggacagatgttagacgatcaaacgcagttaactggttctgttgcctttgaaagaacgatcgtctactacttgcgtatggtgaattacgataagagagatatccagaacatcagtgcttttcgacgaaaagtggctagcctgttggcaccatcagtatgcacagcacccctcgcgtcaattttgataaatgagtatcgtgctgagtacaagtacatggcatattctaagtcgcgtgaatacttatttgaatacggattcaaccgaaacacttgtgcgccaagctaccgttggtagcggatacattacctcgacaattacggaactcgaaagtctgaaagaaggcacacaaccgtggaggtgggctctattcaattttgttttttggtcgtcgcccccggagtttcacttcctctgcaaagagtccaattttgttccctaagttgttgacgccggttgaaaactgaccaggtggtcagtattcaaccggcgccaacagccaagagaccaaaaagtgcatgacacacgtgacctgaagacaaaagggctgagcgtgattagagagtgcaaacttaatcaaaacaagttaagctttataagcgatcaagcgtagctaaggacatacccatatgttgcaaactcgactagcaatgctactcgtctcctgtgtaatcacagccttaactggttgcgccaacatatccgttccaaccggaactagtgaggaaaggtacctaaatacaagctcggtttcgcctgtagccaccgtcatttactcggctaaatacgatccaattggtcaaacaatttatttggaagttagccaatacaaattgcagcagttgtacaccgtacccaaacacttcaacaccgcatcgcgcaccattgaattgagttaccccaatgcgaaaccgaaaaataattacaagtgggaatcccaaaaaattagttggttttccttatatcagatgcggcaggtttcattgacctcgcagggaggggattcgatttccgtacccgtagacctaaaaaatgagcgcgttgaactcgaattaagtggtgtgattgataagcttcaccctaacgtcctttacaaggtagcttgtgcttcttgcactccttgggtttataagaagttaatcccatctgaatatttgccagcccctcctagtaatagcaacgaagtcagcttttctatccttcctcctgaaaaggtctcaatactgaacaaattagaagatctacgaaaagctcaactggcggagaaaagagcgcgggagactgaagcccacgagttggaacagcgaatggctaaagagaaacgtgaattagagctgaaactggcccgtgaaaagcgtgagagggagcagcagttagccgcagaaaagcgtgagcgcgatgctcgaataagaacagcggatgcagaaagaaagcgcgaagccgccagagtcgtgcgagaaggcgatggaagcaccgatgacttagtctgcaaaaaatacgggtttaggccaaatacgcaagcttatgccaattgcagactacaaatcgacgttgcaaaacgggagatgcaacagcaacaggctcagtatatggcccaacagcaacagttcgaagctgctcaagaaactgcaagagaaagacgacagaacgaattcttgttgggaatgggattgcgcatgatgggcggtcagagtcctgctggggcttatgttgatcagtcagtgggagcacctatgtatcagccacccccaccaagcacacgtacttactcatttccaaatggccgaatgatgacctgcacttccaatgggagttttacgaattgttattgaaggttgttttcacctgtgctgtaagtgccaattgctttctaaaagcgtctaaaaaattagggagtacctgacggataactacgataataataaactgcaacatcataattaatttagcgaatccaaaatttaaccggttgagttcaaaagtgaagtgcaacactaaccttgaggtactgtgttgcgatgaaaaccaaatacaagcaacttaattgtgaagagcgaattttgattcagctgagccttgagaaaggaagcactatacgggccattgcgcttagcttggaccgaagcgcgagctccataagtcgagagctggctcgtaaccagtggtgtagtcctcaggcacaggcttttaggcctggcaggtccgctttggccggtggttaccgagctgttcttgctcaacaacgggctcgcgtggctcgctcgagtggtcgcaaacccccgctgttggcgtctgatggtttcctgtgggctcaagtccagaagttgctcaaacagaggtactctccggagcagatcgcgggcatactgccacgtatgtaccccgatgagctctc

SEQ ID NO: 112 - DNA, 14202 bp, Artificial Sequence
  Synthetic Oligonucleotide
  misc_feature (1)..(9999): n is a, c, g, or t
nnnnnnnnnnnnnnnnnnnnnnnnnnnnnnnnnnnnnnnnnnnnnnnnnnnnnnnnnnnnnnnnnnnnnnnnnnnnnnnnnnnnnnnnnnnnnnnnnnnnnnnnnnnnnnnnnnnnnnnnnnnnnnnnnnnnnnnnnnnnnnnnnnnnnnnnnnnnnnnnnnnnnnnnnnnnnnnnnnnnnnnnnnnnnnnnnnnnnnnnnnnnnnnnnnnnnnnnnnnnnnnnnnnnnnnnnnnnnnnnnnnnnnnnnnnnnnnnnnnnnnnnnnnnnnnnnnnnnnnnnnnnnnnnnnnnnnnnnnnnnnnnnnnnnnnnnnnnnnnnnnnnnnnnnnnnnnnnnnnnnnnnnnnnnnnnnnnnnnnnnnnnnnnnnnnnnnnnnnnnnnnnnnnnnnnnnnnnnnnnnnnnnnnnnnnnnnnnnnnnnnnnnnnnnnnnnnnnnnnnnnnnnnnnnnnnnnnnnnnnnnnnnnnnnnnnnnnnnnnnnnnnnnnnnnnnnnnnnnnnnnnnnnnnnnnnnnnnnnnnnnnnnnnnnnnnnnnnnnnnnnnnnnnnnnnnnnnnnnnnnnnnnnnnnnnnnnnnnnnnnnnnnnnnnnnnnnnnnnnnnnnnnnnnnnnnnnnnnnnnnnnnnnnnnnnnnnnnnnnnnnnnnnnnnnnnnnnnnnnnnnnnnnnnnnnnnnnnnnnnnnnnnnnnnnnnnnnnnnnnnnnnnnnnnnnnnnnnnnnnnnnnnnnnnnnnnnnnnnnnnnnnnnnnnnnnnnnnnnnnnnnnnnnnnnnnnnnnnnnnnnnnnnnnnnnnnnnnnnnnnnnnnnnnnnnnnnnnnnnnnnnnnnnnnnnnnnnnnnnnnnnnnnnnnnnnnnnnnnnnnnnnnnnnnnnnnnnnnnnnnnnnnnnnnnnnnnnnnnnnnnnnnnnnnnnnnnnnnnnnnnnnnnnnnnnnnnnnnnnnnnnnnnnnnnnnnnnnnnnnnnnnnnnnnnnnnnnnnnnnnnnnnnnnnnnnnnnnnnnnnnnnnnnnnnnnnnnnnnnnnnnnnnnnnnnnnnnnnnnnnnnnnnnnnnnnnnnnnnnnnnnnnnnnnnnnnnnnnnnnnnnnnnnnnnnnnnnnnnnnnnnnnnnnnnnnnnnnnnnnnnnnnnnnnnnnnnnnnnnnnnnnnnnnnnnnnnnnnnnnnnnnnnnnnnnnnnnnnnnnnnnnnnnnnnnnnnnnnnnnnnnnnnnnnnnnnnnnnnnnnnnnnnnnnnnnnnnnnnnnnnnnnnnnnnnnnnnnnnnnnnnnnnnnnnnnnnnnnnnnnnnnnnnnnnnnnnnnnnnnnnnnnnnnnnnnnnnnnnnnnnnnnnnnnnnnnnnnnnnnnnnnnnnnnnnnnnnnnnnnnnnnnnnnnnnnnnnnnnnnnnnnnnnnnnnnnnnnnnnnnnnnnnnnnnnnnnnnnnnnnnnnnnnnnnnnnnnnnnnnnnnnnnnnnnnnnnnnnnnnnnnnnnnnnnnnnnnnnnnnnnnnnnnnnnnnnnnnnnnnnnnnnnnnnnnnnnnnnnnnnnnnnnnnnnnnnnnnnnnnnnnnnnnnnnnnnnnnnnnnnnnnnnnnnnnnnnnnnnnnnnnnnnnnnnnnnnnnnnnnnnnnnnnnnnnnnnnnnnnnnnnnnnnnnnnnnnnnnnnnnnnnnnnnnnnnnnnnnnnnnnnnnnnnnnnnnnnnnnnnnnnnnnnnnnnnnnnnnnnnnnnnnnnnnnnnnnnnnnnnnnnnnnnnnnnnnnnnnnnnnnnnnnnnnnnnnnnnnnnnnnnnnnnnnnnnnnnnnnnnnnnnnnnnnnnnnnnnnnnnnnnnnnnnnnnnnnnnnnnnnnnnnnnnnnnnnnnnnnnnnnnnnnnnnnnnnnnnnnnnnnnnnnnnnnnnnnnnnnnnnnnnnnnnnnnnnnnnnnnnnnnnnnnnnnnnnnnnnnnnnnnnnnnnnnnnnnnnnnnnnnnnnnnnnnnnnnnnnnnnnnnnnnnnnnnnnnnnnnnnnnnnnnnnnnnnnnnnnnnnnnnnnnnnnnnnnnnnnnnnnnnnnnnnnnnnnnnnnnnnnnnnnnnnnnnnnnnnnnnnnnnnnnnnnnnnnnnnnnnnnnnnnnnnnnnnnnnnnnnnnnnnnnnnnnnnnnnnnnnnnnnnnnnnnnnnnnnnnnnnnnnnnnnnnnnnnnnnnnnnnnnnnnnnnnnnnnnnnnnnnnnnnnnnnnnnnnnnnnnnnnnnnnnnnnnnnnnnnnnnnnnnnnnnnnnnnnnnnnnnnnnnnnnnnnnnnnnnnnnnnnnnnnnnnnnnnnnnnnnnnnnnnnnnnnnnnnnnnnnnnnnnnnnnnnnnnnnnnnnnnnnnnnnnnnnnnnnnnnnnnnnnnnnnnnnnnnnnnnnnnnnnnnnnnnnnnnnnnnnnnnnnnnnnnnnnnnnnnnnnnnnnnnnnnnnnnnnnnnnnnnnnnnnnnnnnnnnnnnnnnnnnnnnnnnnnnnnnnnnnnnnnnnnnnnnnnnnnnnnnnnnnnnnnnnnnnnnnnnnnnnnnnnnnnnnnnnnnnnnnnnnnnnnnnnnnnnnnnnnnnnnnnnnnnnnnnnnnnnnnnnnnnnnnnnnnnnnnnnnnnnnnnnnnnnnnnnnnnnnnnnnnnnnnnnnnnnnnnnnnnnnnnnnnnnnnnnnnnnnnnnnnnnnnnnnnnnnnnnnnnnnnnnnnnnnnnnnnnnnnnnnnnnnnnnnnnnnnnnnnnnnnnnnnnnnnnnnnnnnnnnnnnnnnnnnnnnnnnnnnnnnnnnnnnnnnnnnnnnnnnnnnnnnnnnnnnnnnnnnnnnnnnnnnnnnnnnnnnnnnnnnnnnnnnnnnnnnnnnnnnnnnnnnnnnnnnnnnnnnnnnnnnnnnnnnnnnnnnnnnnnnnnnnnnnnnnnnnnnnnnnnnnnnnnnnnnnnnnnnnnnnnnnnnnnnnnnnnnnnnnnnnnnnnnnnnnnnnnnnnnnnnnnnnnnnnnnnnnnnnnnnnnnnnnnnnnnnnnnnnnnnnnnnnnnnnnnnnnnnnnnnnnnnnnnnnnnnnnnnnnnnnnnnnnnnnnnnnnnnnnnnnnnnnnnnnnnnnnnnnnnnnnnnnnnnnnnnnnnnnnnnnnnnnnnnnnnnnnnnnnnnnnnnnnnnnnnnnnnnnnnnnnnnnnnnnnnnnnnnnnnnnnnnnnnnnnnnnnnnnnnnnnnnnnnnnnnnnnnnnnnnnnnnnnnnnnnnnnnnnnnnnnnnnnnnnnnnnnnnnnnnnnnnnnnnnnnnnnnnnnnnnnnnnnnnnnnnnnnnnnnnnnnnnnnnnnnnnnnnnnnnnnnnnnnnnnnnnnnnnnnnnnnnnnnnnnnnnnnnnnnnnnnnnnnnnnnnnnnnnnnnnnnnnnnnnnnnnnnnnnnnnnnnnnnnnnnnnnnnnnnnnnnnnnnnnnnnnnnnnnnnnnnnnnnnnnnnnnnnnnnnnnnnnnnnnnnnnnnnnnnnnnnnnnnnnnnnnnnnnnnnnnnnnnnnnnnnnnnnnnnnnnnnnnnnnnnnnnnnnnnnnnnnnnnnnnnnnnnnnnnnnnnnnnnnnnnnnnnnnnnnnnnnnnnnnnnnnnnnnnnnnnnnnnnnnnnnnnnnnnnnnnnnnnnnnnnnnnnnnnnnnnnnnnnnnnnnnnnnnnnnnnnnnnnnnnnnnnnnnnnnnnnnnnnnnnnnnnnnnnnnnnnnnnnnnnnnnnnnnnnnnnnnnnnnnnnnnnnnnnnnnnnnnnnnnnnnnnnnnnnnnnnnnnnnnnnnnnnnnnnnnnnnnnnnnnnnnnnnnnnnnnnnnnnnnnnnnnnnnnnnnnnnnnnnnnnnnnnnnnnnnnnnnnnnnnnnnnnnnnnnnnnnnnnnnnnnnnnnnnnnnnnnnnnnnnnnnnnnnnnnnnnnnnnnnnnnnnnnnnnnnnnnnnnnnnnnnnnnnnnnnnnnnnnnnnnnnnnnnnnnnnnnnnnnnnnnnnnnnnnnnnnnnnnnnnnnnnnnnnnnnnnnnnnnnnnnnnnnnnnnnnnnnnnnnnnnnnnnnnnnnnnnnnnnnnnnnnnnnnnnnnnnnnnnnnnnnnnnnnnnnnnnnnnnnnnnnnnnnnnnnnnnnnnnnnnnnnnnnnnnnnnnnnnnnnnnnnnnnnnnnnnnnnnnnnnnnnnnnnnnnnnnnnnnnnnnnnnnnnnnnnnnnnnnnnnnnnnnnnnnnnnnnnnnnnnnnnnnnnnnnnnnnnnnnnnnnnnnnnnnnnnnnnnnnnnnnnnnnnnnnnnnnnnnnnnnnnnnnnnnnnnnnnnnnnnnnnnnnnnnnnnnnnnnnnnnnnnnnnnnnnnnnnnnnnnnnnnnnnnnnnnnnnnnnnnnnnnnnnnnnnnnnnnnnnnnnnnnnnnnnnnnnnnnnnnnnnnnnnnnnnnnnnnnnnnnnnnnnnnnnnnnnnnnnnnnnnnnnnnnnnnnnnnnnnnnnnnnnnnnnnnnnnnnnnnnnnnnnnnnnnnnnnnnnnnnnnnnnnnnnnnnnnnnnnnnnnnnnnnnnnnnnnnnnnnnnnnnnnnnnnnnnnnnnnnnnnnnnnnnnnnnnnnnnnnnnnnnnnnnnnnnnnnnnnnnnnnnnnnnnnnnnnnnnnnnnnnnnnnnnnnnnnnnnnnnnnnnnnnnnnnnnnnnnnnnnnnnnnnnnnnnnnnnnnnnnnnnnnnnnnnnnnnnnnnnnnnnnnnnnnnnnnnnnnnnnnnnnnnnnnnnnnnnnnnnnnnnnnnnnnnnnnnnnnnnnnnnnnnnnnnnnnnnnnnnnnnnnnnnnnnnnnnnnnnnnnnnnnnnnnnnnnnnnnnnnnnnnnnnnnnnnnnnnnnnnnnnnnnnnnnnnnnnnnnnnnnnnnnnnnnnnnnnnnnnnnnnnnnnnnnnnnnnnnnnnnnnnnnnnnnnnnnnnnnnnnnnnnnnnnnnnnnnnnnnnnnnnnnnnnnnnnnnnnnnnnnnnnnnnnnnnnnnnnnnnnnnnnnnnnnnnnnnnnnnnnnnnnnnnnnnnnnnnnnnnnnnnnnnnnnnnnnnnnnnnnnnnnnnnnnnnnnnnnnnnnnnnnnnnnnnnnnnnnnnnnnnnnnnnnnnnnnnnnnnnnnnnnnnnnnnnnnnnnnnnnnnnnnnnnnnnnnnnnnnnnnnnnnnnnnnnnnnnnnnnnnnnnnnnnnnnnnnnnnnnnnnnnnnnnnnnnnnnnnnnnnnnnnnnnnnnnnnnnnnnnnnnnnnnnnnnnnnnnnnnnnnnnnnnnnnnnnnnnnnnnnnnnnnnnnnnnnnnnnnnnnnnnnnnnnnnnnnnnnnnnnnnnnnnnnnnnnnnnnnnnnnnnnnnnnnnnnnnnnnnnnnnnnnnnnnnnnnnnnnnnnnnnnnnnnnnnnnnnnnnnnnnnnnnnnnnnnnnnnnnnnnnnnnnnnnnnnnnnnnnnnnnnnnnnnnnnnnnnnnnnnnnnnnnnnnnnnnnnnnnnnnnnnnnnnnnnnnnnnnnnnnnnnnnnnnnnnnnnnnnnnnnnnnnnnnnnnnnnnnnnnnnnnnnnnnnnnnnnnnnnnnnnnnnnnnnnnnnnnnnnnnnnnnnnnnnnnnnnnnnnnnnnnnnnnnnnnnnnnnnnnnnnnnnnnnnnnnnnnnnnnnnnnnnnnnnnnnnnnnnnnnnnnnnnnnnnnnnnnnnnnnnnnnnnnnnnnnnnnnnnnnnnnnnnnnnnnnnnnnnnnnnnnnnnnnnnnnnnnnnnnnnnnnnnnnnnnnnnnnnnnnnnnnnnnnnnnnnnnnnnnnnnnnnnnnnnnnnnnnnnnnnnnnnnnnnnnnnnnnnnnnnnnnnnnnnnnnnnnnnnnnnnnnnnnnnnnnnnnnnnnnnnnnnnnnnnnnnnnnnnnnnnnnnnnnnnnnnnnnnnnnnnnnnnnnnnnnnnnnnnnnnnnnnnnnnnnnnnnnnnnnnnnnnnnnnnnnnnnnnnnnnnnnnnnnnnnnnnnnnnnnnnnnnnnnnnnnnnnnnnnnnnnnnnnnnnnnnnnnnnnnnnnnnnnnnnnnnnnnnnnnnnnnnnnnnnnnnnnnnnnnnnnnnnnnnnnnnnnnnnnnnnnnnnnnnnnnnnnnnnnnnnnnnnnnnnnnnnnnnnnnnnnnnnnnnnnnnnnnnnnnnnnnnnnnnnnnnnnnnnnnnnnnnnnnnnnnnnnnnnnnnnnnnnnnnnnnnnnnnnnnnnnnnnnnnnnnnnnnnnnnnnnnnnnnnnnnnnnnnnnnnnnnnnnnnnnnnnnnnnnnnnnnnnnnnnnnnnnnnnnnnnnnnnnnnnnnnnnnnnnnnnnnnnnnnnnnnnnnnnnnnnnnnnnnnnnnnnnnnnnnnnnnnnnnnnnnnnnnnnnnnnnnnnnnnnnnnnnnnnnnnnnnnnnnnnnnnnnnnnnnnnnnnnnnnnnnnnnnnnnnnnnnnnnnnnnnnnnnnnnnnnnnnnnnnnnnnnnnnnnnnnnnnnnnnnnnnnnnnnnnnnnnnnnnnnnnnnnnnnnnnnnnnnnnnnnnnnnnnnnnnnnnnnnnnnnnnnnnnnnnnnnnnnnnnnnnnnnnnnnnnnnnnnnnnnnnnnnnnnnnnnnnnnnnnnnnnnnnnnnnnnnnnnnnnnnnnnnnnnnnnnnnnnnnnnnnnnnnnnnnnnnnnnnnnnnnnnnnnnnnnnnnnnnnnnnnnnnnnnnnnnnnnnnnnnnnnnnnnnnnnnnnnnnnnnnnnnnnnnnnnnnnnnnnnnnnnnnnnnnnnnnnnnnnnnnnnnnnnnnnnnnnnnnnnnnnnnnnnnnnnnnnnnnnnnnnnnnnnnnnnnnnnnnnnnnnnnnnnnnnnnnnnnnnnnnnnnnnnnnnnnnnnnnnnnnnnnnnnnnnnnnnnnnnnnnnnnnnnnnnnnnnnnnnnnnnnnnnnnnnnnnnnnnnnnnnnnnnnnnnnnnnnnnnnnnnnnnnnnnnnnnnnnnnnnnnnnnnnnnnnnnnnnnnnnnnnnnnnnnnnnnnnnnnnnnnnnnnnnnnnnnnnnnnnnnnnnnnnnnnnnnnnnnnnnnnnnnnnnnnnnnnnnnnnnnnnnnnnnnnnnnnnnnnnnnnnnnnnnnnnnnnnnnnnnnnnnnnnnnnnnnnnnnnnnnnnnnnnnnnnnnnnnnnnnnnnnnnnnnnnnnnnnnnnnnnnnnnnnnnnnnnnnnnnnnnnnnnnnnnnnnnnnnnnnnnnnnnnnnnnnnnnnnnnnnnnnnnnnnnnnnnnnnnnnnnnnnnnnnnnnnnnnnnnnnnnnnnnnnnnnnnnnnnnnnnnnnnnnnnnnnnnnnnnnnnnnnnnnnnnnnnnnnnnnnnnnnnnnnnnnnnnnnnnnnnnnnnnnnnnnnnnnnnnnnnnnnnnnnnnnnnnnnnnnnnnnnnnnnnnnnnnnnnnnnnnnnnnnnnnnnnnnnnnnnnnnnnnnnnnnnnnnnnnnnnnnnnnnnnnnnnnnnnnnnnnnnnnnnnnnnnnnnnnnnnnnnnnnnnnnnnnnnnnnnnnnnnnnnnnnnnnnnnnnnnnnnnnnnnnnnnnnnnnnnnnnnnnnnnnnnnnnnnnnnnnnnnnnnnnnnnnnnnnnnnnnnnnnnnnnnnnnnnnnnnnnnnnnnnnnnnnnnnnnnnnnnnnnnnnnnnnnnnnnnnnnnnnnnnnnnnnnnnnnnnnnnnnnnnnnnnnnnnnnnnnnnnnnnnnnnnnnnnnnnnnnnnnnnnnnnnnnnnnnnnnnnnnnnnnnnnnnnnnnnnnnnnnnnnnnnnnnnnnnnnnnnnnnnnnnnnnnnnnnnnnnnnnnnnnnnnnnnnnnnnnnnnnnnnnnnnnnnnnnnnnnnnnnnnnnnnnnnnnnnnnnnnnnnnnnnnnnnnnnnnnnnnnnnnnnnnnnnnnnnnnnnnnnnnnnnnnnnnnnnnnnnnnnnnnnnnnnnnnnnnnnnnnnnnnnnnnnnnnnnnnnnnnnnnnnnnnnnnnnnnnnnnnnnnnnnnnnnnnnnnnnnnnnnnnnnnnnnnnnnnnnnnnnnnnnnnnnnnnnnnnnnnnnnnnnnnnnnnnnnnnnnnnnnnnnnnnnnnnnnnnnnnnnnnnnnnnnnnnnnnnnnnnnnnnnnnnnnnnnnnnnnnnnnnnnnnnnnnnnnnnnnnnnnnnnnnnnnnnnnnnnnnnnnnnnnnnnnnnnnnnnnnnnnnnnnnnnnnnnnnnnnnnnnnnnnnnnnnnnnnnnnnnnnnnnnnnnnnnnnnnnnnnnnnnnnnnnnnnnnnnnnnnnnnnnnnnnnnnnnnnnnnnnnnnnnnnnnnnnnnnnnnnnnnnnnnnnnnnnnnnnnnnnnnnnnnnnnnnnnnnnnnnnnnnnnnnnnnnnnnnnnnnnnnnnnnnnnnnnnnnnnnnnnnnnnnnnnnnnnnnnnnnnnnnnnnnnnnnnnnnnnnnnnnnnnnnnnnnnnnnnnnnnnnnnnnnnnnnnnnnnnnnnnnnnnnnnnnnnnnnnnnnnnnnnnnnnnnnnnnnnnnnnnnnnnnnnnnnnnnnnnnnnnnnnnnnnnnnnnnnnnnnnnnnnnnnnnnnnnnnnnnnnnnnnnnnnnnnnnnnnnnnnnnnnnnnnnnnnnnnnnnnnnnnnnnnnnnnnnnnnnnnnnnnnnnnnnnnnnnnnnnnnnnnnnnnnnnnnnnnnnnnnnnnnnnnnnnnnnnnnnnnnnnnnnnnnnnnnnnnnnnnnnnnnnnnnnnnnnnnnnnnnnnnnnnnnnnnnnnnnnnnnnnnnnnnnnnnnnnnnnnnnnnnnnnnnnnnnnnnnnnnnnnnnnnnnnnnnnnnnnnnnnnnnnnnnnnnnnnnnnnnnnnnnnnnnnnnnnnnnnnnnnnnnnnnnnnnnnnnnnnnnnnnnnnnnnnnnnnnnnnnnnnnnnnnnnnnnnnnnnnnnnnnnnnnnnnnnnnnnnnnnnnnnnnnnnnnnnnnnnnnnnnnnnnnnnnnnnnnnnnnnnnnnnnnnnnnnnnnnnnnnnnnnnnnnnnnnnnnnnnnnnnnnnnnnnnnnnnnnnnnnnnnnnnnnnnnnnnnnnnnnnnnnnnnnnnnnnnnnnnnnnnnnnnnnnnnnnnnnnnnnnnnnnnnnnnnnnnnnnnnnnnnnnnnnnnnnnnnnnnnnnnnnnnnnnnnnnnnnnnnnnnnnnnnnnnnnnnnnnnnnnnnnnnnnnnnnnnnnnnnnnnnnnnnnnnnnnnnnnnnnnnnnnnnnnnnnnnnnnnnnnnnnnnnnnnnnnnnnnnnnnnnnnnnnnnnnnnnnnnnnnnnnnnnnnnnnnnnnnnnnnnnnnnnnnnnnnnnnnnnnnnnnnnnnnnnnnnnnnnnnnnnnnnnnnnnnnnnnnnnnnnnnnnnnnnnnnnnnnnnnnnnnnnnnnnnnnnnnnnnnnnnnnnnnnnnnnnnnnnnnnnnnnnnnnnnnnnnnnnnnnnnnnnnnnnnnnnnnnnnnnnnnnnnnnnnnnnnnnnnnnnnnnnnnnnnnnnnnnnnnnnnnnnnnnnnnnnnnnnnnnnnnnnnnnnnnnnnnnnnnnnnnnnnnnnnnnnnnnnnnnnnnnnnnnnnnnnnnnnnnnnnnnnnnnnnnnnnnnnnnnnnnnnnnnnnnnnnnnnnnnnnnnnnnnnnnnnnnnnnnnnnnnnnnnnnnnnnnnnnnnnnnnnnnnnnnnnnnnnnnnnnnnnnnnnnnnnnnnnnnnnnnnnnnnnnnnnnnnnnnnnnnnnnnnnnnnnnnnnnnnnnnnnnnnnnnnnnnnnnnnnnnnnnnnnnnnnnnnnnnnnnnnnnnnnnnnnnnnnnnnnnnnnnnnnnnnnnnnnnnnnnnnnnnnnnnnnnnnnnnnnnnnnnnnnnnnnnnnnnnnnnnnnnnnnnnnnnnnnnnnnnnnnnnnnnnnnnnnnnnnnnnnnnnnnnnnnnnnnnnnnnnnnnnnnnnnnnnnnnnnnnnnnnnnnnnnnnnnnnnnnnnnnnnnnnnnnnnnnnnnnnnnnnnnnnnnnnnnnnnnnnnnnnnnnnnnnnnnnnnnnnnnnnnnnnnnnnnnnnnnnnnnnnnnnnnnnnnnnnnnnnnnnnnnnnnnnnnnnnnnnnnnnnnnnnnnnnnnnnnnngttgaccgtgcaccgagtgagcgggcgtcgattcagggactaatagaccgatacgtgctggaggttctgcctgccaagaagtccgcggccaccctctcccgcatcctacgattcgtctgcaggcacttcggcgggttcaccttagcaacgcttcaaccgaagcacatcgcggcgtatcgcgattcgagactcgcctcgggcaccgctggcgcgacgatcgtaaaggagctcggcaccctgtcccgggtagtggacgtggcggttcgggagtggggatttttcgtgcccgcgaacccgttcaagctgatctccagcccgaacgtttcccgaggtcgcgagcggcggttaaccggtgacgaggaatcaaggctcttggacgcctgccgacgcagcgggtcaccgatgctcggtgcgatagtccggttggcgctggagacgggaatgcgcctaggcgagctgctgtcgttgacgtgggcaaacatcgataccgtcaagcgaacagcccggctgggtgatacgaagaacggcgaatcccgggccgtcccgctgtcgacgctcgcgatcagcaccctcatcagcctgccccgcaacatatcgtcaggtcgggtattttggacgtggtcgcgtccggacggcttcgagaacgcatggcggcgcgcgctcggcaaagcgggcatattcgacgaggccgatcagttgccatctgcggcagcgatgcaggtcgatatggaaattctggcaaatgtatttaacgagtttcacatcacagttgaaaccgccgagcaggcagcgcgcgacctgctaactcgtaaactggcggaacccgagcacaaggcggcggcgaagttggtgctcgaaattctggctgaccccgcgtggtatcacagtgccggtgttaccgaagatggtggtattgctgtccatcacaagatgccgggacttttgctcaagcgcgtcgccaatctaggaaatacggcgtttgtgtctgccaccctcacgttgggcgggtcattcgcggatttcaagcgcgcactgggtatcggcaaggagtctgcgctgtcctcgaccatcgaacccgtaaagcacggcgaactgcgcttcgtagtcaatgacgagcatgaggtggacacgccggagtggatgacggcggtggttaaagctatcgacggtgctgcgcgtcccgttctagtggtcaccccctcgcacgatctggcacagaatatcggcgctgcggtgcacggtgctgttgtgcgcggcgatgacgaaactacggctggagccgctgtgcgggtcgataaaaatggtgtgctcgtcgctgcgagtgcgtgggccggattagatacgccaatccaatgggcatctgtagtagtgccgaaggtgccgttcccgccaccgacaatcttggacggcaagacggagagcacctacctgtcggcgcgcggcgttgccatacgccgattgagacaggtgttcggccgcggattgcggacgccagatgcggtctgcaccatctacctgtatgacccgcgggcgcgcaagctgtccggcatagtgcctgcacggttcgcgccgcaatggcaagagcgagtgtatctggaaggcacgcgcggggaagtcgttctgtcgaagtctgaacgcgaccccgccctccgaaaggccgctttgcgaaagtatgaatgcaaatgtgcgagttgcgggtttatgccaagagtctcgcaacagatcgagattcatcatctgaatccgattgcggagggcgaacgtaagaccaccctggctgacgttcgcccgctgtgcgcgaattgtcaccggctggcacactcgacaacaccgccaatgccgcttgatgcattgcggagcgcgacagaagaacatgcagcgggccggccgaacttgcagaccgattcgcattgaccggcgtcgccgaaggtgtaatatgcgaattgcgccgatttgaaatcagcttgctgggcgcgttataaatacatgctaaagcgagtaaacccgctatagcgcaagctgtgcgggttttttgttgacggggggcccacgtcacgggctgggggatttattccaacttgctgcccccgccagatcggcgaagcagctaaacaggagaatgtcatgcaaactgatttcaccgtcttctatgaaggcggcctcaacctgctgcaacccaatagtcaggcggctcgagactggtgcgatgaaaatcttccactcgactccgagtggatcggcgggcgcgtcgctgtagataataaatggattggcgatcttgcccgtgatgtcagcggcgacggtctcacgatctgcgattcggaagatcaagaccttgatcgagtgctccattgagcgcaaataaagtaacaagtctgttagtggtcagggcccggcgcaggggtgaatacttcaccgaggacgatgcatcgcgcctacgagcatacgtagcttggaagacactcaacaagcggctgatggacgagcgcgatggcctgcgtcctccaagccctcctgcgcccgagaggccatcaggcccgccggtattacgagtggtgcggacgttggttaaatcagactaggggacgaccatgaaaatcgcgagcgatgacgggcggttcgtaatggagactgacccgcccacccagcaagaagaggacgagctttaccggcgcatcgcaggcgggcctattgcgatgcttcgggttactgcgcctgcagagcagcgcctgtcgggactgccgcctcagctgcgcaagccgcggtgattcagagactgtcgtccgtcggaaacaagacgcaaagacgactaggacgctgcgctatagacatttctgcggcgggggcgcacgtgaccagggaaaaatagcctggtagtagtcaaggtgtcctaagaaattagggacatccgcccattgatcatctctcgccactatgcgagattccaattcacgggcatctcctagttgattgttaaacgccatcggaaggtttgggcggcgcccactccgcgctacttctcggcgctcgcgaagatgctttattcggcaccgcatcaaagtaaggagttttcgtttgaggttccaatctctttggatcaaacggcttgcttgcgctgctctcacgatgatggcgggtgggtcacaagccgcactgacggtcttcacatcacaggccagcttcctcgggtcggtgagttcgccgggcgtcgatggcttcaacggcttctcgatcaccgactccacgcctagcccgctcagccgggtcgcaggctcttacacctataccgcaagcacgggttcgtccggcttcttcggtgctggcacaaacgccgatccttggctatccaccgatactaacaccgactcgattacgttttcaggcttcggtgccggagttagtgcgatcggcggtaacttcttcggatccgacctcgaaggtgcttttgtcacagggaccatcagtctcacggccaccgactcgtttggtgctattaccacgcagaacatcgtcaacgctacgaccaacagcttcctcgggtttgtgtccacgggtgcgctgacgtcattagtcgtaagtgccatccagccgcccagcgattttgtgtggcccacggtgaacaatcttatcctggctcaggcagtttccccaccgatacccgaaccgcagacctacgccatgatgctcgccggcttgggactcatgggtttgattgcacgtcgcaggaagcgcaacatcgcttgagaaattaaatgaaccgcaaaaaacccgccggcgagtttcttcttgtataggggttgctgaattttcaatctttaacgctgtctcactggctctatgaatctatgcaaggactgcaacgcggtgctttacggcagcacgcaataacctcactcactacgataggcgattgctggcttgcttaggcagagcacatcggaacttcacaattgctggacgatcgcagccgcccgtactatgagcacgagttggcggcctaaggattagtcgcttggaagcacgtcaagaccgtcccgccgactcgcacgcggcctgactttcatgacgacgctcgcatacgtgcacggcggctatctcctcgtcactggcttgtggtcgctcctgcattttgaatcattccagaaagtcaccggcagaaaaacggacgtgtggctcgtcaagaccgtcgcgggccttgtaatt

SEQ ID NO: 113 - DNA, 14197 bp, Artificial Sequence
  Synthetic Oligonucleotide
  misc_feature (1)..(9999): n is a, c, g, or t
nnnnnnnnnnnnnnnnnnnnnnnnnnnnnnnnnnnnnnnnnnnnnnnnnnnnnnnnnnnnnnnnnnnnnnnnnnnnnnnnnnnnnnnnnnnnnnnnnnnnnnnnnnnnnnnnnnnnnnnnnnnnnnnnnnnnnnnnnnnnnnnnnnnnnnnnnnnnnnnnnnnnnnnnnnnnnnnnnnnnnnnnnnnnnnnnnnnnnnnnnnnnnnnnnnnnnnnnnnnnnnnnnnnnnnnnnnnnnnnnnnnnnnnnnnnnnnnnnnnnnnnnnnnnnnnnnnnnnnnnnnnnnnnnnnnnnnnnnnnnnnnnnnnnnnnnnnnnnnnnnnnnnnnnnnnnnnnnnnnnnnnnnnnnnnnnnnnnnnnnnnnnnnnnnnnnnnnnnnnnnnnnnnnnnnnnnnnnnnnnnnnnnnnnnnnnnnnnnnnnnnnnnnnnnnnnnnnnnnnnnnnnnnnnnnnnnnnnnnnnnnnnnnnnnnnnnnnnnnnnnnnnnnnnnnnnnnnnnnnnnnnnnnnnnnnnnnnnnnnnnnnnnnnnnnnnnnnnnnnnnnnnnnnnnnnnnnnnnnnnnnnnnnnnnnnnnnnnnnnnnnnnnnnnnnnnnnnnnnnnnnnnnnnnnnnnnnnnnnnnnnnnnnnnnnnnnnnnnnnnnnnnnnnnnnnnnnnnnnnnnnnnnnnnnnnnnnnnnnnnnnnnnnnnnnnnnnnnnnnnnnnnnnnnnnnnnnnnnnnnnnnnnnnnnnnnnnnnnnnnnnnnnnnnnnnnnnnnnnnnnnnnnnnnnnnnnnnnnnnnnnnnnnnnnnnnnnnnnnnnnnnnnnnnnnnnnnnnnnnnnnnnnnnnnnnnnnnnnnnnnnnnnnnnnnnnnnnnnnnnnnnnnnnnnnnnnnnnnnnnnnnnnnnnnnnnnnnnnnnnnnnnnnnnnnnnnnnnnnnnnnnnnnnnnnnnnnnnnnnnnnnnnnnnnnnnnnnnnnnnnnnnnnnnnnnnnnnnnnnnnnnnnnnnnnnnnnnnnnnnnnnnnnnnnnnnnnnnnnnnnnnnnnnnnnnnnnnnnnnnnnnnnnnnnnnnnnnnnnnnnnnnnnnnnnnnnnnnnnnnnnnnnnnnnnnnnnnnnnnnnnnnnnnnnnnnnnnnnnnnnnnnnnnnnnnnnnnnnnnnnnnnnnnnnnnnnnnnnnnnnnnnnnnnnnnnnnnnnnnnnnnnnnnnnnnnnnnnnnnnnnnnnnnnnnnnnnnnnnnnnnnnnnnnnnnnnnnnnnnnnnnnnnnnnnnnnnnnnnnnnnnnnnnnnnnnnnnnnnnnnnnnnnnnnnnnnnnnnnnnnnnnnnnnnnnnnnnnnnnnnnnnnnnnnnnnnnnnnnnnnnnnnnnnnnnnnnnnnnnnnnnnnnnnnnnnnnnnnnnnnnnnnnnnnnnnnnnnnnnnnnnnnnnnnnnnnnnnnnnnnnnnnnnnnnnnnnnnnnnnnnnnnnnnnnnnnnnnnnnnnnnnnnnnnnnnnnnnnnnnnnnnnnnnnnnnnnnnnnnnnnnnnnnnnnnnnnnnnnnnnnnnnnnnnnnnnnnnnnnnnnnnnnnnnnnnnnnnnnnnnnnnnnnnnnnnnnnnnnnnnnnnnnnnnnnnnnnnnnnnnnnnnnnnnnnnnnnnnnnnnnnnnnnnnnnnnnnnnnnnnnnnnnnnnnnnnnnnnnnnnnnnnnnnnnnnnnnnnnnnnnnnnnnnnnnnnnnnnnnnnnnnnnnnnnnnnnnnnnnnnnnnnnnnnnnnnnnnnnnnnnnnnnnnnnnnnnnnnnnnnnnnnnnnnnnnnnnnnnnnnnnnnnnnnnnnnnnnnnnnnnnnnnnnnnnnnnnnnnnnnnnnnnnnnnnnnnnnnnnnnnnnnnnnnnnnnnnnnnnnnnnnnnnnnnnnnnnnnnnnnnnnnnnnnnnnnnnnnnnnnnnnnnnnnnnnnnnnnnnnnnnnnnnnnnnnnnnnnnnnnnnnnnnnnnnnnnnnnnnnnnnnnnnnnnnnnnnnnnnnnnnnnnnnnnnnnnnnnnnnnnnnnnnnnnnnnnnnnnnnnnnnnnnnnnnnnnnnnnnnnnnnnnnnnnnnnnnnnnnnnnnnnnnnnnnnnnnnnnnnnnnnnnnnnnnnnnnnnnnnnnnnnnnnnnnnnnnnnnnnnnnnnnnnnnnnnnnnnnnnnnnnnnnnnnnnnnnnnnnnnnnnnnnnnnnnnnnnnnnnnnnnnnnnnnnnnnnnnnnnnnnnnnnnnnnnnnnnnnnnnnnnnnnnnnnnnnnnnnnnnnnnnnnnnnnnnnnnnnnnnnnnnnnnnnnnnnnnnnnnnnnnnnnnnnnnnnnnnnnnnnnnnnnnnnnnnnnnnnnnnnnnnnnnnnnnnnnnnnnnnnnnnnnnnnnnnnnnnnnnnnnnnnnnnnnnnnnnnnnnnnnnnnnnnnnnnnnnnnnnnnnnnnnnnnnnnnnnnnnnnnnnnnnnnnnnnnnnnnnnnnnnnnnnnnnnnnnnnnnnnnnnnnnnnnnnnnnnnnnnnnnnnnnnnnnnnnnnnnnnnnnnnnnnnnnnnnnnnnnnnnnnnnnnnnnnnnnnnnnnnnnnnnnnnnnnnnnnnnnnnnnnnnnnnnnnnnnnnnnnnnnnnnnnnnnnnnnnnnnnnnnnnnnnnnnnnnnnnnnnnnnnnnnnnnnnnnnnnnnnnnnnnnnnnnnnnnnnnnnnnnnnnnnnnnnnnnnnnnnnnnnnnnnnnnnnnnnnnnnnnnnnnnnnnnnnnnnnnnnnnnnnnnnnnnnnnnnnnnnnnnnnnnnnnnnnnnnnnnnnnnnnnnnnnnnnnnnnnnnnnnnnnnnnnnnnnnnnnnnnnnnnnnnnnnnnnnnnnnnnnnnnnnnnnnnnnnnnnnnnnnnnnnnnnnnnnnnnnnnnnnnnnnnnnnnnnnnnnnnnnnnnnnnnnnnnnnnnnnnnnnnnnnnnnnnnnnnnnnnnnnnnnnnnnnnnnnnnnnnnnnnnnnnnnnnnnnnnnnnnnnnnnnnnnnnnnnnnnnnnnnnnnnnnnnnnnnnnnnnnnnnnnnnnnnnnnnnnnnnnnnnnnnnnnnnnnnnnnnnnnnnnnnnnnnnnnnnnnnnnnnnnnnnnnnnnnnnnnnnnnnnnnnnnnnnnnnnnnnnnnnnnnnnnnnnnnnnnnnnnnnnnnnnnnnnnnnnnnnnnnnnnnnnnnnnnnnnnnnnnnnnnnnnnnnnnnnnnnnnnnnnnnnnnnnnnnnnnnnnnnnnnnnnnnnnnnnnnnnnnnnnnnnnnnnnnnnnnnnnnnnnnnnnnnnnnnnnnnnnnnnnnnnnnnnnnnnnnnnnnnnnnnnnnnnnnnnnnnnnnnnnnnnnnnnnnnnnnnnnnnnnnnnnnnnnnnnnnnnnnnnnnnnnnnnnnnnnnnnnnnnnnnnnnnnnnnnnnnnnnnnnnnnnnnnnnnnnnnnnnnnnnnnnnnnnnnnnnnnnnnnnnnnnnnnnnnnnnnnnnnnnnnnnnnnnnnnnnnnnnnnnnnnnnnnnnnnnnnnnnnnnnnnnnnnnnnnnnnnnnnnnnnnnnnnnnnnnnnnnnnnnnnnnnnnnnnnnnnnnnnnnnnnnnnnnnnnnnnnnnnnnnnnnnnnnnnnnnnnnnnnnnnnnnnnnnnnnnnnnnnnnnnnnnnnnnnnnnnnnnnnnnnnnnnnnnnnnnnnnnnnnnnnnnnnnnnnnnnnnnnnnnnnnnnnnnnnnnnnnnnnnnnnnnnnnnnnnnnnnnnnnnnnnnnnnnnnnnnnnnnnnnnnnnnnnnnnnnnnnnnnnnnnnnnnnnnnnnnnnnnnnnnnnnnnnnnnnnnnnnnnnnnnnnnnnnnnnnnnnnnnnnnnnnnnnnnnnnnnnnnnnnnnnnnnnnnnnnnnnnnnnnnnnnnnnnnnnnnnnnnnnnnnnnnnnnnnnnnnnnnnnnnnnnnnnnnnnnnnnnnnnnnnnnnnnnnnnnnnnnnnnnnnnnnnnnnnnnnnnnnnnnnnnnnnnnnnnnnnnnnnnnnnnnnnnnnnnnnnnnnnnnnnnnnnnnnnnnnnnnnnnnnnnnnnnnnnnnnnnnnnnnnnnnnnnnnnnnnnnnnnnnnnnnnnnnnnnnnnnnnnnnnnnnnnnnnnnnnnnnnnnnnnnnnnnnnnnnnnnnnnnnnnnnnnnnnnnnnnnnnnnnnnnnnnnnnnnnnnnnnnnnnnnnnnnnnnnnnnnnnnnnnnnnnnnnnnnnnnnnnnnnnnnnnnnnnnnnnnnnnnnnnnnnnnnnnnnnnnnnnnnnnnnnnnnnnnnnnnnnnnnnnnnnnnnnnnnnnnnnnnnnnnnnnnnnnnnnnnnnnnnnnnnnnnnnnnnnnnnnnnnnnnnnnnnnnnnnnnnnnnnnnnnnnnnnnnnnnnnnnnnnnnnnnnnnnnnnnnnnnnnnnnnnnnnnnnnnnnnnnnnnnnnnnnnnnnnnnnnnnnnnnnnnnnnnnnnnnnnnnnnnnnnnnnnnnnnnnnnnnnnnnnnnnnnnnnnnnnnnnnnnnnnnnnnnnnnnnnnnnnnnnnnnnnnnnnnnnnnnnnnnnnnnnnnnnnnnnnnnnnnnnnnnnnnnnnnnnnnnnnnnnnnnnnnnnnnnnnnnnnnnnnnnnnnnnnnnnnnnnnnnnnnnnnnnnnnnnnnnnnnnnnnnnnnnnnnnnnnnnnnnnnnnnnnnnnnnnnnnnnnnnnnnnnnnnnnnnnnnnnnnnnnnnnnnnnnnnnnnnnnnnnnnnnnnnnnnnnnnnnnnnnnnnnnnnnnnnnnnnnnnnnnnnnnnnnnnnnnnnnnnnnnnnnnnnnnnnnnnnnnnnnnnnnnnnnnnnnnnnnnnnnnnnnnnnnnnnnnnnnnnnnnnnnnnnnnnnnnnnnnnnnnnnnnnnnnnnnnnnnnnnnnnnnnnnnnnnnnnnnnnnnnnnnnnnnnnnnnnnnnnnnnnnnnnnnnnnnnnnnnnnnnnnnnnnnnnnnnnnnnnnnnnnnnnnnnnnnnnnnnnnnnnnnnnnnnnnnnnnnnnnnnnnnnnnnnnnnnnnnnnnnnnnnnnnnnnnnnnnnnnnnnnnnnnnnnnnnnnnnnnnnnnnnnnnnnnnnnnnnnnnnnnnnnnnnnnnnnnnnnnnnnnnnnnnnnnnnnnnnnnnnnnnnnnnnnnnnnnnnnnnnnnnnnnnnnnnnnnnnnnnnnnnnnnnnnnnnnnnnnnnnnnnnnnnnnnnnnnnnnnnnnnnnnnnnnnnnnnnnnnnnnnnnnnnnnnnnnnnnnnnnnnnnnnnnnnnnnnnnnnnnnnnnnnnnnnnnnnnnnnnnnnnnnnnnnnnnnnnnnnnnnnnnnnnnnnnnnnnnnnnnnnnnnnnnnnnnnnnnnnnnnnnnnnnnnnnnnnnnnnnnnnnnnnnnnnnnnnnnnnnnnnnnnnnnnnnnnnnnnnnnnnnnnnnnnnnnnnnnnnnnnnnnnnnnnnnnnnnnnnnnnnnnnnnnnnnnnnnnnnnnnnnnnnnnnnnnnnnnnnnnnnnnnnnnnnnnnnnnnnnnnnnnnnnnnnnnnnnnnnnnnnnnnnnnnnnnnnnnnnnnnnnnnnnnnnnnnnnnnnnnnnnnnnnnnnnnnnnnnnnnnnnnnnnnnnnnnnnnnnnnnnnnnnnnnnnnnnnnnnnnnnnnnnnnnnnnnnnnnnnnnnnnnnnnnnnnnnnnnnnnnnnnnnnnnnnnnnnnnnnnnnnnnnnnnnnnnnnnnnnnnnnnnnnnnnnnnnnnnnnnnnnnnnnnnnnnnnnnnnnnnnnnnnnnnnnnnnnnnnnnnnnnnnnnnnnnnnnnnnnnnnnnnnnnnnnnnnnnnnnnnnnnnnnnnnnnnnnnnnnnnnnnnnnnnnnnnnnnnnnnnnnnnnnnnnnnnnnnnnnnnnnnnnnnnnnnnnnnnnnnnnnnnnnnnnnnnnnnnnnnnnnnnnnnnnnnnnnnnnnnnnnnnnnnnnnnnnnnnnnnnnnnnnnnnnnnnnnnnnnnnnnnnnnnnnnnnnnnnnnnnnnnnnnnnnnnnnnnnnnnnnnnnnnnnnnnnnnnnnnnnnnnnnnnnnnnnnnnnnnnnnnnnnnnnnnnnnnnnnnnnnnnnnnnnnnnnnnnnnnnnnnnnnnnnnnnnnnnnnnnnnnnnnnnnnnnnnnnnnnnnnnnnnnnnnnnnnnnnnnnnnnnnnnnnnnnnnnnnnnnnnnnnnnnnnnnnnnnnnnnnnnnnnnnnnnnnnnnnnnnnnnnnnnnnnnnnnnnnnnnnnnnnnnnnnnnnnnnnnnnnnnnnnnnnnnnnnnnnnnnnnnnnnnnnnnnnnnnnnnnnnnnnnnnnnnnnnnnnnnnnnnnnnnnnnnnnnnnnnnnnnnnnnnnnnnnnnnnnnnnnnnnnnnnnnnnnnnnnnnnnnnnnnnnnnnnnnnnnnnnnnnnnnnnnnnnnnnnnnnnnnnnnnnnnnnnnnnnnnnnnnnnnnnnnnnnnnnnnnnnnnnnnnnnnnnnnnnnnnnnnnnnnnnnnnnnnnnnnnnnnnnnnnnnnnnnnnnnnnnnnnnnnnnnnnnnnnnnnnnnnnnnnnnnnnnnnnnnnnnnnnnnnnnnnnnnnnnnnnnnnnnnnnnnnnnnnnnnnnnnnnnnnnnnnnnnnnnnnnnnnnnnnnnnnnnnnnnnnnnnnnnnnnnnnnnnnnnnnnnnnnnnnnnnnnnnnnnnnnnnnnnnnnnnnnnnnnnnnnnnnnnnnnnnnnnnnnnnnnnnnnnnnnnnnnnnnnnnnnnnnnnnnnnnnnnnnnnnnnnnnnnnnnnnnnnnnnnnnnnnnnnnnnnnnnnnnnnnnnnnnnnnnnnnnnnnnnnnnnnnnnnnnnnnnnnnnnnnnnnnnnnnnnnnnnnnnnnnnnnnnnnnnnnnnnnnnnnnnnnnnnnnnnnnnnnnnnnnnnnnnnnnnnnnnnnnnnnnnnnnnnnnnnnnnnnnnnnnnnnnnnnnnnnnnnnnnnnnnnnnnnnnnnnnnnnnnnnnnnnnnnnnnnnnnnnnnnnnnnnnnnnnnnnnnnnnnnnnnnnnnnnnnnnnnnnnnnnnnnnnnnnnnnnnnnnnnnnnnnnnnnnnnnnnnnnnnnnnnnnnnnnnnnnnnnnnnnnnnnnnnnnnnnnnnnnnnnnnnnnnnnnnnnnnnnnnnnnnnnnnnnnnnnnnnnnnnnnnnnnnnnnnnnnnnnnnnnnnnnnnnnnnnnnnnnnnnnnnnnnnnnnnnnnnnnnnnnnnnnnnnnnnnnnnnnnnnnnnnnnnnnnnnnnnnnnnnnnnnnnnnnnnnnnnnnnnnnnnnnnnnnnnnnnnnnnnnnnnnnnnnnnnnnnnnnnnnnnnnnnnnnnnnnnnnnnnnnnnnnnnnnnnnnnnnnnnnnnnnnnnnnnnnnnnnnnnnnnnnnnnnnnnnnnnnnnnnnnnnnnnnnnnnnnnnnnnnnnnnnnnnnnnnnnnnnnnnnnnnnnnnnnnnnnnnnnnnnnnnnnnnnnnnnnnnnnnnnnnnnnnnnnnnnnnnnnnnnnnnnnnnnnnnnnnnnnnnnnnnnnnnnnnnnnnnnnnnnnnnnnnnnnnnnnnnnnnnnnnnnnnnnnnnnnnnnnnnnnnnnnnnnnnnnnnnnnnnnnnnnnnnnnnnnnnnnnnnnnnnnnnnnnnnnnnnnnnnnnnnnnnnnnnnnnnnnnnnnnnnnnnnnnnnnnnnnnnnnnnnnnnnnnnnnnnnnnnnnnnnnnnnnnnnnnnnnnnnnnnnnnnnnnnnnnnnnnnnnnnnnnnnnnnnnnnnnnnnnnnnnnnnnnnnnnnnnnnnnnnnnnnnnnnnnnnnnnnnnnnnnnnnnnnnnnnnnnnnnnnnnnnnnnnnnnnnnnnnnnnnnnnnnnnnnnnnnnnnnnnnnnnnnnnnnnnnnnnnnnnnnnnnnnnnnnnnnnnnnnnnnnnnnnnnnnnnnnnnnnnnnnnnnnnnnnnnnnnnnnnnnnnnnnnnnnnnnnnnnnnnnnnnnnnnnnnnnnnnnnnnnnnnnnnnnnnnnnnnnnnnnnnnnnnnnnnnnnnnnnnnnnnnnnnnnnnnnnnnnnnnnnnnnnnnnnnnnnnnnnnnnnnnnnnnnnnnnnnnnnnnnnnnnnnnnnnnnnnnnnnnnnnnnnnnnnnnnnnnnnnnnnnnnnnnnnnnnnnnnnnnnnnnnnnnnnnnnnnnnnnnnnnnnnnnnnnnnnnnnnnnnnnnnnnnnnnnnnnnnnnnnnnnnnnnnnnnnnnnnnnnnnnnnnnnnnnnnnnnnnnnnnnnnnnnnnnnnnnnnnnnnnnnnnnnnnnnnnnnnnnnnnnnnnnnnnnnnnnnnnnnnnnnnnnnnnnnnnnnnnnnnnnnnnnnnnnnnnnnnnnnnnnnnnnnnnnnnnnnnnnnnnnnnnnnnnnnnnnnnnnnnnnnnnnnnnnnnnnnnnnnnnnnnnnnnnnnnnnnnnnnnnnnnnnnnnnnnnnnnnnnnnnnnnnnnnnnnnnnnnnnnnnnnnnnnnnnnnnnnnnnnnnnnnnnnnnnnnnnnnnnnnnnnnnnnnnnnnnnnnnnnnnnnnnnnnnnnnnnnnnnnnnnnnnnnnnnnnnnnnnnnnnnnnnnnnnnnnnnnnnnnnnnnnnnnnnnnnnnnnnnnnnnnnnnnnnnnnnnnnnnnnnnnnnnnnnnnnnnnnnnnnnnnnnnnnnnnnnnnnnnnnnnnnnnnnnnnnnnnnnnnnnnnnnnnnnnnnnnnnnnnnnnnnnnnnnnnnnnnnnnnnnnnnnnnnnnnnnnnnnnnnnnnnnnnnnnnnnnnnnnnnnnnnnnnnnnnnnnnnnnnnnnnnnnnnnnnnnnnnnnnnnnnnnnnnnnnnnnnnnnnnnnnnnnnnnnnnnnnnnnnnnnnnnnnnnnnnnnnnnnnnnnnnnnnnnnnnnnnnnnnnnnnnnnnnnnnnnnnnnnnnnnnnnnnnnnnnnnnnnnnnnnnnnnnnnnnnnnnnnnnnnnnnnnnnnnnnnnnnnnnnnnnnnnnnnnnnnnnnnnnnnnnnnnnnnnnnnnnnnnnnnnnnnnnnnnnnnnnnnnnnnnnnnnnnnnnnnnnnnnnnnnnnnnnnnnnnnnnnnnnnnnnnnnnnnnnnnnnnnnnnnnnnnnnnnnnnnnnnnnnnnnnnnnnnnnnnnnnnnnnnnnnnnnnnnnnnnnnnnnnnnnnnnnnnnnnnnnnnnnnnnnnnnnnnnnnnnnnnnnnnnnnnnnnnnnnnnnnnnnnnnnnnnnnnnnnnnnnnnnnnnnnnnnnnnnnnnnnnnnnnnnnnnnnnnnnnnnnnnnnnnnnnnnnnnnnnnnnnnnnnnnnnnnnnnnnnnnnnnnnnnnnnnnnnnnnnnnnnnnnnnnnnnnnnnnnnnnnnnnnnnnnnnnnnnnnnnnnnnnnnnnnnnnnnnnnnnnnnnnnnnnnnnnnnnnnnnnnnnnnnnnnnnnnnnnnnnnnnnnnnnnnnnnnnnnnnnnnnnnnnnnnnnnnnnnnnnnnnnnnnnnnnnnnnnnnnnnnnnnnnnnnnnnnnnnnnnnnnnnnnnnnnnnnnnnnnnnnnnnnnnnnnnnnnnnnnnnnnnnnnnnnnnnnnnnnnnnnnnnnnnnnnnnnnnnnnnnnnnnnnnnnnnnnnnnnnnnnnnnnnnnnnnnnnnnnnnnnnnnnnnnnnnnnnnnnnnnnnnnnnnnnnnnnnnnnnnnnnnnnnnnnnnnnnnnnnnnnnnnnnnnnnnnnnnnnnnnnnnnnnnnnnnnnnnnnnnnnnnnnnnnnnnnnnnnnnnnnnnnnnnnnnnnnnnnnnnnnnnnnnnnnnnnnnnnnnnnnnnnnnnnnnnnnnnnnnnnnnnnnnnnnnnnnnnnnnnnnnnnnnnnnnnnnnnnnnnnnnnnnnnnnnnnnnnnnnnnnnnnnnnnnnnnnnnnnnnnnnnnnnnnnnnnnnnnnnnnnnnnnnnnnnnnnnnnnnnnnnnnnnnnnnnnnnnnnnnnnnnnnnnnnnnnnnnnnnnnnnnnnnnnnnnnnnnnnnnnnnnnnnnnnnnnnnnnnnnnnnnnnnnnnnnnnnnnnnnnnnnnnnnnnnnnnnnnnnnnnnnnnnnnnnnnnnnnnnnnaaggcttatcaggataacaaacaagacgctttggcggccgatattatgttgtgtacctctgtctctgtgatcatcgatcagcgaatgggtggcggatataacgggtcgactgagcgagaggtcatcatattcgatgaggccgatcagctaccggcgtttgcagctttgacatctgatgtaacgatcacgcgccaggagctgcgcgatcatggtgtgactggagtgacgcccaagcagactgtgagcgatctgctgaagaagaagtcggtgaagggcgagttgcaaggtcgagctaaactgatctgcgaagcaattgaacaggacgtttggtttgcgaaggcaggcatgactgacgatggcggcgtggcagtgtattcgcgtctgccgggtcggctgctgaagaaagtatccaaccggccttcgaccgtatttgtttcagccacattgtcagtaggtggctcgttcaacgacttcaaacgtgccatgggtattggcgatcaaagtaaactgtccacccccagcattgaacctgttcatcacggtacgctgactttcgatttccgaaccgaatacgcagttgatacagacgaatggctgaccggagtggttgaagagatcaatggcgcagacggaccggtgctggtcgcgaccccttcgcacgctttggctcagaagttgggagcacggatcactgacgccgtggttcgtcaggccgacgagacaaccagcgaagccgtaaagcggcttggtaacacaagcatattgatcgctgctggcgcttgggcaggcctagatacacccgtagagtgggcgactatcgttgtgccgcgcgttcccttcacagggccgaagatggtctacgacgtctggcacgaagacgccgaagaacaggctgtcacaatcggcgaggcaatgacgcactatattgatagtaagaactcagctgcacggagaatgaagcaagtctttggccgtgggttgcgtcatccaaaagcaatttgccgtgtcgtgatttgtgacccacgcatcgatcaacttggcgatattgcgcccaagcgcttcaaggcagggttctgggaaggccgtaagatcgagcaaacccgcactgtgtcagaacgaaaccccgcattgcgtaaagatgcgctacttcatcacggcacggactgccaagcgtgcgatttcaagccagtgtcactgcgccaggtggaagttcaccacctcaatccgctggccgaccgggtggggggctatacgaagatagaagacgttgccgtgctctgccgcaactgccatggactggtgcattcggaggatccaccaatcccgctggaccggctaagaaaaacgaagaaagagcgcaagcctaaattctcaatctcaatggggtagcgcaccaagtgtacgccagatgtgctgtgacagccgacagattgtgacacatgcgatttgggcactgtggatgcgctggggcacggtatggtcgtttgtgccccatgtcgctcgtcattcataacacatcaaattggcgacggattgtcgttcgaaatgtgcattagaaagatcagcgcgttcccgcttcttgatggcatggccttgaatgaaaaatgggcctgctgcgtgcaggccagcgttctcaatggtacaatggagtgccgaaagaaacggcgggtaattcctgagcaggtcttcgtgggacactttgtcccttgaggatttttcggcgaagcgtagccaagactttacgaccggcccggcggtgttcttcaggcgagaggcaattgtcgaaatagtaattcaacccctatcctccggcacatcatctgaaatttcgaggaatctcatggaaggacaaactccatcatcaatacgttggcacttcggcccggaatggccggggcgtcgttgtggagccaggacgcgacagggaacgccctgccagaagcctgtattgcgcggaaggaaccgttgtcagttgcatggcggtcgtgccggggcaccacgtggcaaaaggcatggcaactacaagcatgggcggtacacgatcacagccacggaaaggcaccaagaggccatggcgcgcatcaggtatttattgctgctggggcgggcctgcaggatttttaattgaagattgccgggcaagaaatagatgccacatcacgacccccacccaaaatatagaagatagtacccctatgacccccagcccaccggcacaaaagggaaccgatttaaggtattttcatagtcaaaagggcaccgttagcgggttattggggcactggggatgcgttttttgacactggaggtgaagggcgtggccgtttcgtgccagccttctggcgtccggctttgtaccgggatagcgccgcatcagccgtgacttgattaaccgaatgccattcatccgtaggcggcgtatttccgacgggcagatacgtgagtcggtatgcctgcgggttcctgatttgtccgccgaatttgttgttcggttggatgatccgcaagaggccgagggcgtctccaagcttaagggagcgcgtgatgtcctttcgggacaaaccggcttcagccaattgcccataggaaacaaggaggttcccgtttgcggttccagcatgttgcaagtgctctatttcgatacgctccaaaatgcgcatcagcggcacgcttcgcgagcgccatgcggggctttgcagcatcgggagtcgatgcgcaacccacgccacgcctgcgagataattgctgctatttttcttcgccatttgtcgctccgttccagccgtacagcgggccgcaatgacggcattcacgttgcgaaacccctctgcgcaaggtatccccgcatttcgggcacttcgagccagaacgctgaattgacgttgcgcggactcgtgagggatatcgtggatcgacgggctttcccccatcgacgacgacttcggcttcggtgctcgccttgtgggtcgggcgaatatcgatggtgggcaattggtcaatccgcgccggaaagctttcaaggatagttattgcggatggaagatcttcggccttgagggcacggatggcggccatgagagcatcgcgagtaccaaagtagccgatattgtcccaacgcgctctaccgtgcctttttccggctcgtttctgcagaatccattgatgaccgtccggcgcttcgacgacacgaagtctgtcgtttatcttgcaaatcaaattcatgtcgttctcccgtttggccgatagatatcaacggtcgagagagcgacaacggctccggaatagaaaacagtgatccgcgctatcagtgccggtgccttattgtgacgagttgggaggaaccgaagttcccccacgtctggcacatagcatttccggtgccgcaaataggtttcagcgagggttccagcgatggggcgcgcagagcgccatatgctgtctgcggtggatgaccacgccaagcatttttgcgctaccgcgttcatgaaacttgctccggggaaagccggcatcggtcgtcaagccatttccttgcctcggcaattgagtaatttttttctcgcattactaagtccacgaggtcgccttcttctccactcccaaaatctttgaaccgcccggctcggtctccagcgacatgaacgcacaggcttccattgggtctataacgccaatcatccgcgttgttaaaatccctgttgggtttgccaagcaaggagcgcgaaacgtctcgtgcatgtggtgcatatctttccgtcaggtcacccatggtcatgcctcctctctattggatttggcagtttcagcgcggtcgctgtcaccggcatcgatgctcaatacacagcgtgtttccagccacacagtgatttccgattcgcgccaaccgattttgcggagaccgatccggatacgcttcgggaattctcctgccttttcaagtcgccatatttggctgcgggagaggggaataatgtcacgtaggtctttctgcgtgaggattcggtctgtccatggcggatgcataggctgctccttggctcgtgttgcgacgaacgggagcatacgtcacggtgggggcgatgcggaaatgtaaacttgtgcatcgcgagtaaagaccagcacatatataattggtaaatatctatagatagtttatattgatataaaaggaaatatatattagtaataataagtgtaa

SEQ ID NO: 114 - DNA, 14197 bp, Artificial Sequence; identical to SEQ ID NO: 113
  Synthetic Oligonucleotide
  misc_feature (1)..(9999): n is a, c, g, or t

SEQ ID NO: 115 - DNA, 14197 bp, Artificial Sequence
  Synthetic Oligonucleotide
  misc_feature (1)..(9881): n is a, c, g, or t
nnnnnnnnnnnnnnnnnnnnnnnnnnnnnnnnnnnnnnnnnnnnnnnnnnnnnnnnnnnnnnnnnnnnnnnnnnnnnnnnnnnnnnnnnnnnnnnnnnnnnnnnnnnnnnnnnnnnnnnnnnnnnnnnnnnnnnnnnnnnnnnnnnnnnnnnnnnnnnnnnnnnnnnnnnnnnnnnnnnnnnnnnnnnnnnnnnnnnnnnnnnnnnnnnnnnnnnnnnnnnnnnnnnnnnnnnnnnnnnnnnnnnnnnnnnnnnnnnnnnnnnnnnnnnnnnnnnnnnnnnnnnnnnnnnnnnnnnnnnnnnnnnnnnnnnnnnnnnnnnnnnnnnnnnnnnnnnnnnnnnnnnnnnnnnnnnnnnnnnnnnnnnnnnnnnnnnnnnnnnnnnnnnnnnnnnnnnnnnnnnnnnnnnnnnnnnnnnnnnnnnnnnnnnnnnnnnnnnnnnnnnnnnnnnnnnnnnnnnnnnnnnnnnnnnnnnnnnnnnnnnnnnnnnnnnnnnnnnnnnnnnnnnnnnnnnnnnnnnnnnnnnnnnnnnnnnnnnnnnnnnnnnnnnnnnnnnnnnnnnnnnnnnnnnnnnnnnnnnnnnnnnnnnnnnnnnnnnnnnnnnnnnnnnnnnnnnnnnnnnnnnnnnnnnnnnnnnnnnnnnnnnnnnnnnnnnnnnnnnnnnnnnnnnnnnnnnnnnnnnnnnnnnnnnnnnnnnnnnnnnnnnnnnnnnnnnnnnnnnnnnnnnnnnnnnnnnnnnnnnnnnnnnnnnnnnnnnnnnnnnnnnnnnnnnnnnnnnnnnnnnnnnnnnnnnnnnnnnnnnnnnnnnnnnnnnnnnnnnnnnnnnnnnnnnnnnnnnnnnnnnnnnnnnnnnnnnnnnnnnnnnnnnnnnnnnnnnnnnnnnnnnnnnnnnnnnnnnnnnnnnnnnnnnnnnnnnnnnnnnnnnnnnnnnnnnnnnnnnnnnnnnnnnnnnnnnnnnnnnnnnnnnnnnnnnnnnnnnnnnnnnnnnnnnnnnnnnnnnnnnnnnnnnnnnnnnnnnnnnnnnnnnnnnnnnnnnnnnnnnnnnnnnnnnnnnnnnnnnnnnnnnnnnnnnnnnnnnnnnnnnnnnnnnnnnnnnnnnnnnnnnnnnnnnnnnnnnnnnnnnnnnnnnnnnnnnnnnnnnnnnnnnnnnnnnnnnnnnnnnnnnnnnnnnnnnnnnnnnnnnnnnnnnnnnnnnnnnnnnnnnnnnnnnnnnnnnnnnnnnnnnnnnnnnnnnnnnnnnnnnnnnnnnnnnnnnnnnnnnnnnnnnnnnnnnnnnnnnnnnnnnnnnnnnnnnnnnnnnnnnnnnnnnnnnnnnnnnnnnnnnnnnnnnnnnnnnnnnnnnnnnnnnnnnnnnnnnnnnnnnnnnnnnnnnnnnnnnnnnnnnnnnnnnnnnnnnnnnnnnnnnnnnnnnnnnnnnnnnnnnnnnnnnnnnnnnnnnnnnnnnnnnnnnnnnnnnnnnnnnnnnnnnnnnnnnnnnnnnnnnnnnnnnnnnnnnnnnnnnnnnnnnnnnnnnnnnnnnnnnnnnnnnnnnnnnnnnnnnnnnnnnnnnnnnnnnnnnnnnnnnnnnnnnnnnnnnnnnnnnnnnnnnnnnnnnnnnnnnnnnnnnnnnnnnnnnnnnnnnnnnnnnnnnnnnnnnnnnnnnnnnnnnnnnnnnnnnnnnnnnnnnnnnnnnnnnnnnnnnnnnnnnnnnnnnnnnnnnnnnnnnnnnnnnnnnnnnnnnnnnnnnnnnnnnnnnnnnnnnnnnnnnnnnnnnnnnnnnnnnnnnnnnnnnnnnnnnnnnnnnnnnnnnnnnnnnnnnnnnnnnnnnnnnnnnnnnnnnnnnnnnnnnnnnnnnnnnnnnnnnnnnnnnnnnnnnnnnnnnnnnnnnnnnnnnnnnnnnnnnnnnnnnnnnnnnnnnnnnnnnnnnnnnnnnnnnnnnnnnnnnnnnnnnnnnnnnnnnnnnnnnnnnnnnnnnnnnnnnnnnnnnnnnnnnnnnnnnnnnnnnnnnnnnnnnnnnnnnnnnnnnnnnnnnnnnnnnnnnnnnnnnnnnnnnnnnnnnnnnnnnnnnnnnnnnnnnnnnnnnnnnnnnnnnnnnnnnnnnnnnnnnnnnnnnnnnnnnnnnnnnnnnnnnnnnnnnnnnnnnnnnnnnnnnnnnnnnnnnnnnnnnnnnnnnnnnnnnnnnnnnnnnnnnnnnnnnnnnnnnnnnnnnnnnnnnnnnnnnnnnnnnnnnnnnnnnnnnnnnnnnnnnnnnnnnnnnnnnnnnnnnnnnnnnnnnnnnnnnnnnnnnnnnnnnnnnnnnnnnnnnnnnnnnnnnnnnnnnnnnnnnnnnnnnnnnnnnnnnnnnnnnnnnnnnnnnnnnnnnnnnnnnnnnnnnnnnnnnnnnnnnnnnnnnnnnnnnnnnnnnnnnnnnnnnnnnnnnnnnnnnnnnnnnnnnnnnnnnnnnnnnnnnnnnnnnnnnnnnnnnnnnnnnnnnnnnnnnnnnnnnnnnnnnnnnnnnnnnnnnnnnnnnnnnnnnnnnnnnnnnnnnnnnnnnnnnnnnnnnnnnnnnnnnnnnnnnnnnnnnnnnnnnnnnnnnnnnnnnnnnnnnnnnnnnnnnnnnnnnnnnnnnnnnnnnnnnnnnnnnnnnnnnnnnnnnnnnnnnnnnnnnnnnnnnnnnnnnnnnnnnnnnnnnnnnnnnnnnnnnnnnnnnnnnnnnnnnnnnnnnnnnnnnnnnnnnnnnnnnnnnnnnnnnnnnnnnnnnnnnnnnnnnnnnnnnnnnnnnnnnnnnnnnnnnnnnnnnnnnnnnnnnnnnnnnnnnnnnnnnnnnnnnnnnnnnnnnnnnnnnnnnnnnnnnnnnnnnnnnnnnnnnnnnnnnnnnnnnnnnnnnnnnnnnnnnnnnnnnnnnnnnnnnnnnnnnnnnnnnnnnnnnnnnnnnnnnnnnnnnnnnnnnnnnnnnnnnnnnnnnnnnnnnnnnnnnnnnnnnnnnnnnnnnnnnnnnnnnnnnnnnnnnnnnnnnnnnnnnnnnnnnnnnnnnnnnnnnnnnnnnnnnnnnnnnnnnnnnnnnnnnnnnnnnnnnnnnnnnnnnnnnnnnnnnnnnnnnnnnnnnnnnnnnnnnnnnnnnnnnnnnnnnnnnnnnnnnnnnnnnnnnnnnnnnnnnnnnnnnnnnnnnnnnnnnnnnnnnnnnnnnnnnnnnnnnnnnnnnnnnnnnnnnnnnnnnnnnnnnnnnnnnnnnnnnnnnnnnnnnnnnnnnnnnnnnnnnnnnnnnnnnnnnnnnnnnnnnnnnnnnnnnnnnnnnnnnnnnnnnnnnnnnnnnnnnnnnnnnnnnnnnnnnnnnnnnnnnnnnnnnnnnnnnnnnnnnnnnnnnnnnnnnnnnnnnnnnnnnnnnnnnnnnnnnnnnnnnnnnnnnnnnnnnnnnnnnnnnnnnnnnnnnnnnnnnnnnnnnnnnnnnnnnnnnnnnnnnnnnnnnnnnnnnnnnnnnnnnnnnnnnnnnnnnnnnnnnnnnnnnnnnnnnnnnnnnnnnnnnnnnnnnnnnnnnnnnnnnnnnnnnnnnnnnnnnnnnnnnnnnnnnnnnnnnnnnnnnnnnnnnnnnnnnnnnnnnnnnnnnnnnnnnnnnnnnnnnnnnnnnnnnnnnnnnnnnnnnnnnnnnnnnnnnnnnnnnnnnnnnnnnnnnnnnnnnnnnnnnnnnnnnnnnnnnnnnnnnnnnnnnnnnnnnnnnnnnnnnnnnnnnnnnnnnnnnnnnnnnnnnnnnnnnnnnnnnnnnnnnnnnnnnnnnnnnnnnnnnnnnnnnnnnnnnnnnnnnnnnnnnnnnnnnnnnnnnnnnnnnnnnnnnnnnnnnnnnnnnnnnnnnnnnnnnnnnnnnnnnnnnnnnnnnnnnnnnnnnnnnnnnnnnnnnnnnnnnnnnnnnnnnnnnnnnnnnnnnnnnnnnnnnnnnnnnnnnnnnnnnnnnnnnnnnnnnnnnnnnnnnnnnnnnnnnnnnnnnnnnnnnnnnnnnnnnnnnnnnnnnnnnnnnnnnnnnnnnnnnnnnnnnnnnnnnnnnnnnnnnnnnnnnnnnnnnnnnnnnnnnnnnnnnnnnnnnnnnnnnnnnnnnnnnnnnnnnnnnnnnnnnnnnnnnnnnnnnnnnnnnnnnnnnnnnnnnnnnnnnnnnnnnnnnnnnnnnnnnnnnnnnnnnnnnnnnnnnnnnnnnnnnnnnnnnnnnnnnnnnnnnnnnnnnnnnnnnnnnnnnnnnnnnnnnnnnnnnnnnnnnnnnnnnnnnnnnnnnnnnnnnnnnnnnnnnnnnnnnnnnnnnnnnnnnnnnnnnnnnnnnnnnnnnnnnnnnnnnnnnnnnnnnnnnnnnnnnnnnnnnnnnnnnnnnnnnnnnnnnnnnnnnnnnnnnnnnnnnnnnnnnnnnnnnnnnnnnnnnnnnnnnnnnnnnnnnnnnnnnnnnnnnnnnnnnnnnnnnnnnnnnnnnnnnnnnnnnnnnnnnnnnnnnnnnnnnnnnnnnnnnnnnnnnnnnnnnnnnnnnnnnnnnnnnnnnnnnnnnnnnnnnnnnnnnnnnnnnnnnnnnnnnnnnnnnnnnnnnnnnnnnnnnnnnnnnnnnnnnnnnnnnnnnnnnnnnnnnnnnnnnnnnnnnnnnnnnnnnnnnnnnnnnnnnnnnnnnnnnnnnnnnnnnnnnnnnnnnnnnnnnnnnnnnnnnnnnnnnnnnnnnnnnnnnnnnnnnnnnnnnnnnnnnnnnnnnnnnnnnnnnnnnnnnnnnnnnnnnnnnnnnnnnnnnnnnnnnnnnnnnnnnnnnnnnnnnnnnnnnnnnnnnnnnnnnnnnnnnnnnnnnnnnnnnnnnnnnnnnnnnnnnnnnnnnnnnnnnnnnnnnnnnnnnnnnnnnnnnnnnnnnnnnnnnnnnnnnnnnnnnnnnnnnnnnnnnnnnnnnnnnnnnnnnnnnnnnnnnnnnnnnnnnnnnnnnnnnnnnnnnnnnnnnnnnnnnnnnnnnnnnnnnnnnnnnnnnnnnnnnnnnnnnnnnnnnnnnnnnnnnnnnnnnnnnnnnnnnnnnnnnnnnnnnnnnnnnnnnnnnnnnnnnnnnnnnnnnnnnnnnnnnnnnnnnnnnnnnnnnnnnnnnnnnnnnnnnnnnnnnnnnnnnnnnnnnnnnnnnnnnnnnnnnnnnnnnnnnnnnnnnnnnnnnnnnnnnnnnnnnnnnnnnnnnnnnnnnnnnnnnnnnnnnnnnnnnnnnnnnnnnnnnnnnnnnnnnnnnnnnnnnnnnnnnnnnnnnnnnnnnnnnnnnnnnnnnnnnnnnnnnnnnnnnnnnnnnnnnnnnnnnnnnnnnnnnnnnnnnnnnnnnnnnnnnnnnnnnnnnnnnnnnnnnnnnnnnnnnnnnnnnnnnnnnnnnnnnnnnnnnnnnnnnnnnnnnnnnnnnnnnnnnnnnnnnnnnnnnnnnnnnnnnnnnnnnnnnnnnnnnnnnnnnnnnnnnnnnnnnnnnnnnnnnnnnnnnnnnnnnnnnnnnnnnnnnnnnnnnnnnnnnnnnnnnnnnnnnnnnnnnnnnnnnnnnnnnnnnnnnnnnnnnnnnnnnnnnnnnnnnnnnnnnnnnnnnnnnnnnnnnnnnnnnnnnnnnnnnnnnnnnnnnnnnnnnnnnnnnnnnnnnnnnnnnnnnnnnnnnnnnnnnnnnnnnnnnnnnnnnnnnnnnnnnnnnnnnnnnnnnnnnnnnnnnnnnnnnnnnnnnnnnnnnnnnnnnnnnnnnnnnnnnnnnnnnnnnnnnnnnnnnnnnnnnnnnnnnnnnnnnnnnnnnnnnnnnnnnnnnnnnnnnnnnnnnnnnnnnnnnnnnnnnnnnnnnnnnnnnnnnnnnnnnnnnnnnnnnnnnnnnnnnnnnnnnnnnnnnnnnnnnnnnnnnnnnnnnnnnnnnnnnnnnnnnnnnnnnnnnnnnnnnnnnnnnnnnnnnnnnnnnnnnnnnnnnnnnnnnnnnnnnnnnnnnnnnnnnnnnnnnnnnnnnnnnnnnnnnnnnnnnnnnnnnnnnnnnnnnnnnnnnnnnnnnnnnnnnnnnnnnnnnnnnnnnnnnnnnnnnnnnnnnnnnnnnnnnnnnnnnnnnnnnnnnnnnnnnnnnnnnnnnnnnnnnnnnnnnnnnnnnnnnnnnnnnnnnnnnnnnnnnnnnnnnnnnnnnnnnnnnnnnnnnnnnnnnnnnnnnnnnnnnnnnnnnnnnnnnnnnnnnnnnnnnnnnnnnnnnnnnnnnnnnnnnnnnnnnnnnnnnnnnnnnnnnnnnnnnnnnnnnnnnnnnnnnnnnnnnnnnnnnnnnnnnnnnnnnnnnnnnnnnnnnnnnnnnnnnnnnnnnnnnnnnnnnnnnnnnnnnnnnnnnnnnnnnnnnnnnnnnnnnnnnnnnnnnnnnnnnnnnnnnnnnnnnnnnnnnnnnnnnnnnnnnnnnnnnnnnnnnnnnnnnnnnnnnnnnnnnnnnnnnnnnnnnnnnnnnnnnnnnnnnnnnnnnnnnnnnnnnnnnnnnnnnnnnnnnnnnnnnnnnnnnnnnnnnnnnnnnnnnnnnnnnnnnnnnnnnnnnnnnnnnnnnnnnnnnnnnnnnnnnnnnnnnnnnnnnnnnnnnnnnnnnnnnnnnnnnnnnnnnnnnnnnnnnnnnnnnnnnnnnnnnnnnnnnnnnnnnnnnnnnnnnnnnnnnnnnnnnnnnnnnnnnnnnnnnnnnnnnnnnnnnnnnnnnnnnnnnnnnnnnnnnnnnnnnnnnnnnnnnnnnnnnnnnnnnnnnnnnnnnnnnnnnnnnnnnnnnnnnnnnnnnnnnnnnnnnnnnnnnnnnnnnnnnnnnnnnnnnnnnnnnnnnnnnnnnnnnnnnnnnnnnnnnnnnnnnnnnnnnnnnnnnnnnnnnnnnnnnnnnnnnnnnnnnnnnnnnnnnnnnnnnnnnnnnnnnnnnnnnnnnnnnnnnnnnnnnnnnnnnnnnnnnnnnnnnnnnnnnnnnnnnnnnnnnnnnnnnnnnnnnnnnnnnnnnnnnnnnnnnnnnnnnnnnnnnnnnnnnnnnnnnnnnnnnnnnnnnnnnnnnnnnnnnnnnnnnnnnnnnnnnnnnnnnnnnnnnnnnnnnnnnnnnnnnnnnnnnnnnnnnnnnnnnnnnnnnnnnnnnnnnnnnnnnnnnnnnnnnnnnnnnnnnnnnnnnnnnnnnnnnnnnnnnnnnnnnnnnnnnnnnnnnnnnnnnnnnnnnnnnnnnnnnnnnnnnnnnnnnnnnnnnnnnnnnnnnnnnnnnnnnnnnnnnnnnnnnnnnnnnnnnnnnnnnnnnnnnnnnnnnnnnnnnnnnnnnnnnnnnnnnnnnnnnnnnnnnnnnnnnnnnnnnnnnnnnnnnnnnnnnnnnnnnnnnnnnnnnnnnnnnnnnnnnnnnnnnnnnnnnnnnnnnnnnnnnnnnnnnnnnnnnnnnnnnnnnnnnnnnnnnnnnnnnnnnnnnnnnnnnnnnnnnnnnnnnnnnnnnnnnnnnnnnnnnnnnnnnnnnnnnnnnnnnnnnnnnnnnnnnnnnnnnnnnnnnnnnnnnnnnnnnnnnnnnnnnnnnnnnnnnnnnnnnnnnnnnnnnnnnnnnnnnnnnnnnnnnnnnnnnnnnnnnnnnnnnnnnnnnnnnnnnnnnnnnnnnnnnnnnnnnnnnnnnnnnnnnnnnnnnnnnnnnnnnnnnnnnnnnnnnnnnnnnnnnnnnnnnnnnnnnnnnnnnnnnnnnnnnnnnnnnnnnnnnnnnnnnnnnnnnnnnnnnnnnnnnnnnnnnnnnnnnnnnnnnnnnnnnnnnnnnnnnnnnnnnnnnnnnnnnnnnnnnnnnnnnnnnnnnnnnnnnnnnnnnnnnnnnnnnnnnnnnnnnnnnnnnnnnnnnnnnnnnnnnnnnnnnnnnnnnnnnnnnnnnnnnnnnnnnnnnnnnnnnnnnnnnnnnnnnnnnnnnnnnnnnnnnnnnnnnnnnnnnnnnnnnnnnnnnnnnnnnnnnnnnnnnnnnnnnnnnnnnnnnnnnnnnnnnnnnnnnnnnnnnnnnnnnnnnnnnnnnnnnnnnnnnnnnnnnnnnnnnnnnnnnnnnnnnnnnnnnnnnnnnnnnnnnnnnnnnnnnnnnnnnnnnnnnnnnnnnnnnnnnnnnnnnnnnnnnnnnnnnnnnnnnnnnnnnnnnnnnnnnnnnnnnnnnnnnnnnnnnnnnnnnnnnnnnnnnnnnnnnnnnnnnnnnnnnnnnnnnnnnnnnnnnnnnnnnnnnnnnnnnnnnnnnnnnnnnnnnnnnnnnnnnnnnnnnnnnnnnnnnnnnnnnnnnnnnnnnnnnnnnnnnnnnnnnnnnnnnnnnnnnnnnnnnnnnnnnnnnnnnnnnnnnnnnnnnnnnnnnnnnnnnnnnnnnnnnnnnnnnnnnnnnnnnnnnnnnnnnnnnnnnnnnnnnnnnnnnnnnnnnnnnnnnnnnnnnnnnnnnnnnnnnnnnnnnnnnnnnnnnnnnnnnnnnnnnnnnnnnnnnnnnnnnnnnnnnnnnnnnnnnnnnnnnnnnnnnnnnnnnnnnnnnnnnnnnnnnnnnnnnnnnnnnnnnnnnnnnnnnnnnnnnnnnnnnnnnnnnnnnnnnnnnnnnnnnnnnnnnnnnnnnnnnnnnnnnnnnnnnnnnnnnnnnnnnnnnnnnnnnnnnnnnnnnnnnnnnnnnnnnnnnnnnnnnnnnnnnnnnnnnnnnnnnnnnnnnnnnnnnnnnnnnnnnnnnnnnnnnnnnnnnnnnnnnnnnnnnnnnnnnnnnnnnnnnnnnnnnnnnnnnnnnnnnnnnnnnnnnnnnnnnnnnnnnnnnnnnnnnnnnnnnnnnnnnnnnnnnnnnnnnnnnnnnnnnnnnnnnnnnnnnnnnnnnnnnnnnnnnnnnnnnnnnnnnnnnnnnnnnnnnnnnnnnnnnnnnnnnnnnnnnnnnnnnnnnnnnnnnnnnnnnnnnnnnnnnnnnnnnnnnnnnnnnnnnnnnnnnnnnnnnnnnnnnnnnnnnnnnnnnnnnnnnnnnnnnnnnnnnnnnnnnnnnnnnnnnnnnnnnnnnnnnnnnnnnnnnnnnnnnnnnnnnnnnnnnnnnnnnnnnnnnnnnnnnnnnnnnnnnnnnnnnnnnnnnnnnnnnnnnnnnnnnnnnnnnnnnnnnnnnnnnnnnnnnnnnnnnnnnnnnnnnnnnnnnnnnnnnnnnnnnnnnnnnnnnnnnnnnnnnnnnnnnnnnnnnnnnnnnnnnnnnnnnnnnnnnnnnnnnnnnnnnnnnnnnnnnnnnnnnnnnnnnnnnnnnnnnnnnnnnnnnnnnnnnnnnnnnnnnnnnnnnnnnnnnnnnnnnnnnnnnnnnnnnnnnnnnnnnnnnnnnnnnnnnnnnnnnnnnnnnnnnnnnnnnnnnnnnnnnnnnnnnnnnnnnnnnnnnnnnnnnnnnnnnnnnnnnnnnnnnnnnnnnnnnnnnnnnnnnnnnnnnnnnnnnnnnnnnnnnnnnnnnnnnnnnnnnnnnnnnnnnnnnnnnnnnnnnnnnnnnnnnnnnnnnnnnnnnnnnnnnnnnnnnnnnnnnnnnnnnnnnnnnnnnnnnnnnnnnnnnnnnnnnnnnnnnnnnnnnnnnnnnnnnnnnnnnnnnnnnnnnnnnnnnnnnnnnnnnnnnnnnnnnnnnnnnnnnnnnnnnnnnnnnnnnnnnnnnnnnnnnnnnnnnnnnnnnnnnnnnnnnnnnnnnnnnnnnnnnnnnnnnnnnnnnnnnnnnnnnnnnnnnnnnnnnnnnnnnnnnnnnnnnnnnnnnnnnnnnnnnnnnnnnnnnnnnnnnnnnnnnnnnnnnnnnnnnnnnnnnnnnnnnnnnnnnnnnnnnnnnnnnnnnnnnnnnnnnnnnnnnnnnnnnnnnnnnnnnnnnnnnnnnnnnnnnnnnnnnnnnnnnnnnnnnnnnnnnnnnnnnnnnnnnnnnnnnnnnnnnnnnnnnnnnnnnnnnnnnnnnnnnnnnnnnnnnnnnnnnnnnnnnnnnnnnnnnnnnnnnnnnnnnnnnnnnnnnnnnnnnnnnnnnnnnnnnnnnnnngaaactctgcgagaaatacgaacatatcgcgatcgtcgcagctccactgaatttgtggagctatttcctcagcgccactctccgtggcgcttttcttttgatcggctagaatcgagcggtgttccgttccgttgaacaagccaactttcactcccgtctcgccgcacatattcagtcagcggacgcgccgttgttgcttgaaggcaccacagggctcggaaagacgcgtgcttacctcgccgcactcaagggcgcagtggagcgaggaaagtctgtcgcgattgtcgttcccacacacgcgctgatttcacagctgcttggttcttctgatctgaccgctgtgatccctgaaacgatcactcgcgcagcttttcgcccacggtcaatgtacgactccaagcaagagtacgaggacgccaaagcaagcgcagtagcagcacagattctgatttgtacaagttcttcggtgatcgtggactcgcgcaccaagggcaagtatcacggagccacacttcgcgactacattctgtttgatgaagcggatcaattgcctcaatacgcagcactctcacgcgaccaagagattcgcggaagcgaactgaaagatcttggtctccgtggtgctcacgcaaaagaacttgcgcaagcggtgattgcgcacaagggagccgaatttgaaacgcgcgcagcagcagcgctgattcttgaagcgctagaggaacctgcttggtatcacagcgcaggaatgactgacgatggagggattgcgctctatcacaaaatgccaggacgattgctcaagagagtttccaattcaccaaatgtcgcgtttgtgagtgccacgctctccattggtgggaagtttgatgactttcggcgcgcaatgggaatcacggggcagagttccttgtccgcgatcattgagccaagccatcacggaaccctgaagttctttcacgcagtgcatcaggtttcttctgaggagtggttgtccgcaacgcaagaagcaatcaacaaagcgcagaagccttgcttggtggtcactccaagtaatgagttatctcagatgttgggtcggttgttcccacaggcgattgttcgcacggctgaagagaagactgctgacgcgatcctccgactcacagatgaaagaaatattctcatcgcctcagctgcttgggcgggattggacacgccgattgagtggaagagcattgtgattccgcgcattccgtttctgcgcccacaggtgattgacggaaatgtggagagcagcttctttgactcacgcaacagcgctattcgccgaatgcgccaagtgatcggtcgtggactacgcaagcctgatgctgagtgtgaggtctacattcttgacgaacgcttggcgatgattgagtcattcatcccgtcaagatttcagcaagcgtggaccgcgcgtggaagggtggaaggagcaagaactgaacatacgctgtcaaaagcagagcgggatccacaggtccgcaagtcagcgctgaagcactttggtcggcgatgtatgtcttgcgacttcgttccgcgagtggacagtcagcttgaggttcatcatcttcatcccctagcgaatggcggtgaacgaatcacacggatccaaacggatgtcgcggtgctgtgtgcgaactgtcatcgcttggctcattcggcgacaccacctctcacggttgaggttcttaggggacttcaccaatcagtggggtcggagcaatgagccgaagccacgcgaacgagagttccaaaagggttccaaaaccctccgtataccctcgcttacctagccgctcacgccgctaatagccctcgagatttgagcgtatgaaacgctgttccaacgccacaccgaagcgtctgactgatcctcttcggcgacattcccttcttgtagagctcaacgatggcggctctggtcgagtcagtcacgctacttggacgcccaagtttctttccttccttccgagctcgctcaacaccaatccgaatccgctcacgaatcagatcccgctcaaactcagcgaacgatgaaaacacaccgaacatcagctttcctgatggggtggtggtgtcgatcgcctgttggtggaagtagagctgaacgccttgagcgtgaaggtcgttcacggtggtcacaaggtgctgaagggaacgcccaagacggtcaatgctccacacggcgatcagatcgaattcgcggcgagtggcggctttcaagagaccatcgagagcagggcgctgatcgcgtcccttggcgcctgagataccatcgtcacgataggtcgcgacgatgttccacccacgaagggctgcgatccgttcgagttcgtggagttgattgtcggcggtttggtgagcggtggagacgcgaagatagagagcggtacgcatttaggagcctccaagtcgttgaattagtaacctagcctctaagaaaactctagcgtatgattcttgtcttagaaatcgctgaaacccgaataaattcaggctcttatatcgttctctaaaggggttccgaatcgagctagtctcgatagtcccaaggatgcggcgagtgtgaaaattaccacccgtaaaaccgcagcggagcaaacgcttcatatctacacacgggtcagcaccgcagctcaacgggatgacggaacatccttacagacgcaactagagcaaggtaccgctcgcgccaagcaacttgggctgaagactcgacattgggatgaaggcgggaaaagttctcaccacgaagatctagccgctcgacctacactcgctgctctctaccaagccatcaaggatggtggggtcaagcacctgttcgtttacgatcaatcgcggttgtcacgaaacgacaatgtcgcctcaatttttcgatatgaatgtaacaagcagggtgtcacgctttacacgaaagacggacgctttgatctctccaatcctcaggacaagtttctaaaacagattcttgatgggctttcggaatttgataacgcgattcgcgcggaacgcacacgactaggaaaactaaatcgcgcacgatcaggcgggtggcacggcggtccacctcctttcggctacaagctcgtagaccgtcggctcacaatcgagccaaaagaatcaaaatgggtgaagcgaatattctcagaagcgttcaatggacaaagcccacagaagatcaaacagctacttgactcaaactcagtcagtccgagaaggggtgggctttggacgattggttctgtggctgcgttactgaaaaactctcactacatcgggaactacacattcaaggatcgtaagtctgatgaactagtgaccgttacttgccccgcgatagttgaccccgacctgtggaaagctgttcacctcaaacgcaaacgacaaaacagtcgagcggctcagaaaaacccaactaagcacttttatcttttgcgcgatctgatgtattgcggtcactgtgggcgaccgatttcaggtagacaaaaaccgagtaagcgagagcaactttactactgtcctaacaaagagcgcgaatgggcaaagcagggcggaagcaaaaccaaatggaagcgaggtctgggttgtggaatgagtcgcgctctcaatattgctcagactgacgagctcgtctttagtgcggtcttgaacattcacgacaagtctcacttactcaaggagcaggtgaagcgaagtgtcttatcagaggatggcgcatctaccatcaagtccgctacggagattgaggcgctcaactcaaagatgcgtcggcttgaaaagcggttagaacaagctcgtggtcttctcggtatcgctgagggtcatcgtgatctaggtaagatgagcaaatcgcaattcgaatctcgacggaaggtcattgagtctgagattgagttggttgaaaccgagctgaacaacttgaaactttcaatcaagggtcagcaaacccacaaaaagtgggatgcttggataaagcagtttggcgaaatgattgcgtccaaaatgaccttgagtcaggaagcaaagaggcagtacatcgcgggtctgttagaccgcattgaggttcgttacctaaaggcgaatgacgctcacgaactcaggcttcagttccgtctccccatcgtgaacgaccaattccaccgtaagggcattcgtcggaaaggggattggtatgatttgggtgaagggacgagggatttgctcctgagagtggacaaaaacccgagtaaaaaacagggaaaagcacttgcccccgagcaaaaccagaccgctactgtcgaatgacggttaga

SEQ ID NO: 116 - DNA, 14187 bp, Artificial Sequence
  Synthetic Oligonucleotide
  misc_feature (1)..(9112): n is a, c, g, or t
nnnnnnnnnnnnnnnnnnnnnnnnnnnnnnnnnnnnnnnnnnnnnnnnnnnnnnnnnnnnnnnnnnnnnnnnnnnnnnnnnnnnnnnnnnnnnnnnnnnnnnnnnnnnnnnnnnnnnnnnnnnnnnnnnnnnnnnnnnnnnnnnnnnnnnnnnnnnnnnnnnnnnnnnnnnnnnnnnnnnnnnnnnnnnnnnnnnnnnnnnnnnnnnnnnnnnnnnnnnnnnnnnnnnnnnnnnnnnnnnnnnnnnnnnnnnnnnnnnnnnnnnnnnnnnnnnnnnnnnnnnnnnnnnnnnnnnnnnnnnnnnnnnnnnnnnnnnnnnnnnnnnnnnnnnnnnnnnnnnnnnnnnnnnnnnnnnnnnnnnnnnnnnnnnnnnnnnnnnnnnnnnnnnnnnnnnnnnnnnnnnnnnnnnnnnnnnnnnnnnnnnnnnnnnnnnnnnnnnnnnnnnnnnnnnnnnnnnnnnnnnnnnnnnnnnnnnnnnnnnnnnnnnnnnnnnnnnnnnnnnnnnnnnnnnnnnnnnnnnnnnnnnnnnnnnnnnnnnnnnnnnnnnnnnnnnnnnnnnnnnnnnnnnnnnnnnnnnnnnnnnnnnnnnnnnnnnnnnnnnnnnnnnnnnnnnnnnnnnnnnnnnnnnnnnnnnnnnnnnnnnnnnnnnnnnnnnnnnnnnnnnnnnnnnnnnnnnnnnnnnnnnnnnnnnnnnnnnnnnnnnnnnnnnnnnnnnnnnnnnnnnnnnnnnnnnnnnnnnnnnnnnnnnnnnnnnnnnnnnnnnnnnnnnnnnnnnnnnnnnnnnnnnnnnnnnnnnnnnnnnnnnnnnnnnnnnnnnnnnnnnnnnnnnnnnnnnnnnnnnnnnnnnnnnnnnnnnnnnnnnnnnnnnnnnnnnnnnnnnnnnnnnnnnnnnnnnnnnnnnnnnnnnnnnnnnnnnnnnnnnnnnnnnnnnnnnnnnnnnnnnnnnnnnnnnnnnnnnnnnnnnnnnnnnnnnnnnnnnnnnnnnnnnnnnnnnnnnnnnnnnnnnnnnnnnnnnnnnnnnnnnnnnnnnnnnnnnnnnnnnnnnnnnnnnnnnnnnnnnnnnnnnnnnnnnnnnnnnnnnnnnnnnnnnnnnnnnnnnnnnnnnnnnnnnnnnnnnnnnnnnnnnnnnnnnnnnnnnnnnnnnnnnnnnnnnnnnnnnnnnnnnnnnnnnnnnnnnnnnnnnnnnnnnnnnnnnnnnnnnnnnnnnnnnnnnnnnnnnnnnnnnnnnnnnnnnnnnnnnnnnnnnnnnnnnnnnnnnnnnnnnnnnnnnnnnnnnnnnnnnnnnnnnnnnnnnnnnnnnnnnnnnnnnnnnnnnnnnnnnnnnnnnnnnnnnnnnnnnnnnnnnnnnnnnnnnnnnnnnnnnnnnnnnnnnnnnnnnnnnnnnnnnnnnnnnnnnnnnnnnnnnnnnnnnnnnnnnnnnnnnnnnnnnnnnnnnnnnnnnnnnnnnnnnnnnnnnnnnnnnnnnnnnnnnnnnnnnnnnnnnnnnnnnnnnnnnnnnnnnnnnnnnnnnnnnnnnnnnnnnnnnnnnnnnnnnnnnnnnnnnnnnnnnnnnnnnnnnnnnnnnnnnnnnnnnnnnnnnnnnnnnnnnnnnnnnnnnnnnnnnnnnnnnnnnnnnnnnnnnnnnnnnnnnnnnnnnnnnnnnnnnnnnnnnnnnnnnnnnnnnnnnnnnnnnnnnnnnnnnnnnnnnnnnnnnnnnnnnnnnnnnnnnnnnnnnnnnnnnnnnnnnnnnnnnnnnnnnnnnnnnnnnnnnnnnnnnnnnnnnnnnnnnnnnnnnnnnnnnnnnnnnnnnnnnnnnnnnnnnnnnnnnnnnnnnnnnnnnnnnnnnnnnnnnnnnnnnnnnnnnnnnnnnnnnnnnnnnnnnnnnnnnnnnnnnnnnnnnnnnnnnnnnnnnnnnnnnnnnnnnnnnnnnnnnnnnnnnnnnnnnnnnnnnnnnnnnnnnnnnnnnnnnnnnnnnnnnnnnnnnnnnnnnnnnnnnnnnnnnnnnnnnnnnnnnnnnnnnnnnnnnnnnnnnnnnnnnnnnnnnnnnnnnnnnnnnnnnnnnnnnnnnnnnnnnnnnnnnnnnnnnnnnnnnnnnnnnnnnnnnnnnnnnnnnnnnnnnnnnnnnnnnnnnnnnnnnnnnnnnnnnnnnnnnnnnnnnnnnnnnnnnnnnnnnnnnnnnnnnnnnnnnnnnnnnnnnnnnnnnnnnnnnnnnnnnnnnnnnnnnnnnnnnnnnnnnnnnnnnnnnnnnnnnnnnnnnnnnnnnnnnnnnnnnnnnnnnnnnnnnnnnnnnnnnnnnnnnnnnnnnnnnnnnnnnnnnnnnnnnnnnnnnnnnnnnnnnnnnnnnnnnnnnnnnnnnnnnnnnnnnnnnnnnnnnnnnnnnnnnnnnnnnnnnnnnnnnnnnnnnnnnnnnnnnnnnnnnnnnnnnnnnnnnnnnnnnnnnnnnnnnnnnnnnnnnnnnnnnnnnnnnnnnnnnnnnnnnnnnnnnnnnnnnnnnnnnnnnnnnnnnnnnnnnnnnnnnnnnnnnnnnnnnnnnnnnnnnnnnnnnnnnnnnnnnnnnnnnnnnnnnnnnnnnnnnnnnnnnnnnnnnnnnnnnnnnnnnnnnnnnnnnnnnnnnnnnnnnnnnnnnnnnnnnnnnnnnnnnnnnnnnnnnnnnnnnnnnnnnnnnnnnnnnnnnnnnnnnnnnnnnnnnnnnnnnnnnnnnnnnnnnnnnnnnnnnnnnnnnnnnnnnnnnnnnnnnnnnnnnnnnnnnnnnnnnnnnnnnnnnnnnnnnnnnnnnnnnnnnnnnnnnnnnnnnnnnnnnnnnnnnnnnnnnnnnnnnnnnnnnnnnnnnnnnnnnnnnnnnnnnnnnnnnnnnnnnnnnnnnnnnnnnnnnnnnnnnnnnnnnnnnnnnnnnnnnnnnnnnnnnnnnnnnnnnnnnnnnnnnnnnnnnnnnnnnnnnnnnnnnnnnnnnnnnnnnnnnnnnnnnnnnnnnnnnnnnnnnnnnnnnnnnnnnnnnnnnnnnnnnnnnnnnnnnnnnnnnnnnnnnnnnnnnnnnnnnnnnnnnnnnnnnnnnnnnnnnnnnnnnnnnnnnnnnnnnnnnnnnnnnnnnnnnnnnnnnnnnnnnnnnnnnnnnnnnnnnnnnnnnnnnnnnnnnnnnnnnnnnnnnnnnnnnnnnnnnnnnnnnnnnnnnnnnnnnnnnnnnnnnnnnnnnnnnnnnnnnnnnnnnnnnnnnnnnnnnnnnnnnnnnnnnnnnnnnnnnnnnnnnnnnnnnnnnnnnnnnnnnnnnnnnnnnnnnnnnnnnnnnnnnnnnnnnnnnnnnnnnnnnnnnnnnnnnnnnnnnnnnnnnnnnnnnnnnnnnnnnnnnnnnnnnnnnnnnnnnnnnnnnnnnnnnnnnnnnnnnnnnnnnnnnnnnnnnnnnnnnnnnnnnnnnnnnnnnnnnnnnnnnnnnnnnnnnnnnnnnnnnnnnnnnnnnnnnnnnnnnnnnnnnnnnnnnnnnnnnnnnnnnnnnnnnnnnnnnnnnnnnnnnnnnnnnnnnnnnnnnnnnnnnnnnnnnnnnnnnnnnnnnnnnnnnnnnnnnnnnnnnnnnnnnnnnnnnnnnnnnnnnnnnnnnnnnnnnnnnnnnnnnnnnnnnnnnnnnnnnnnnnnnnnnnnnnnnnnnnnnnnnnnnnnnnnnnnnnnnnnnnnnnnnnnnnnnnnnnnnnnnnnnnnnnnnnnnnnnnnnnnnnnnnnnnnnnnnnnnnnnnnnnnnnnnnnnnnnnnnnnnnnnnnnnnnnnnnnnnnnnnnnnnnnnnnnnnnnnnnnnnnnnnnnnnnnnnnnnnnnnnnnnnnnnnnnnnnnnnnnnnnnnnnnnnnnnnnnnnnnnnnnnnnnnnnnnnnnnnnnnnnnnnnnnnnnnnnnnnnnnnnnnnnnnnnnnnnnnnnnnnnnnnnnnnnnnnnnnnnnnnnnnnnnnnnnnnnnnnnnnnnnnnnnnnnnnnnnnnnnnnnnnnnnnnnnnnnnnnnnnnnnnnnnnnnnnnnnnnnnnnnnnnnnnnnnnnnnnnnnnnnnnnnnnnnnnnnnnnnnnnnnnnnnnnnnnnnnnnnnnnnnnnnnnnnnnnnnnnnnnnnnnnnnnnnnnnnnnnnnnnnnnnnnnnnnnnnnnnnnnnnnnnnnnnnnnnnnnnnnnnnnnnnnnnnnnnnnnnnnnnnnnnnnnnnnnnnnnnnnnnnnnnnnnnnnnnnnnnnnnnnnnnnnnnnnnnnnnnnnnnnnnnnnnnnnnnnnnnnnnnnnnnnnnnnnnnnnnnnnnnnnnnnnnnnnnnnnnnnnnnnnnnnnnnnnnnnnnnnnnnnnnnnnnnnnnnnnnnnnnnnnnnnnnnnnnnnnnnnnnnnnnnnnnnnnnnnnnnnnnnnnnnnnnnnnnnnnnnnnnnnnnnnnnnnnnnnnnnnnnnnnnnnnnnnnnnnnnnnnnnnnnnnnnnnnnnnnnnnnnnnnnnnnnnnnnnnnnnnnnnnnnnnnnnnnnnnnnnnnnnnnnnnnnnnnnnnnnnnnnnnnnnnnnnnnnnnnnnnnnnnnnnnnnnnnnnnnnnnnnnnnnnnnnnnnnnnnnnnnnnnnnnnnnnnnnnnnnnnnnnnnnnnnnnnnnnnnnnnnnnnnnnnnnnnnnnnnnnnnnnnnnnnnnnnnnnnnnnnnnnnnnnnnnnnnnnnnnnnnnnnnnnnnnnnnnnnnnnnnnnnnnnnnnnnnnnnnnnnnnnnnnnnnnnnnnnnnnnnnnnnnnnnnnnnnnnnnnnnnnnnnnnnnnnnnnnnnnnnnnnnnnnnnnnnnnnnnnnnnnnnnnnnnnnnnnnnnnnnnnnnnnnnnnnnnnnnnnnnnnnnnnnnnnnnnnnnnnnnnnnnnnnnnnnnnnnnnnnnnnnnnnnnnnnnnnnnnnnnnnnnnnnnnnnnnnnnnnnnnnnnnnnnnnnnnnnnnnnnnnnnnnnnnnnnnnnnnnnnnnnnnnnnnnnnnnnnnnnnnnnnnnnnnnnnnnnnnnnnnnnnnnnnnnnnnnnnnnnnnnnnnnnnnnnnnnnnnnnnnnnnnnnnnnnnnnnnnnnnnnnnnnnnnnnnnnnnnnnnnnnnnnnnnnnnnnnnnnnnnnnnnnnnnnnnnnnnnnnnnnnnnnnnnnnnnnnnnnnnnnnnnnnnnnnnnnnnnnnnnnnnnnnnnnnnnnnnnnnnnnnnnnnnnnnnnnnnnnnnnnnnnnnnnnnnnnnnnnnnnnnnnnnnnnnnnnnnnnnnnnnnnnnnnnnnnnnnnnnnnnnnnnnnnnnnnnnnnnnnnnnnnnnnnnnnnnnnnnnnnnnnnnnnnnnnnnnnnnnnnnnnnnnnnnnnnnnnnnnnnnnnnnnnnnnnnnnnnnnnnnnnnnnnnnnnnnnnnnnnnnnnnnnnnnnnnnnnnnnnnnnnnnnnnnnnnnnnnnnnnnnnnnnnnnnnnnnnnnnnnnnnnnnnnnnnnnnnnnnnnnnnnnnnnnnnnnnnnnnnnnnnnnnnnnnnnnnnnnnnnnnnnnnnnnnnnnnnnnnnnnnnnnnnnnnnnnnnnnnnnnnnnnnnnnnnnnnnnnnnnnnnnnnnnnnnnnnnnnnnnnnnnnnnnnnnnnnnnnnnnnnnnnnnnnnnnnnnnnnnnnnnnnnnnnnnnnnnnnnnnnnnnnnnnnnnnnnnnnnnnnnnnnnnnnnnnnnnnnnnnnnnnnnnnnnnnnnnnnnnnnnnnnnnnnnnnnnnnnnnnnnnnnnnnnnnnnnnnnnnnnnnnnnnnnnnnnnnnnnnnnnnnnnnnnnnnnnnnnnnnnnnnnnnnnnnnnnnnnnnnnnnnnnnnnnnnnnnnnnnnnnnnnnnnnnnnnnnnnnnnnnnnnnnnnnnnnnnnnnnnnnnnnnnnnnnnnnnnnnnnnnnnnnnnnnnnnnnnnnnnnnnnnnnnnnnnnnnnnnnnnnnnnnnnnnnnnnnnnnnnnnnnnnnnnnnnnnnnnnnnnnnnnnnnnnnnnnnnnnnnnnnnnnnnnnnnnnnnnnnnnnnnnnnnnnnnnnnnnnnnnnnnnnnnnnnnnnnnnnnnnnnnnnnnnnnnnnnnnnnnnnnnnnnnnnnnnnnnnnnnnnnnnnnnnnnnnnnnnnnnnnnnnnnnnnnnnnnnnnnnnnnnnnnnnnnnnnnnnnnnnnnnnnnnnnnnnnnnnnnnnnnnnnnnnnnnnnnnnnnnnnnnnnnnnnnnnnnnnnnnnnnnnnnnnnnnnnnnnnnnnnnnnnnnnnnnnnnnnnnnnnnnnnnnnnnnnnnnnnnnnnnnnnnnnnnnnnnnnnnnnnnnnnnnnnnnnnnnnnnnnnnnnnnnnnnnnnnnnnnnnnnnnnnnnnnnnnnnnnnnnnnnnnnnnnnnnnnnnnnnnnnnnnnnnnnnnnnnnnnnnnnnnnnnnnnnnnnnnnnnnnnnnnnnnnnnnnnnnnnnnnnnnnnnnnnnnnnnnnnnnnnnnnnnnnnnnnnnnnnnnnnnnnnnnnnnnnnnnnnnnnnnnnnnnnnnnnnnnnnnnnnnnnnnnnnnnnnnnnnnnnnnnnnnnnnnnnnnnnnnnnnnnnnnnnnnnnnnnnnnnnnnnnnnnnnnnnnnnnnnnnnnnnnnnnnnnnnnnnnnnnnnnnnnnnnnnnnnnnnnnnnnnnnnnnnnnnnnnnnnnnnnnnnnnnnnnnnnnnnnnnnnnnnnnnnnnnnnnnnnnnnnnnnnnnnnnnnnnnnnnnnnnnnnnnnnnnnnnnnnnnnnnnnnnnnnnnnnnnnnnnnnnnnnnnnnnnnnnnnnnnnnnnnnnnnnnnnnnnnnnnnnnnnnnnnnnnnnnnnnnnnnnnnnnnnnnnnnnnnnnnnnnnnnnnnnnnnnnnnnnnnnnnnnnnnnnnnnnnnnnnnnnnnnnnnnnnnnnnnnnnnnnnnnnnnnnnnnnnnnnnnnnnnnnnnnnnnnnnnnnnnnnnnnnnnnnnnnnnnnnnnnnnnnnnnnnnnnnnnnnnnnnnnnnnnnnnnnnnnnnnnnnnnnnnnnnnnnnnnnnnnnnnnnnnnnnnnnnnnnnnnnnnnnnnnnnnnnnnnnnnnnnnnnnnnnnnnnnnnnnnnnnnnnnnnnnnnnnnnnnnnnnnnnnnnnnnnnnnnnnnnnnnnnnnnnnnnnnnnnnnnnnnnnnnnnnnnnnnnnnnnnnnnnnnnnnnnnnnnnnnnnnnnnnnnnnnnnnnnnnnnnnnnnnnnnnnnnnnnnnnnnnnnnnnnnnnnnnnnnnnnnnnnnnnnnnnnnnnnnnnnnnnnnnnnnnnnnnnnnnnnnnnnnnnnnnnnnnnnnnnnnnnnnnnnnnnnnnnnnnnnnnnnnnnnnnnnnnnnnnnnnnnnnnnnnnnnnnnnnnnnnnnnnnnnnnnnnnnnnnnnnnnnnnnnnnnnnnnnnnnnnnnnnnnnnnnnnnnnnnnnnnnnnnnnnnnnnnnnnnnnnnnnnnnnnnnnnnnnnnnnnnnnnnnnnnnnnnnnnnnnnnnnnnnnnnnnnnnnnnnnnnnnnnnnnnnnnnnnnnnnnnnnnnnnnnnnnnnnnnnnnnnnnnnnnnnnnnnnnnnnnnnnnnnnnnnnnnnnnnnnnnnnnnnnnnnnnnnnnnnnnnnnnnnnnnnnnnnnnnnnnnnnnnnnnnnnnnnnnnnnnnnnnnnnnnnnnnnnnnnnnnnnnnnnnnnnnnnnnnnnnnnnnnnnnnnnnnnnnnnnnnnnnnnnnnnnnnnnnnnnnnnnnnnnnnnnnnnnnnnnnnnnnnnnnnnnnnnnnnnnnnnnnnnnnnnnnnnnnnnnnnnnnnnnnnnnnnnnnnnnnnnnnnnnnnnnnnnnnnnnnnnnnnnnnnnnnnnnnnnnnnnnnnnnnnnnnnnnnnnnnnnnnnnnnnnnnnnnnnnnnnnnnnnnnnnnnnnnnnnnnnnnnnnnnnnnnnnnnnnnnnnnnnnnnnnnnnnnnnnnnnnnnnnnnnnnnnnnnnnnnnnnnnnnnnnnnnnnnnnnnnnnnnnnnnnnnnnnnnnnnnnnnnnnnnnnnnnnnnnnnnnnnnnnnnnnnnnnnnnnnnnnnnnnnnnnnnnnnnnnnnnnnnnnnnnnnnnnnnnnnnnnnnnnnnnnnnnnnnnnnnnnnnnnnnnnnnnnnnnnnnnnnnnnnnnnnnnnnnnnnnnnnnnnnnnnnnnnnnnnnnnnnnnnnnnnnnnnnnnnnnnnnnnnnnnnnnnnnnnnnnnnnnnnnnnnnnnnnnnnnnnnnnnnnnnnnnnnnnnnnnnnnnnnnnnnnnnnnnnnnnnnnnnnnnnnnnnnnnnnnnnnnnnnnnnnnnnnnnnnnnnnnnnnnnnnnnnnnnnnnnnnnnnnnnnnnnnnnnnnnnnnnnnnnnnnnnnnnnnnnnnnnnnnnnnnnnnnnnnnnnnnnnnnnnnnnnnnnnnnnnnnnnnnnnnnnnnnnnnnnnnnnnnnnnnnnnnnnnnnnnnnnnnnnnnnnnnnnnnnnnnnnnnnnnnnnnnnnnnnnnnnnnnnnnnnnnnnnnnnnnnnnnnnnnnnnnnnnnnnnnnnnnnnnnnnnnnnnnnnnnnnnnnnnnnnnnnnnnnnnnnnnnnnnnnnnnnnnnnnnnnnnnnnnnnnnnnnnnnnnnnnnnnnnnnnnnnnnnnnnnnnnnnnnnnnnnnnnnnnnnnnnnnnnnnnnnnnnnnnnnnnnnnnnnnnnnnnnnnnnnnnnnnnnnnnnnnnnnnnnnnnnnnnnnnnnnnnnnnnnnnnnnnnnnnnnnnnnnnnnnnnnnnnnnnnnnnnnnnnnnnnnnnnnnnnnnnnnnnnnnnnnnnnnnnnnnnnnnnnnnnnnnnnnnnnnnnnnnnnnnnnnnnnnnnnnnnnnnnnnnnnnnnnnnnnnnnnnnnnnnnnnnnnnnnnnnnnnnnnnnnnnnnnnnnnnnnnnnnnnnnnnnnnnnnnnnnnnnnnnnnnnnnnnnnnnnnnnnnnnnnnnnnnnnnnnnnnnnnnnnnnnnnnnnnnnnnnnnnnnnnnnnnnnnnnnnnnnnnnnnnnnnnnnnnnnnnnnnnnnnnnnnnnnnnnnnnnnnnnnnnnnnnnnnnnnnnnnnnnnnnnnnnnnnnnnnnnnnnnnnnnnnnnnnnnnnnnnnnnnnnnnnnnnnnnnnnnnnnnnnnnnnnnnnnnnnnnnnnnnnnnnnnnnnnnnnnnnnnnnnnnnnnnnnncaagccaccctgaaattgggtggctactggaacacatactgcgttgaatacatctacaaacctggtcaagccaccctgaaattgggtggctactggaacagcgtccatatgcgcaatgcgttcccagctggtcaagccaccctgaaattgggtggctactggaacaatatacgattgggacacaaaagacatttgggtcaagccaccctgaaattgggtggctactggaacgacggtggctatgtcagaccaactgtttaaggtcaagccaccctgaaattgggtggctactggaacacaaatagacaatgcccgtcggtacccgctaggtcaagccaccctgaaattgggtggctactggaacttggccgatgctttgcactgttgctgggctggtcaagccaccctgaaattgggtggctactggaacagtgcaggcaacatagaggatgcgagttgaggtcaagccaccctgaaattgggtggctactggaacagtgcgtgctgagttagctgatgaatcacgggtcaagccaccctgaaattgggtggctactggaactaaaacacattacgcttctcatcgtactccggtcaagccaccctgaaattgggtggctactggaactagtaactgccctcgatagcagcatgaaaaggtcaagccaccctgaaattgggtggctactggaaccgtggacatctatccgacctgctgcccagcggtcaagccaccctgaaattgggtggctactggaactagtcagtgagatatttataaatgacttttggtcaagccaccctgaaattgggtggctactgcattgtgtgcaacctccccccggttggtgtaacttacttcgttagtgacctcgcaaaaggtattcatgtttcgcagcccagagcagcagcactttagtgccatagtcagtaagcacattgctcaacccgatgccccgttattactagagggtggtacgggcttgggcaagacacgcgcatacctagcttcgattgggcaagcacgtgtggcgatcgttctgccgacccatcaacttatcgatcaaatgctcggatcagcagatcttcgggcggttggtctgacggatgtgaaagcctttcgtcctgctagattttatgaggcccgtgcggaatatgaaaaagctcgtgaacaggcaaaaaacgcgcaagtcatgctttgcacggcagcctcagtcattatcgatcagcgcttagacggggaatacaacggtatcaccacggaccgtgagtacattatcttcgacgaggcagaccagttgcccgacatggcagcgttgcagtcagatttcactatttctcagcatgacctgtccgaacttggtatcaagctaataacagccgatcaggcattggcagacatcgtggctaaaaagccgcgtacagttcaacccgagctccgtgcggcagccaagttaatgcttgaggtgctggcgcaacctgcgtggtaccacgcctgtggtcaagatgatcagggtggccttgttctgacacacaagctcccgggaaggttgttgaagaaaatcagtaataggccccgcacggcttttatcagtgcaacgctatcggtgtctggaaagtttcaaaatttcaaaatgtcgatgggtattgaaaacgaatcgatgctgtcgaccattattgagcctattagacacggttctcttacctttcataccgttgatgccgttgttgatacacccgagtggattgatgctgttgtcgatgccgtcaaccaatctcccaaaccaaccttggttgcgactacttctcatgacctgactcaagttttagctaagcgactgccagacgccacagcgcgtttaaatgatgagaccgctgccatggcttccgaacgggttgatcagggtggcgttcttatagcagcaggagcatgggcagggcttgacacggcggttcgctggcgttcgatcgtagtaccgagagtgccatacagcaagccagtggtcgttgagggtgatgtgacaacaagttaccttgatgcaagaaacactgccatacgacgcctgaggcaagtcatagggcgagggctgagaacgccagacgcagtgtgtgacatctatatcttagacggacgttatgatcgtttggaagcgtttgtgccggagagatttaagactgcttggagagatcgagataaccaatctttcttagaaggtgcgaggaaagaagttgttttgagtaaagccgagcgtgatccgatgctgcgccaaacagcaatacggaaatatggtttggtatgtatggcttgtggctatgttccaaaggtatcaacgcaaatagacgttcatcacaaggatccaattgcggagggtgagcgtaaaacaacggtagccgacgtacttgttttgtgtgcgaattgtcacagatttgcgcatagcgagtcacctccgcttgaacttgaagcaatacgtctttaagttaggttgtaaactaaaaatcaagggcagaagaccggctgcataagtgtccatccgtttattaaaaaataaaatcttatgatcaagttagccctacttacggtatccatagctgctagcgcgatgagtgtggctagttcgtatacacccgagcaggtgcgatctgcagtcaaacaggcagggggtgctgagcgctttattgtcgagattgcacagaacacggcaaagatgtcgggacagatgttagacgatcaaacgcagttaactggttctgttgcctttgaaagaacgatcgtctactacttgcgtatggtgaattacgataagagagatatccagaacatcagtgcttttcgacgaaaagtggctagcctgttggcaccatcagtatgcacagcacccctcgcgtcaattttgataaatgagtatcgtgctgagtacaagtacatggcatattctaagtcgcgtgaatacttatttgaatacggattcaaccgaaacacttgtgcgccaagctaccgttggtagcggatacattacctcgacaattacggaactcgaaagtctgaaagaaggcacacaaccgtggaggtgggctctattcaattttgttttttggtcgtcgcccccggagtttcacttcctctgcaaagagtccaattttgttccctaagttgttgacgccggttgaaaactgaccaggtggtcagtattcaaccggcgccaacagccaagagaccaaaaagtgcatgacacacgtgacctgaagacaaaagggctgagcgtgattagagagtgcaaacttaatcaaaacaagttaagctttataagcgatcaagcgtagctaaggacatacccatatgttgcaaactcgactagcaatgctactcgtctcctgtgtaatcacagccttaactggttgcgccaacatatccgttccaaccggaactagtgaggaaaggtacctaaatacaagctcggtttcgcctgtagccaccgtcatttactcggctaaatacgatccaattggtcaaacaatttatttggaagttagccaatacaaattgcagcagttgtacaccgtacccaaacacttcaacaccgcatcgcgcaccattgaattgagttaccccaatgcgaaaccgaaaaataattacaagtgggaatcccaaaaaattagttggttttccttatatcagatgcggcaggtttcattgacctcgcagggaggggattcgatttccgtacccgtagacctaaaaaatgagcgcgttgaactcgaattaagtggtgtgattgataagcttcaccctaacgtcctttacaaggtagcttgtgcttcttgcactccttgggtttataagaagttaatcccatctgaatatttgccagcccctcctagtaatagcaacgaagtcagcttttctatccttcctcctgaaaaggtctcaatactgaacaaattagaagatctacgaaaagctcaactggcggagaaaagagcgcgggagactgaagcccacgagttggaacagcgaatggctaaagagaaacgtgaattagagctgaaactggcccgtgaaaagcgtgagagggagcagcagttagccgcagaaaagcgtgagcgcgatgctcgaataagaacagcggatgcagaaagaaagcgcgaagccgccagagtcgtgcgagaaggcgatggaagcaccgatgacttagtctgcaaaaaatacgggtttaggccaaatacgcaagcttatgccaattgcagactacaaatcgacgttgcaaaacgggagatgcaacagcaacaggctcagtatatggcccaacagcaacagttcgaagctgctcaagaaactgcaagagaaagacgacagaacgaattcttgttgggaatgggattgcgcatgatgggcggtcagagtcctgctggggcttatgttgatcagtcagtgggagcacctatgtatcagccacccccaccaagcacacgtacttactcatttccaaatggccgaatgatgacctgcacttccaatgggagttttacgaattgttattgaaggttgttttcacctgtgctgtaagtgccaattgctttctaaaagcgtctaaaaaattagggagtacctgacggataactacgataataataaactgcaacatcataattaatttagcgaatccaaaatttaaccggttgagttcaaaagtgaagtgcaacactaaccttgaggtactgtgttgcgatgaaaaccaaatacaagcaacttaattgtgaagagcgaattttgattcagctgagccttgagaaaggaagcaccatacgggccattgcgcttagcttggaccgaagcgcgagctccataagtcgagagctggctcgtaaccagtggtgtagtcctcaggcacaggcttttaggcctggcaggtccgctttggccggtggttaccgagctgttcttgctcaacaacgggctcgcgtggctcgctcgagtggtcgcaaccccccgctgttggcgtctgacggtttcctgtgggctcaagtccagaagttgctcaaacagaggtactctccggggcagatcgcgggcatac

SEQ ID NO: 117 - DNA, 14174 bp, Artificial Sequence
  Synthetic Oligonucleotide
  misc_feature (1)..(5051): n is a, c, g, or t
nnnnnnnnnnnnnnnnnnnnnnnnnnnnnnnnnnnnnnnnnnnnnnnnnnnnnnnnnnnnnnnnnnnnnnnnnnnnnnnnnnnnnnnnnnnnnnnnnnnnnnnnnnnnnnnnnnnnnnnnnnnnnnnnnnnnnnnnnnnnnnnnnnnnnnnnnnnnnnnnnnnnnnnnnnnnnnnnnnnnnnnnnnnnnnnnnnnnnnnnnnnnnnnnnnnnnnnnnnnnnnnnnnnnnnnnnnnnnnnnnnnnnnnnnnnnnnnnnnnnnnnnnnnnnnnnnnnnnnnnnnnnnnnnnnnnnnnnnnnnnnnnnnnnnnnnnnnnnnnnnnnnnnnnnnnnnnnnnnnnnnnnnnnnnnnnnnnnnnnnnnnnnnnnnnnnnnnnnnnnnnnnnnnnnnnnnnnnnnnnnnnnnnnnnnnnnnnnnnnnnnnnnnnnnnnnnnnnnnnnnnnnnnnnnnnnnnnnnnnnnnnnnnnnnnnnnnnnnnnnnnnnnnnnnnnnnnnnnnnnnnnnnnnnnnnnnnnnnnnnnnnnnnnnnnnnnnnnnnnnnnnnnnnnnnnnnnnnnnnnnnnnnnnnnnnnnnnnnnnnnnnnnnnnnnnnnnnnnnnnnnnnnnnnnnnnnnnnnnnnnnnnnnnnnnnnnnnnnnnnnnnnnnnnnnnnnnnnnnnnnnnnnnnnnnnnnnnnnnnnnnnnnnnnnnnnnnnnnnnnnnnnnnnnnnnnnnnnnnnnnnnnnnnnnnnnnnnnnnnnnnnnnnnnnnnnnnnnnnnnnnnnnnnnnnnnnnnnnnnnnnnnnnnnnnnnnnnnnnnnnnnnnnnnnnnnnnnnnnnnnnnnnnnnnnnnnnnnnnnnnnnnnnnnnnnnnnnnnnnnnnnnnnnnnnnnnnnnnnnnnnnnnnnnnnnnnnnnnnnnnnnnnnnnnnnnnnnnnnnnnnnnnnnnnnnnnnnnnnnnnnnnnnnnnnnnnnnnnnnnnnnnnnnnnnnnnnnnnnnnnnnnnnnnnnnnnnnnnnnnnnnnnnnnnnnnnnnnnnnnnnnnnnnnnnnnnnnnnnnnnnnnnnnnnnnnnnnnnnnnnnnnnnnnnnnnnnnnnnnnnnnnnnnnnnnnnnnnnnnnnnnnnnnnnnnnnnnnnnnnnnnnnnnnnnnnnnnnnnnnnnnnnnnnnnnnnnnnnnnnnnnnnnnnnnnnnnnnnnnnnnnnnnnnnnnnnnnnnnnnnnnnnnnnnnnnnnnnnnnnnnnnnnnnnnnnnnnnnnnnnnnnnnnnnnnnnnnnnnnnnnnnnnnnnnnnnnnnnnnnnnnnnnnnnnnnnnnnnnnnnnnnnnnnnnnnnnnnnnnnnnnnnnnnnnnnnnnnnnnnnnnnnnnnnnnnnnnnnnnnnnnnnnnnnnnnnnnnnnnnnnnnnnnnnnnnnnnnnnnnnnnnnnnnnnnnnnnnnnnnnnnnnnnnnnnnnnnnnnnnnnnnnnnnnnnnnnnnnnnnnnnnnnnnnnnnnnnnnnnnnnnnnnnnnnnnnnnnnnnnnnnnnnnnnnnnnnnnnnnnnnnnnnnnnnnnnnnnnnnnnnnnnnnnnnnnnnnnnnnnnnnnnnnnnnnnnnnnnnnnnnnnnnnnnnnnnnnnnnnnnnnnnnnnnnnnnnnnnnnnnnnnnnnnnnnnnnnnnnnnnnnnnnnnnnnnnnnnnnnnnnnnnnnnnnnnnnnnnnnnnnnnnnnnnnnnnnnnnnnnnnnnnnnnnnnnnnnnnnnnnnnnnnnnnnnnnnnnnnnnnnnnnnnnnnnnnnnnnnnnnnnnnnnnnnnnnnnnnnnnnnnnnnnnnnnnnnnnnnnnnnnnnnnnnnnnnnnnnnnnnnnnnnnnnnnnnnnnnnnnnnnnnnnnnnnnnnnnnnnnnnnnnnnnnnnnnnnnnnnnnnnnnnnnnnnnnnnnnnnnnnnnnnnnnnnnnnnnnnnnnnnnnnnnnnnnnnnnnnnnnnnnnnnnnnnnnnnnnnnnnnnnnnnnnnnnnnnnnnnnnnnnnnnnnnnnnnnnnnnnnnnnnnnnnnnnnnnnnnnnnnnnnnnnnnnnnnnnnnnnnnnnnnnnnnnnnnnnnnnnnnnnnnnnnnnnnnnnnnnnnnnnnnnnnnnnnnnnnnnnnnnnnnnnnnnnnnnnnnnnnnnnnnnnnnnnnnnnnnnnnnnnnnnnnnnnnnnnnnnnnnnnnnnnnnnnnnnnnnnnnnnnnnnnnnnnnnnnnnnnnnnnnnnnnnnnnnnnnnnnnnnnnnnnnnnnnnnnnnnnnnnnnnnnnnnnnnnnnnnnnnnnnnnnnnnnnnnnnnnnnnnnnnnnnnnnnnnnnnnnnnnnnnnnnnnnnnnnnnnnnnnnnnnnnnnnnnnnnnnnnnnnnnnnnnnnnnnnnnnnnnnnnnnnnnnnnnnnnnnnnnnnnnnnnnnnnnnnnnnnnnnnnnnnnnnnnnnnnnnnnnnnnnnnnnnnnnnnnnnnnnnnnnnnnnnnnnnnnnnnnnnnnnnnnnnnnnnnnnnnnnnnnnnnnnnnnnnnnnnnnnnnnnnnnnnnnnnnnnnnnnnnnnnnnnnnnnnnnnnnnnnnnnnnnnnnnnnnnnnnnnnnnnnnnnnnnnnnnnnnnnnnnnnnnnnnnnnnnnnnnnnnnnnnnnnnnnnnnnnnnnnnnnnnnnnnnnnnnnnnnnnnnnnnnnnnnnnnnnnnnnnnnnnnnnnnnnnnnnnnnnnnnnnnnnnnnnnnnnnnnnnnnnnnnnnnnnnnnnnnnnnnnnnnnnnnnnnnnnnnnnnnnnnnnnnnnnnnnnnnnnnnnnnnnnnnnnnnnnnnnnnnnnnnnnnnnnnnnnnnnnnnnnnnnnnnnnnnnnnnnnnnnnnnnnnnnnnnnnnnnnnnnnnnnnnnnnnnnnnnnnnnnnnnnnnnnnnnnnnnnnnnnnnnnnnnnnnnnnnnnnnnnnnnnnnnnnnnnnnnnnnnnnnnnnnnnnnnnnnnnnnnnnnnnnnnnnnnnnnnnnnnnnnnnnnnnnnnnnnnnnnnnnnnnnnnnnnnnnnnnnnnnnnnnnnnnnnnnnnnnnnnnnnnnnnnnnnnnnnnnnnnnnnnnnnnnnnnnnnnnnnnnnnnnnnnnnnnnnnnnnnnnnnnnnnnnnnnnnnnnnnnnnnnnnnnnnnnnnnnnnnnnnnnnnnnnnnnnnnnnnnnnnnnnnnnnnnnnnnnnnnnnnnnnnnnnnnnnnnnnnnnnnnnnnnnnnnnnnnnnnnnnnnnnnnnnnnnnnnnnnnnnnnnnnnnnnnnnnnnnnnnnnnnnnnnnnnnnnnnnnnnnnnnnnnnnnnnnnnnnnnnnnnnnnnnnnnnnnnnnnnnnnnnnnnnnnnnnnnnnnnnnnnnnnnnnnnnnnnnnnnnnnnnnnnnnnnnnnnnnnnnnnnnnnnnnnnnnnnnnnnnnnnnnnnnnnnnnnnnnnnnnnnnnnnnnnnnnnnnnnnnnnnnnnnnnnnnnnnnnnnnnnnnnnnnnnnnnnnnnnnnnnnnnnnnnnnnnnnnnnnnnnnnnnnnnnnnnnnnnnnnnnnnnnnnnnnnnnnnnnnnnnnnnnnnnnnnnnnnnnnnnnnnnnnnnnnnnnnnnnnnnnnnnnnnnnnnnnnnnnnnnnnnnnnnnnnnnnnnnnnnnnnnnnnnnnnnnnnnnnnnnnnnnnnnnnnnnnnnnnnnnnnnnnnnnnnnnnnnnnnnnnnnnnnnnnnnnnnnnnnnnnnnnnnnnnnnnnnnnnnnnnnnnnnnnnnnnnnnnnnnnnnnnnnnnnnnnnnnnnnnnnnnnnnnnnnnnnnnnnnnnnnnnnnnnnnnnnnnnnnnnnnnnnnnnnnnnnnnnnnnnnnnnnnnnnnnnnnnnnnnnnnnnnnnnnnnnnnnnnnnnnnnnnnnnnnnnnnnnnnnnnnnnnnnnnnnnnnnnnnnnnnnnnnnnnnnnnnnnnnnnnnnnnnnnnnnnnnnnnnnnnnnnnnnnnnnnnnnnnnnnnnnnnnnnnnnnnnnnnnnnnnnnnnnnnnnnnnnnnnnnnnnnnnnnnnnnnnnnnnnnnnnnnnnnnnnnnnnnnnnnnnnnnnnnnnnnnnnnnnnnnnnnnnnnnnnnnnnnnnnnnnnnnnnnnnnnnnnnnnnnnnnnnnnnnnnnnnnnnnnnnnnnnnnnnnnnnnnnnnnnnnnnnnnnnnnnnnnnnnnnnnnnnnnnnnnnnnnnnnnnnnnnnnnnnnnnnnnnnnnnnnnnnnnnnnnnnnnnnnnnnnnnnnnnnnnnnnnnnnnnnnnnnnnnnnnnnnnnnnnnnnnnnnnnnnnnnnnnnnnnnnnnnnnnnnnnnnnnnnnnnnnnnnnnnnnnnnnnnnnnnnnnnnnnnnnnnnnnnnnnnnnnnnnnnnnnnnnnnnnnnnnnnnnnnnnnnnnnnnnnnnnnnnnnnnnnnnnnnnnnnnnnnnnnnnnnnnnnnnnnnnnnnnnnnnnnnnnnnnnnnnnnnnnnnnnnnnnnnnnnnnnnnnnnnnnnnnnnnnnnnnnnnnnnnnnnnnnnnnnnnnnnnnnnnnnnnnnnnnnnnnnnnnnnnnnnnnnnnnnnnnnnnnnnnnnnnnnnnnnnnnnnnnnnnnnnnnnnnnnnnnnnnnnnnnnnnnnnnnnnnnnnnnnnnnnnnnnnnnnnnnnnnnnnnnnnnnnnnnnnnnnnnnnnnnnnnnnnnnnnnnnnnnnnnnnnnnnnnnnnnnnnnnnnnnnnnnnnnnnnnnnnnnnnnnnnnnnnnnnnnnnnnnnnnnnnnnnnnnnnnnnnnnnnnnnnnnnnnnnnnnnnnnnnnnnnnnnnnnnnnnnnnnnnnnnnnnnnnnnnnnnnnnnnnnnnnnnnnnnnnnnnnnnnnnnnnnnnnnnnnnnnnnnnnnnnnnnnnnnnnnnnnnnnnnnnnnnnnnnnnnnnnnnnnnnnnnnnnnnnnnnnnnnnnnnnnnnnnnnnnnnnnnnnnnnnnnnnnnnnnnnnnnnnnnnnnnnnnnnnnnnnnnnnnnnnnnnnnnnnnnnnnnnnnnnnnnnnnnnnnnnnnnnnnnnnnnnnnnnnnnnnnnnnnnnnnnnnnnnnnnnnnnnnnnnnnnnnnnnnnnnnnngagcgcgaccggcacttagggcaacgatgtagtccgtggagcacactgccacttggtatttgtggttgaacccaatgcccgccgcaggaacagtcccccagaaaagaaagcaatcgctgccactcaccatcgcgccagctgtcgccttgtcctacccaacgctgttgatcgtgccgttcgaagtaggcccttaactgatcctcagagaggtctggtccttgatttgaccaagtagaagtacccgaaaccaaagcaccaaccgcctgacgcaatttttttattggtgacactacgggtttggggcggttgcggggggcataccgaggaagcgactttgtgtcgccacagccatcgcagcacacgtgaacaaagctaaatccaccgccttgcaccaccttgaactcgtgatcacagtcattacagtggcaatcaaatgctgcacccatgtcttactccctcaatttagcttcagcgtcaaaaagaattagtcgttgcgccgatgctgcaggtcgtactcgatacgcgatattgataaaccctaaacccagcaacaaggcaacctacacccccttgatccctaccccttcacaaacggattccatgatgccttcgaccacacttcccacaggtggctccatccacggaatttttagatctatttctttaagcatttttcccttcgcccaaagctctgtatagagactaagcttgaacatgctggactgacgtttcacgcaatcaaagaaggtcaatgccaatgctgaaagatagggcacaccttcctcagaaaattgctcaacctcgtaattgagtaactcatgcacaacagcataatcatcgacccgcttcacgctattgatgtcaatataggctgagagcttctttgaaccacccgtgaaataccaagatgcttgagctggctctgattgcgccacaggcattattgttaaaagggctagcgctgcggctgcggttcggctcaatgttattttcaatgcgacgcctttcaagtcacggctaaagtcagtcatcagtctcgttttcaatgcatgcctctgagggggagggctgtaattccgcatcgctctaagtaagtaaacgtttcatcatagaaacttggtggtcgagttgggtcggtcacagcaccgcacgggataaaaattaccataccctgtctggcacgtgtcagtaggacgcgataggcgttttctaaagatagatacttttctatttccttcgctcgtcacaccatactttttgcaacgcctccagcgtctgtctcaccccatgacacactaaggatttatattcgttattaagataacattaattcgtgatccgatcaggagaggtgaaagtgcaaggactacaaatcactgcgactctcaagtcgcccgtcatcattggatcgagcgcatacatgaccttggacggcatccttggagcggttttgtttgaccagatgcaggacatagagggcgcgcacaattcaataccaattaaacagactgaaggtcttttccacgcaagtgcggtgatcatcgaggcgatagagaaaagtcggacagctttcattgcaggtttgtatcctacgcatagcctcgacccagaccttattttgaaaaataaaaaaggcggtctgcatcgtgcctttgattcatcggtcaccaatgtaatgaatacataccgccagatcaccgcacccatagccacttggtatgtcgttggtgatgccgaacggattctttctttactgaacacagttcactttattggtaagcgtagggccagtggttttggtcaggttgcttcatggaatattgagccaaccgacacagatggtctgacttatgaggatgagccacttagaccaattccagtagatctgtttcaaggcgacaaaaccttacctattgtggatgccgcgtggcgtcctgcgtattgggatctgcgcaatagagcagcctgttacgcccccgcttcaatcaactgagtggacagaatgaatacgtttgatttctttaaccaaaattttgggcgtttcttggctgtgcagaccgataatgcaatggctgacgcacaggcagcactatcaaaaaaccacgaattgctaacaggtaaaacaagtcgcttatctagcggttgggcaattgttaggcccggtcgttcaagccttcagcttggcgtgaagtgcacaggcatcgaaatagttggcaacaccgtcagccgctttcaggcgtttattgcagatcttaaaaattggaataacgagccgaggatttatctcacgtttgataaacggccaataccgattgcaaatttatttgtcacctatgacctaagagcggtgaggatctgctctgcaaaaggagtggagacctttgactttactaaagatccgaccgatgagtcaggcatggtgcataaagttttgttcaaacaaatgaaagaggttgcctgacatggaatacgtgatcgaaaaaccatttgccgttaataaatacgcatgtcaccgaatgctttctgggttgactgggggtaagccggccagttgggtcgacgagggggagcaacttagagtgcgaacagcagacccattacctgctcaggtacagtctgatcgtaaattcaccggcggtcagatcgtggggttccagcttaaagccagttgtgggaaaaaagttaaaggaaaacaccgctactttcacacagccgattggcgaagtcgacatgcgtggttaaagcgaaaaggagagttgcatggcttcgaagtgttgactgtgcattgccatgctgagcaagaacgaattgttgctggcaagcgaaccttcacagtcgacgcaacttcttttacaggcattttgaaggtcatagatatcgtcaaattccaggcagtgctaataagtggcattggttcaacggctaaagcttttggttttggtttcattcagttttgaatacaggggtcacgtatatgactaagcagacgatcgtcgttgatggagtaataacaaccgttgctcctctctcaatagctatgccagtaccagagggtggacgcgagaatcagtacaagcaatttccaataatgactagaggtcttgatgatgagggtaataagcttcagaccgggtatcttccagctacaactttgcgggggtttatgcgaagggcaatcgtcaccgacgcaatgattaaagccgctgaggccgggaggcactacacattgcaaaaagcctatgccgagttgattggtcaggatgctgctagtgaggcggccagtgaagacattgacctgattaagcagcagcaacagcgtgatcagaatcctgttctggatctgtttggcgtaggcatgagccttaaatctaggctgctggtgtctcacttcgtgccagtgactaatgttttgcctgaggcgttttcaggggtacgcaaagaccttgaggatactcctgaggcatttgaggccttgtctttagaaactcagaacactcatgcaaaccgcagtcaggctaatagccaacgggctgaagctgagtcactggttaaatcattggtgcgccaaattcgtgccgctgagaaaaagggggctgggaccgcagaactaaaggctcagttggaggcggcacaagtattggcagcaaagttcgctgatcagatgggcgacatgcaaaactcaagccgtactctggtcggacactttgcgttacccgccggtattgacctgcacggtaagttgattgtcgagagagcgagggatcgtgaccttgagatgctactactcgctttggatgccctgtcgagacgccccttgttaggcgcgcaggtggcccgtggttgcggggagatcgccgggaagtttacgattaaggttgatggtgtcgtgaagaaaatcgttgaaattggtaactgggaagctgcaaaatcagtggatttttaatgaaagcatggcaaaaagttgttatctgcgctggacttactgaataatgggtcaagccaccctgaaattgggtggctactggaacgttgacgaacgccacacgattagacagtgaggtcaagccaccctgaaattgggtggctactggaacacatactgcgttgaatacatctacaaacctggtcaagccaccctgaaattgggtggctactggaacagcgtccatatgcgcaatgcgttcccagctggtcaagccaccctgaaattgggtggctactggaacaatatacgattgggacacaaaagacatttgggtcaagccaccctgaaattgggtggctactggaacgacggtggctatgtcagaccaactgtttaaggtcaagccaccctgaaattgggtggctactggaacacaaatagacaatgcccgtcggtacccgctaggtcaagccaccctgaaattgggtggctactggaacttggccgatgctttgcactgttgctgggctggtcaagccaccctgaaattgggtggctactggaacagtgcaggcaacatagaggatgcgagttgaggtcaagccaccctgaaattgggtggctactggaacagtgcgtgctgagttagctgatgaatcacgggtcaagccaccctgaaattgggtggctactggaactaaaacacattacgcttctcatcgtactccggtcaagccaccctgaaattgggtggctactggaactagtaactgccctcgatagcagcatgaaaaggtcaagccaccctgaaattgggtggctactggaaccgtggacatctatccgacctgctgcccagcggtcaagccaccctgaaattgggtggctactggaactagtcagtgagatatttataaatgacttttggtcaagccaccctgaaattgggtggctactgcattgtgtgcaacctccccccggttggtgtaacttacttcgttagtgacctcgcaaaaggtattcatgtttcgcagcccagagcagcagcactttagtgccatagtcagtaagcacattgctcaacccgatgccccgttattactagagggtggtacgggcttgggcaagacacgcgcatacctagcttcgattgggcaagcacgtgtggcgatcgttctgccgacccatcaacttatcgatcaaatgctcggatcagcagatcttcgggcggttggtctgacggatgtgaaagcctttcgtcctgctagattttatgaggcccgtgcggaatatgaaaaagctcgtgaacaggcaaaaaacgcgcaagtcatgctttgcacggcagcctcagtcattatcgatcagcgcttagacggggaatacaacggtatcaccacggaccgtgagtacattatcttcgacgaggcagaccagttgcccgacatggcagcgttgcagtcagatttcactatttctcagcatgacctgtccgaacttggtatcaagctaataacagccgatcaggcattggcagacatcgtggctaaaaagccgcgtacagttcaacccgagctccgtgcggcagccaagttaatgcttgaggtgctggcgcaacctgcgtggtaccacgcctgtggtcaagatgatcagggtggccttgttctgacacacaagctcccgggaaggttgttgaagaaaatcagtaataggccccgcacggcttttatcagtgcaacgctatcggtgtctggaaagtttcaaaatttcaaaatgtcgatgggtattgaaaacgaatcgatgctgtcgaccattattgagcctattagacacggttctcttacctttcataccgttgatgccgttgttgatacacccgagtggattgatgctgttgtcgatgccgtcaaccaatctcccaaaccaaccttggttgcgactacttctcatgacctgactcaagttttagctaagcgactgccagacgccacagcgcgtttaaatgatgagaccgctgccatggcttccgaacgggttgatcagggtggcgttcttatagcagcaggagcatgggcagggcttgacacggcggttcgctggcgttcgatcgtagtaccgagagtgccatacagcaagccagtggtcgttgagggtgatgtgacaacaagttaccttgatgcaagaaacactgccatacgacgcctgaggcaagtcatagggcgagggctgagaacgccagacgcagtgtgtgacatctatatcttagacggacgttatgatcgtttggaagcgtttgtgccggagagatttaagactgcttggagagatcgagataaccaatctttcttagaaggtgcgaggaaagaagttgttttgagtaaagccgagcgtgatccgatgctgcgccaaacagcaatacggaaatatggtttggtatgtatggcttgtggctatgttccaaaggtatcaacgcaaatagacgttcatcacaaggatccaattgcggagggtgagcgtaaaacaacggtagccgacgtacttgttttgtgtgcgaattgtcacagatttgcgcatagcgagtcacctccgcttgaacttgaagcaatacgtctttaagttaggttgtaaactaaaaatcaagggcagaagaccggctgcataagtgtccatccgtttattaaaaaataaaatcttatgatcaagttagccctacttacggtatccatagctgctagcgcgatgagtgtggctagttcgtatacacccgagcaggtgcgatctgcagtcaaacaggcagggggtgctgagcgctttattgtcgagattgcacagaacacggcaaagatgtcgggacagatgttagacgatcaaacgcagttaactggttctgttgcctttgaaagaacgatcgtctactacttgcgtatggtgaattacgataagagagatatccagaacatcagtgcttttcgacgaaaagtggctagcctgttggcaccatcagtatgcacagcacccctcgcgtcaattttgataaatgagtatcgtgctgagtacaagtacatggcatattctaagtcgcgtgaatacttatttgaatacggattcaaccgaaacacttgtgcgccaagctaccgttggtagcggatacattacctcgacaattacggaactcgaaagtctgaaagaaggcacacaaccgtggaggtgggctctattcaattttgttttttggtcgtcgcccccggagtttcacttcctctgcaaagagtccaattttgttccctaagttgttgacgccggttgaaaactgaccaggtggtcagtattcaaccggcgccaacagccaagagaccaaaaagtgcatgacacacgtgacctgaagacaaaagggctgagcgtgattagagagtgcaaacttaatcaaaacaagttaagctttataagcgatcaagcgtagctaaggacatacccatatgttgcaaactcgactagcaatgctactcgtctcctgtgtaatcacagccttaactggttgcgccaacatatccgttccaaccggaactagtgaggaaaggtacctaaatacaagctcggtttcgcctgtagccaccgtcatttactcggctaaatacgatccaattggtcaaacaatttatttggaagttagccaatacaaattgcagcagttgtacaccgtacccaaacacttcaacaccgcatcgcgcaccattgaattgagttaccccaatgcgaaaccgaaaaataattacaagtgggaatcccaaaaaattagttggttttccttatatcagatgcggcaggtttcattgacctcgcagggaggggattcgatttccgtacccgtagacctaaaaaatgagcgcgttgaactcgaattaagtggtgtgattgataagcttcaccctaacgtcctttacaaggtagcttgtgcttcttgcactccttgggtttataagaagttaatcccatctgaatatttgccagcccctcctagtaatagcaacgaagtcagcttttctatccttcctcctgaaaaggtctcaatactgaacaaattagaagatctacgaaaagctcaactggcggagaaaagagcgcgggagactgaagcccacgagttggaacagcgaatggctaaagagaaacgtgaattagagctgaaactggcccgtgaaaagcgtgagagggagcagcagttagccgcagaaaagcgtgagcgcgatgctcgaataagaacagcggatgcagaaagaaagcgcgaagccgccagagtcgtgcgagaaggcgatggaagcaccgatgacttagtctgcaaaaaatacgggtttaggccaaatacgcaagcttatgccaattgcagactacaaatcgacgttgcaaaacgggagatgcaacagcaacaggctcagtatatggcccaacagcaacagttcgaagctgctcaagaaactgcaagagaaagacgacagaacgaattcttgttgggaatgggattgcgcatgatgggcggtcagagtcctgctggggcttatgttgatcagtcagtgggagcacctatgtatcagccacccccaccaagcacacgtacttactcatttccaaatggccgaatgatgacctgcacttccaatgggagttttacgaattgttattgaaggttgttttcacctgtgctgtaagtgccaattgctttctaaaagcgtctaaaaaattagggagtacctgacggataactacgataataataaactgcaacatcataattaatttagcgaatccaaaatttaaccggttgagttcaaaagtgaagtgcaacactaaccttgaggtactgtgttgcgatgaaaaccaaatacaagcaacttaattgtgaagagcgaattttgattcagctgagccttgagaaaggaagcaccatacgggccattgcgcttagcttggaccgaagcgcgagctccataagtcgagagctggctcgtaaccagtggtgtagtcctcaggcacaggcttttaggcctggcaggtccgctttggccggtggttaccgagctgttcttgctcaacaacgggctcgcgtggctcgctcgagtggtcgcaaccccccgctgttggcgtctgacggtttcctgtgggctcaagtccagaagttgctcaaacagaggtactctccggggcag

SEQ ID NO: 118 - DNA, 14148 bp, Artificial Sequence
  Synthetic Oligonucleotide
  misc_feature (1)..(9945): n is a, c, g, or t
nnnnnnnnnnnnnnnnnnnnnnnnnnnnnnnnnnnnnnnnnnnnnnnnnnnnnnnnnnnnnnnnnnnnnnnnnnnnnnnnnnnnnnnnnnnnnnnnnnnnnnnnnnnnnnnnnnnnnnnnnnnnnnnnnnnnnnnnnnnnnnnnnnnnnnnnnnnnnnnnnnnnnnnnnnnnnnnnnnnnnnnnnnnnnnnnnnnnnnnnnnnnnnnnnnnnnnnnnnnnnnnnnnnnnnnnnnnnnnnnnnnnnnnnnnnnnnnnnnnnnnnnnnnnnnnnnnnnnnnnnnnnnnnnnnnnnnnnnnnnnnnnnnnnnnnnnnnnnnnnnnnnnnnnnnnnnnnnnnnnnnnnnnnnnnnnnnnnnnnnnnnnnnnnnnnnnnnnnnnnnnnnnnnnnnnnnnnnnnnnnnnnnnnnnnnnnnnnnnnnnnnnnnnnnnnnnnnnnnnnnnnnnnnnnnnnnnnnnnnnnnnnnnnnnnnnnnnnnnnnnnnnnnnnnnnnnnnnnnnnnnnnnnnnnnnnnnnnnnnnnnnnnnnnnnnnnnnnnnnnnnnnnnnnnnnnnnnnnnnnnnnnnnnnnnnnnnnnnnnnnnnnnnnnnnnnnnnnnnnnnnnnnnnnnnnnnnnnnnnnnnnnnnnnnnnnnnnnnnnnnnnnnnnnnnnnnnnnnnnnnnnnnnnnnnnnnnnnnnnnnnnnnnnnnnnnnnnnnnnnnnnnnnnnnnnnnnnnnnnnnnnnnnnnnnnnnnnnnnnnnnnnnnnnnnnnnnnnnnnnnnnnnnnnnnnnnnnnnnnnnnnnnnnnnnnnnnnnnnnnnnnnnnnnnnnnnnnnnnnnnnnnnnnnnnnnnnnnnnnnnnnnnnnnnnnnnnnnnnnnnnnnnnnnnnnnnnnnnnnnnnnnnnnnnnnnnnnnnnnnnnnnnnnnnnnnnnnnnnnnnnnnnnnnnnnnnnnnnnnnnnnnnnnnnnnnnnnnnnnnnnnnnnnnnnnnnnnnnnnnnnnnnnnnnnnnnnnnnnnnnnnnnnnnnnnnnnnnnnnnnnnnnnnnnnnnnnnnnnnnnnnnnnnnnnnnnnnnnnnnnnnnnnnnnnnnnnnnnnnnnnnnnnnnnnnnnnnnnnnnnnnnnnnnnnnnnnnnnnnnnnnnnnnnnnnnnnnnnnnnnnnnnnnnnnnnnnnnnnnnnnnnnnnnnnnnnnnnnnnnnnnnnnnnnnnnnnnnnnnnnnnnnnnnnnnnnnnnnnnnnnnnnnnnnnnnnnnnnnnnnnnnnnnnnnnnnnnnnnnnnnnnnnnnnnnnnnnnnnnnnnnnnnnnnnnnnnnnnnnnnnnnnnnnnnnnnnnnnnnnnnnnnnnnnnnnnnnnnnnnnnnnnnnnnnnnnnnnnnnnnnnnnnnnnnnnnnnnnnnnnnnnnnnnnnnnnnnnnnnnnnnnnnnnnnnnnnnnnnnnnnnnnnnnnnnnnnnnnnnnnnnnnnnnnnnnnnnnnnnnnnnnnnnnnnnnnnnnnnnnnnnnnnnnnnnnnnnnnnnnnnnnnnnnnnnnnnnnnnnnnnnnnnnnnnnnnnnnnnnnnnnnnnnnnnnnnnnnnnnnnnnnnnnnnnnnnnnnnnnnnnnnnnnnnnnnnnnnnnnnnnnnnnnnnnnnnnnnnnnnnnnnnnnnnnnnnnnnnnnnnnnnnnnnnnnnnnnnnnnnnnnnnnnnnnnnnnnnnnnnnnnnnnnnnnnnnnnnnnnnnnnnnnnnnnnnnnnnnnnnnnnnnnnnnnnnnnnnnnnnnnnnnnnnnnnnnnnnnnnnnnnnnnnnnnnnnnnnnnnnnnnnnnnnnnnnnnnnnnnnnnnnnnnnnnnnnnnnnnnnnnnnnnnnnnnnnnnnnnnnnnnnnnnnnnnnnnnnnnnnnnnnnnnnnnnnnnnnnnnnnnnnnnnnnnnnnnnnnnnnnnnnnnnnnnnnnnnnnnnnnnnnnnnnnnnnnnnnnnnnnnnnnnnnnnnnnnnnnnnnnnnnnnnnnnnnnnnnnnnnnnnnnnnnnnnnnnnnnnnnnnnnnnnnnnnnnnnnnnnnnnnnnnnnnnnnnnnnnnnnnnnnnnnnnnnnnnnnnnnnnnnnnnnnnnnnnnnnnnnnnnnnnnnnnnnnnnnnnnnnnnnnnnnnnnnnnnnnnnnnnnnnnnnnnnnnnnnnnnnnnnnnnnnnnnnnnnnnnnnnnnnnnnnnnnnnnnnnnnnnnnnnnnnnnnnnnnnnnnnnnnnnnnnnnnnnnnnnnnnnnnnnnnnnnnnnnnnnnnnnnnnnnnnnnnnnnnnnnnnnnnnnnnnnnnnnnnnnnnnnnnnnnnnnnnnnnnnnnnnnnnnnnnnnnnnnnnnnnnnnnnnnnnnnnnnnnnnnnnnnnnnnnnnnnnnnnnnnnnnnnnnnnnnnnnnnnnnnnnnnnnnnnnnnnnnnnnnnnnnnnnnnnnnnnnnnnnnnnnnnnnnnnnnnnnnnnnnnnnnnnnnnnnnnnnnnnnnnnnnnnnnnnnnnnnnnnnnnnnnnnnnnnnnnnnnnnnnnnnnnnnnnnnnnnnnnnnnnnnnnnnnnnnnnnnnnnnnnnnnnnnnnnnnnnnnnnnnnnnnnnnnnnnnnnnnnnnnnnnnnnnnnnnnnnnnnnnnnnnnnnnnnnnnnnnnnnnnnnnnnnnnnnnnnnnnnnnnnnnnnnnnnnnnnnnnnnnnnnnnnnnnnnnnnnnnnnnnnnnnnnnnnnnnnnnnnnnnnnnnnnnnnnnnnnnnnnnnnnnnnnnnnnnnnnnnnnnnnnnnnnnnnnnnnnnnnnnnnnnnnnnnnnnnnnnnnnnnnnnnnnnnnnnnnnnnnnnnnnnnnnnnnnnnnnnnnnnnnnnnnnnnnnnnnnnnnnnnnnnnnnnnnnnnnnnnnnnnnnnnnnnnnnnnnnnnnnnnnnnnnnnnnnnnnnnnnnnnnnnnnnnnnnnnnnnnnnnnnnnnnnnnnnnnnnnnnnnnnnnnnnnnnnnnnnnnnnnnnnnnnnnnnnnnnnnnnnnnnnnnnnnnnnnnnnnnnnnnnnnnnnnnnnnnnnnnnnnnnnnnnnnnnnnnnnnnnnnnnnnnnnnnnnnnnnnnnnnnnnnnnnnnnnnnnnnnnnnnnnnnnnnnnnnnnnnnnnnnnnnnnnnnnnnnnnnnnnnnnnnnnnnnnnnnnnnnnnnnnnnnnnnnnnnnnnnnnnnnnnnnnnnnnnnnnnnnnnnnnnnnnnnnnnnnnnnnnnnnnnnnnnnnnnnnnnnnnnnnnnnnnnnnnnnnnnnnnnnnnnnnnnnnnnnnnnnnnnnnnnnnnnnnnnnnnnnnnnnnnnnnnnnnnnnnnnnnnnnnnnnnnnnnnnnnnnnnnnnnnnnnnnnnnnnnnnnnnnnnnnnnnnnnnnnnnnnnnnnnnnnnnnnnnnnnnnnnnnnnnnnnnnnnnnnnnnnnnnnnnnnnnnnnnnnnnnnnnnnnnnnnnnnnnnnnnnnnnnnnnnnnnnnnnnnnnnnnnnnnnnnnnnnnnnnnnnnnnnnnnnnnnnnnnnnnnnnnnnnnnnnnnnnnnnnnnnnnnnnnnnnnnnnnnnnnnnnnnnnnnnnnnnnnnnnnnnnnnnnnnnnnnnnnnnnnnnnnnnnnnnnnnnnnnnnnnnnnnnnnnnnnnnnnnnnnnnnnnnnnnnnnnnnnnnnnnnnnnnnnnnnnnnnnnnnnnnnnnnnnnnnnnnnnnnnnnnnnnnnnnnnnnnnnnnnnnnnnnnnnnnnnnnnnnnnnnnnnnnnnnnnnnnnnnnnnnnnnnnnnnnnnnnnnnnnnnnnnnnnnnnnnnnnnnnnnnnnnnnnnnnnnnnnnnnnnnnnnnnnnnnnnnnnnnnnnnnnnnnnnnnnnnnnnnnnnnnnnnnnnnnnnnnnnnnnnnnnnnnnnnnnnnnnnnnnnnnnnnnnnnnnnnnnnnnnnnnnnnnnnnnnnnnnnnnnnnnnnnnnnnnnnnnnnnnnnnnnnnnnnnnnnnnnnnnnnnnnnnnnnnnnnnnnnnnnnnnnnnnnnnnnnnnnnnnnnnnnnnnnnnnnnnnnnnnnnnnnnnnnnnnnnnnnnnnnnnnnnnnnnnnnnnnnnnnnnnnnnnnnnnnnnnnnnnnnnnnnnnnnnnnnnnnnnnnnnnnnnnnnnnnnnnnnnnnnnnnnnnnnnnnnnnnnnnnnnnnnnnnnnnnnnnnnnnnnnnnnnnnnnnnnnnnnnnnnnnnnnnnnnnnnnnnnnnnnnnnnnnnnnnnnnnnnnnnnnnnnnnnnnnnnnnnnnnnnnnnnnnnnnnnnnnnnnnnnnnnnnnnnnnnnnnnnnnnnnnnnnnnnnnnnnnnnnnnnnnnnnnnnnnnnnnnnnnnnnnnnnnnnnnnnnnnnnnnnnnnnnnnnnnnnnnnnnnnnnnnnnnnnnnnnnnnnnnnnnnnnnnnnnnnnnnnnnnnnnnnnnnnnnnnnnnnnnnnnnnnnnnnnnnnnnnnnnnnnnnnnnnnnnnnnnnnnnnnnnnnnnnnnnnnnnnnnnnnnnnnnnnnnnnnnnnnnnnnnnnnnnnnnnnnnnnnnnnnnnnnnnnnnnnnnnnnnnnnnnnnnnnnnnnnnnnnnnnnnnnnnnnnnnnnnnnnnnnnnnnnnnnnnnnnnnnnnnnnnnnnnnnnnnnnnnnnnnnnnnnnnnnnnnnnnnnnnnnnnnnnnnnnnnnnnnnnnnnnnnnnnnnnnnnnnnnnnnnnnnnnnnnnnnnnnnnnnnnnnnnnnnnnnnnnnnnnnnnnnnnnnnnnnnnnnnnnnnnnnnnnnnnnnnnnnnnnnnnnnnnnnnnnnnnnnnnnnnnnnnnnnnnnnnnnnnnnnnnnnnnnnnnnnnnnnnnnnnnnnnnnnnnnnnnnnnnnnnnnnnnnnnnnnnnnnnnnnnnnnnnnnnnnnnnnnnnnnnnnnnnnnnnnnnnnnnnnnnnnnnnnnnnnnnnnnnnnnnnnnnnnnnnnnnnnnnnnnnnnnnnnnnnnnnnnnnnnnnnnnnnnnnnnnnnnnnnnnnnnnnnnnnnnnnnnnnnnnnnnnnnnnnnnnnnnnnnnnnnnnnnnnnnnnnnnnnnnnnnnnnnnnnnnnnnnnnnnnnnnnnnnnnnnnnnnnnnnnnnnnnnnnnnnnnnnnnnnnnnnnnnnnnnnnnnnnnnnnnnnnnnnnnnnnnnnnnnnnnnnnnnnnnnnnnnnnnnnnnnnnnnnnnnnnnnnnnnnnnnnnnnnnnnnnnnnnnnnnnnnnnnnnnnnnnnnnnnnnnnnnnnnnnnnnnnnnnnnnnnnnnnnnnnnnnnnnnnnnnnnnnnnnnnnnnnnnnnnnnnnnnnnnnnnnnnnnnnnnnnnnnnnnnnnnnnnnnnnnnnnnnnnnnnnnnnnnnnnnnnnnnnnnnnnnnnnnnnnnnnnnnnnnnnnnnnnnnnnnnnnnnnnnnnnnnnnnnnnnnnnnnnnnnnnnnnnnnnnnnnnnnnnnnnnnnnnnnnnnnnnnnnnnnnnnnnnnnnnnnnnnnnnnnnnnnnnnnnnnnnnnnnnnnnnnnnnnnnnnnnnnnnnnnnnnnnnnnnnnnnnnnnnnnnnnnnnnnnnnnnnnnnnnnnnnnnnnnnnnnnnnnnnnnnnnnnnnnnnnnnnnnnnnnnnnnnnnnnnnnnnnnnnnnnnnnnnnnnnnnnnnnnnnnnnnnnnnnnnnnnnnnnnnnnnnnnnnnnnnnnnnnnnnnnnnnnnnnnnnnnnnnnnnnnnnnnnnnnnnnnnnnnnnnnnnnnnnnnnnnnnnnnnnnnnnnnnnnnnnnnnnnnnnnnnnnnnnnnnnnnnnnnnnnnnnnnnnnnnnnnnnnnnnnnnnnnnnnnnnnnnnnnnnnnnnnnnnnnnnnnnnnnnnnnnnnnnnnnnnnnnnnnnnnnnnnnnnnnnnnnnnnnnnnnnnnnnnnnnnnnnnnnnnnnnnnnnnnnnnnnnnnnnnnnnnnnnnnnnnnnnnnnnnnnnnnnnnnnnnnnnnnnnnnnnnnnnnnnnnnnnnnnnnnnnnnnnnnnnnnnnnnnnnnnnnnnnnnnnnnnnnnnnnnnnnnnnnnnnnnnnnnnnnnnnnnnnnnnnnnnnnnnnnnnnnnnnnnnnnnnnnnnnnnnnnnnnnnnnnnnnnnnnnnnnnnnnnnnnnnnnnnnnnnnnnnnnnnnnnnnnnnnnnnnnnnnnnnnnnnnnnnnnnnnnnnnnnnnnnnnnnnnnnnnnnnnnnnnnnnnnnnnnnnnnnnnnnnnnnnnnnnnnnnnnnnnnnnnnnnnnnnnnnnnnnnnnnnnnnnnnnnnnnnnnnnnnnnnnnnnnnnnnnnnnnnnnnnnnnnnnnnnnnnnnnnnnnnnnnnnnnnnnnnnnnnnnnnnnnnnnnnnnnnnnnnnnnnnnnnnnnnnnnnnnnnnnnnnnnnnnnnnnnnnnnnnnnnnnnnnnnnnnnnnnnnnnnnnnnnnnnnnnnnnnnnnnnnnnnnnnnnnnnnnnnnnnnnnnnnnnnnnnnnnnnnnnnnnnnnnnnnnnnnnnnnnnnnnnnnnnnnnnnnnnnnnnnnnnnnnnnnnnnnnnnnnnnnnnnnnnnnnnnnnnnnnnnnnnnnnnnnnnnnnnnnnnnnnnnnnnnnnnnnnnnnnnnnnnnnnnnnnnnnnnnnnnnnnnnnnnnnnnnnnnnnnnnnnnnnnnnnnnnnnnnnnnnnnnnnnnnnnnnnnnnnnnnnnnnnnnnnnnnnnnnnnnnnnnnnnnnnnnnnnnnnnnnnnnnnnnnnnnnnnnnnnnnnnnnnnnnnnnnnnnnnnnnnnnnnnnnnnnnnnnnnnnnnnnnnnnnnnnnnnnnnnnnnnnnnnnnnnnnnnnnnnnnnnnnnnnnnnnnnnnnnnnnnnnnnnnnnnnnnnnnnnnnnnnnnnnnnnnnnnnnnnnnnnnnnnnnnnnnnnnnnnnnnnnnnnnnnnnnnnnnnnnnnnnnnnnnnnnnnnnnnnnnnnnnnnnnnnnnnnnnnnnnnnnnnnnnnnnnnnnnnnnnnnnnnnnnnnnnnnnnnnnnnnnnnnnnnnnnnnnnnnnnnnnnnnnnnnnnnnnnnnnnnnnnnnnnnnnnnnnnnnnnnnnnnnnnnnnnnnnnnnnnnnnnnnnnnnnnnnnnnnnnnnnnnnnnnnnnnnnnnnnnnnnnnnnnnnnnnnnnnnnnnnnnnnnnnnnnnnnnnnnnnnnnnnnnnnnnnnnnnnnnnnnnnnnnnnnnnnnnnnnnnnnnnnnnnnnnnnnnnnnnnnnnnnnnnnnnnnnnnnnnnnnnnnnnnnnnnnnnnnnnnnnnnnnnnnnnnnnnnnnnnnnnnnnnnnnnnnnnnnnnnnnnnnnnnnnnnnnnnnnnnnnnnnnnnnnnnnnnnnnnnnnnnnnnnnnnnnnnnnnnnnnnnnnnnnnnnnnnnnnnnnnnnnnnnnnnnnnnnnnnnnnnnnnnnnnnnnnnnnnnnnnnnnnnnnnnnnnnnnnnnnnnnnnnnnnnnnnnnnnnnnnnnnnnnnnnnnnnnnnnnnnnnnnnnnnnnnnnnnnnnnnnnnnnnnnnnnnnnnnnnnnnnnnnnnnnnnnnnnnnnnnnnnnnnnnnnnnnnnnnnnnnnnnnnnnnnnnnnnnnnnnnnnnnnnnnnnnnnnnnnnnnnnnnnnnnnnnnnnnnnnnnnnnnnnnnnnnnnnnnnnnnnnnnnnnnnnnnnnnnnnnnnnnnnnnnnnnnnnnnnnnnnnnnnnnnnnnnnnnnnnnnnnnnnnnnnnnnnnnnnnnnnnnnnnnnnnnnnnnnnnnnnnnnnnnnnnnnnnnnnnnnnnnnnnnnnnnnnnnnnnnnnnnnnnnnnnnnnnnnnnnnnnnnnnnnnnnnnnnnnnnnnnnnnnnnnnnnnnnnnnnnnnnnnnnnnnnnnnnnnnnnnnnnnnnnnnnnnnnnnnnnnnnnnnnnnnnnnnnnnnnnnnnnnnnnnnnnnnnnnnnnnnnnnnnnnnnnnnnnnnnnnnnnnnnnnnnnnnnnnnnnnnnnnnnnnnnnnnnnnnnnnnnnnnnnnnnnnnnnnnnnnnnnnnnnnnnnnnnnnnnnnnnnnnnnnnnnnnnnnnnnnnnnnnnnnnnnnnnnnnnnnnnnnnnnnnnnnnnnnnnnnnnnnnnnnnnnnnnnnnnnnnnnnnnnnnnnnnnnnnnnnnnnnnnnnnnnnnnnnnnnnnnnnnnnnnnnnnnnnnnnnnnnnnnnnnnnnnnnnnnnnnnnnnnnnnnnnnnnnnnnnnnnnnnnnnnnnnnnnnnnnnnnnnnnnnnnnnnnnnnnnnnnnnnnnnnnnnnnnnnnnnnnnnnnnnnnnnnnnnnnnnnnnnnnnnnnnnnnnnnnnnnnnnnnnnnnnnnnnnnnnnnnnnnnnnnnnnnnnnnnnnnnnnnnnnnnnnnnnnnnnnnnnnnnnnnnnnnnnnnnnnnnnnnnnnnnnnnnnnnnnnnnnnnnnnnnnnnnnnnnnnnnnnnnnnnnnnnnnnnnnnnnnnnnnnnnnnnnnnnnnnnnnnnnnnnnnnnnnnnnnnnnnnnnnnnnnnnnnnnnnnnnnnnnnnnnnnnnnnnnnnnnnnnnnnnnnnnnnnnnnnnnnnnnnnnnnnnnnnnnnnnnnnnnnnnnnnnnnnnnnnnnnnnnnnnnnnnnnnnnnnnnnnnnnnnnnnnnnnnnnnnnnnnnnnnnnnnnnnnnnnnnnnnnnnnnnnnnnnnnnnnnnnnnnnnnnnnnnnnnnnnnnnnnnnnnnnnnnnnnnnnnnnnnnnnnnnnnnnnnnnnnnnnnnnnnnnnnnnnnnnnnnnnnnnnnnnnnnnnnnnnnnnnnnnnnnnnnnnnnnnnnnnnnnnnnnnnnnnnnnnnnnnnnnnnnnnnnnnnnnnnnnnnnnnnnnnnnnnnnnnnnnnnnnnnnnnnnnnnnnnnnnnnnnnnnnnnnnnnnnnnnnnnnnnnnnnnnnnnnnnnnnnnnnnnnnnnnnnnnnnnnnnnnnnnnnnnnnnnnnnnnnnnnnnnnnnnnnnnnnnnnnnnnnnnnnnnnnnnnnnnnnnnnnnnnnnnnnnnnnnnnnnnnnnnnnnnnnnnnnnnnnnnnnnnnnnnnnnnnnnnnnnnnnnnnnnnnnnnnnnnnnnnnnnnnnnnnnnnnnnnnnnnnnnnnnnnnnnnnnnnnnnnnnnnnnnnnnnnnnnnnnnnnnnnnnnnnnnnnnnnnnnnnnnnnnnnnnnnnnnnnnnnnnnnnnnnnnnnnnnnnnnnnnnnnnnnnnnnnnnnnnnnnnnnnnnnnnnnnnnnnnnnnnnnnnnnnnnnnnnnnnnnnnnnnnnnnnnnnnnnnnnnnnnnnnnnnnnnnnnnnnnnnnnnnnnnnnnnnnnnnnnnnnnnnnnnnnnnnnnnnnnnnnnnnnnnnnnnnnnnnnnnnnnnnnnnnnnnnnnnnnnnnnnnnnnnnnnnnnnnnnnnnnnnnnnnnnnnnnnnnnnnnnnnnnnnnnnnnnnnnnnnnnnnnnnnnnnnnnnnnnnnnnnnnnnnnnnnnnnnnnnnnnnnnnnnnnnnnnnnnnnnnnnnnnnnnnnnnnnnnnnnnnnnnnnnnnnnnnnnnnnnnnnnnnnnnnnnnnnnnnnnnnnnnnnnnnnnnnnnnnnnnnnnnnnnnnnnnnnnnnnnnnnnnnnnnnnnnnnnnnnnnnnnnnnnnnnnnnnnnnnnnnnnnnnnnnnnnnnnnnnnnnnnnnnnnnnnnnnnnnnnnnnnnnnnnnnnnnnnnnnnnnnnnnnnnnnnnnnnnnnnnnnnnnnnnnnnnnnnnnnnnnnnnnnnnnnnnnnnnnnnnnnnnnnnnnnnnnnnnnnnnnnnnnnnnnnnnnnnnnnnnnnnnnnnnnnnnnnnnnnnnnnnnnnnnnnnnnnnnnnnnnnnnnnnnnnnnnnnnnnnnnnnnnnnnnnnnnnnnnnnnnnnnnnnnnnnnnnnnnnnnnnnnnnnnnnnnnnnnnnnnnnnnnnnnnnnnnnnnnnnnnnnnnnnnnnnnnnnnnnnnnnnnnnnnnnnnnnnnnnnnnnnnnnnnnnnnnnngttgaccgtgcaccgagtgagcgggcgtcgattcagggactaatagaccgatacgtgctggaggttctgcctgccaagaagtccgcggccaccctctcccgcatcctacgattcgtctgcaggcacttcggcgggttcaccttagcaacgcttcaaccgaagcacatcgcggcgtatcgcgattcgagactcgcctcgggcaccgctggcgcgacgatcgtaaaggagctcggcaccctgtcccgggtagtggacgtggcggttcgggagtggggatttttcgtgcccgcgaacccgttcaagctgatctccagcccgaacgtttcccgaggtcgcgagcggcggttaaccggtgacgaggaatcaaggctcttggacgcctgccgacgcagcgggtcaccgatgctcggtgcgatagtccggttggcgctggagacgggaatgcgcctaggcgagctgctgtcgttgacgtgggcaaacatcgataccgtcaagcgaacagcccggctgggtgatacgaagaacggcgaatcccgggccgtcccgctgtcgacgctcgcgatcagcaccctcatcagcctgccccgcaacatatcgtcaggtcgggtattttggacgtggtcgcgtccggacggcttcgagaacgcatggcggcgcgcgctcggcaaagcgggcatattcgacgaggccgatcagttgccatctgcggcagcgatgcaggtcgatatggaaattctggcaaatgtatttaacgagtttcacatcacagttgaaaccgccgagcaggcagcgcgcgacctgctaactcgtaaactggcggaacccgagcacaaggcggcggcgaagttggtgctcgaaattctggctgaccccgcgtggtatcacagtgccggtgttaccgaagatggtggtattgctgtccatcacaagatgccgggacttttgctcaagcgcgtcgccaatctaggaaatacggcgtttgtgtctgccaccctcacgttgggcgggtcattcgcggatttcaagcgcgcactgggtatcggcaaggagtctgcgctgtcctcgaccatcgaacccgtaaagcacggcgaactgcgcttcgtagtcaatgacgagcatgaggtggacacgccggagtggatgacggcggtggttaaagctatcgacggtgctgcgcgtcccgttctagtggtcaccccctcgcacgatctggcacagaatatcggcgctgcggtgcacggtgctgttgtgcgcggcgatgacgaaactacggctggagccgctgtgcgggtcgataaaaatggtgtgctcgtcgctgcgagtgcgtgggccggattagatacgccaatccaatgggcatctgtagtagtgccgaaggtgccgttcccgccaccgacaatcttggacggcaagacggagagcacctacctgtcggcgcgcggcgttgccatacgccgattgagacaggtgttcggccgcggattgcggacgccagatgcggtctgcaccatctacctgtatgacccgcgggcgcgcaagctgtccggcatagtgcctgcacggttcgcgccgcaatggcaagagcgagtgtatctggaaggcacgcgcggggaagtcgttctgtcgaagtctgaacgcgaccccgccctccgaaaggccgctttgcgaaagtatgaatgcaaatgtgcgagttgcgggtttatgccaagagtctcgcaacagatcgagattcatcatctgaatccgattgcggagggcgaacgtaagaccaccctggctgacgttcgcccgctgtgcgcgaattgtcaccggctggcacactcgacaacaccgccaatgccgcttgatgcattgcggagcgcgacagaagaacatgcagcgggccggccgaacttgcagaccgattcgcattgaccggcgtcgccgaaggtgtaatatgcgaattgcgccgatttgaaatcagcttgctgggcgcgttataaatacatgctaaagcgagtaaacccgctatagcgcaagctgtgcgggttttttgttgacggggggcccacgtcacgggctgggggatttattccaacttgctgcccccgccagatcggcgaagcagctaaacaggagaatgtcatgcaaactgatttcaccgtcttctatgaaggcggcctcaacctgctgcaacccaatagtcaggcggctcgagactggtgcgatgaaaatcttccactcgactccgagtggatcggcgggcgcgtcgctgtagataataaatggattggcgatcttgcccgtgatgtcagcggcgacggtctcacgatctgcgattcggaagatcaagaccttgatcgagtgctccattgagcgcaaataaagtaacaagtctgttagtggtcagggcccggcgcaggggtgaatacttcaccgaggacgatgcatcgcgcctacgagcatacgtagcttggaagacactcaacaagcggctgatggacgagcgcgatggcctgcgtcctccaagccctcctgcgcccgagaggccatcaggcccgccggtattacgagtggtgcggacgttggttaaatcagactaggggacgaccatgaaaatcgcgagcgatgacgggcggttcgtaatggagactgacccgcccacccagcaagaagaggacgagctttaccggcgcatcgcaggcgggcctattgcgatgcttcgggttactgcgcctgcagagcagcgcctgtcgggactgccgcctcagctgcgcaagccgcggtgattcagagactgtcgtccgtcggaaacaagacgcaaagacgactaggacgctgcgctatagacatttctgcggcgggggcgcacgtgaccagggaaaaatagcctggtagtagtcaaggtgtcctaagaaattagggacatccgcccattgatcatctctcgccactatgcgagattccaattcacgggcatctcctagttgattgttaaacgccatcggaaggtttgggcggcgcccactccgcgctacttctcggcgctcgcgaagatgctttattcggcaccgcatcaaagtaaggagttttcgtttgaggttccaatctctttggatcaaacggcttgcttgcgctgctctcacgatgatggcgggtgggtcacaagccgcactgacggtcttcacatcacaggccagcttcctcgggtcggtgagttcgccgggcgtcgatggcttcaacggcttctcgatcaccgactccacgcctagcccgctcagccgggtcgcaggctcttacacctataccgcaagcacgggttcgtccggcttcttcggtgctggcacaaacgccgatccttggctatccaccgatactaacaccgactcgattacgttttcaggcttcggtgccggagttagtgcgatcggcggtaacttcttcggatccgacctcgaaggtgcttttgtcacagggaccatcagtctcacggccaccgactcgtttggtgctattaccacgcagaacatcgtcaacgctacgaccaacagcttcctcgggtttgtgtccacgggtgcgctgacgtcattagtcgtaagtgccatccagccgcccagcgattttgtgtggcccacggtgaacaatcttatcctggctcaggcagtttccccaccgatacccgaaccgcagacctacgccatgatgctcgccggcttgggactcatgggtttgattgcacgtcgcaggaagcgcaacatcgcttgagaaattaaatgaaccgcaaaaaacccgccggcgagtttcttcttgtataggggttgctgaattttcaatctttaacgctgtctcactggctctatgaatctatgcaaggactgcaacgcggtgctttacggcagcacgcaataacctcactcactacgataggcgattgctggcttgcttaggcagagcacatcggaacttcacaattgctggacgatcgcagccgcccgtactatgagcacgagttggcggcctaaggattagtcgcttggaagcacgtcaagaccgtcccgccgactcgcacgcggcctgactttcatgacgacgctcgcatacgtgcacggcggctatctcctcgtcactggcttgtggtcgctcctgcattttgaatcattccagaaagtcaccggcagaaaaacggacgtgtggctcgtcaagaccgtcgcgggccttgtaatt

SEQ ID NO: 119 - DNA, 14075 bp, Artificial Sequence
  Synthetic Oligonucleotide
  misc_feature (1)..(2334): n is a, c, g, or t
nnnnnnnnnnnnnnnnnnnnnnnnnnnnnnnnnnnnnnnnnnnnnnnnnnnnnnnnnnnnnnnnnnnnnnnnnnnnnnnnnnnnnnnnnnnnnnnnnnnnnnnnnnnnnnnnnnnnnnnnnnnnnnnnnnnnnnnnnnnnnnnnnnnnnnnnnnnnnnnnnnnnnnnnnnnnnnnnnnnnnnnnnnnnnnnnnnnnnnnnnnnnnnnnnnnnnnnnnnnnnnnnnnnnnnnnnnnnnnnnnnnnnnnnnnnnnnnnnnnnnnnnnnnnnnnnnnnnnnnnnnnnnnnnnnnnnnnnnnnnnnnnnnnnnnnnnnnnnnnnnnnnnnnnnnnnnnnnnnnnnnnnnnnnnnnnnnnnnnnnnnnnnnnnnnnnnnnnnnnnnnnnnnnnnnnnnnnnnnnnnnnnnnnnnnnnnnnnnnnnnnnnnnnnnnnnnnnnnnnnnnnnnnnnnnnnnnnnnnnnnnnnnnnnnnnnnnnnnnnnnnnnnnnnnnnnnnnnnnnnnnnnnnnnnnnnnnnnnnnnnnnnnnnnnnnnnnnnnnnnnnnnnnnnnnnnnnnnnnnnnnnnnnnnnnnnnnnnnnnnnnnnnnnnnnnnnnnnnnnnnnnnnnnnnnnnnnnnnnnnnnnnnnnnnnnnnnnnnnnnnnnnnnnnnnnnnnnnnnnnnnnnnnnnnnnnnnnnnnnnnnnnnnnnnnnnnnnnnnnnnnnnnnnnnnnnnnnnnnnnnnnnnnnnnnnnnnnnnnnnnnnnnnnnnnnnnnnnnnnnnnnnnnnnnnnnnnnnnnnnnnnnnnnnnnnnnnnnnnnnnnnnnnnnnnnnnnnnnnnnnnnnnnnnnnnnnnnnnnnnnnnnnnnnnnnnnnnnnnnnnnnnnnnnnnnnnnnnnnnnnnnnnnnnnnnnnnnnnnnnnnnnnnnnnnnnnnnnnnnnnnnnnnnnnnnnnnnnnnnnnnnnnnnnnnnnnnnnnnnnnnnnnnnnnnnnnnnnnnnnnnnnnnnnnnnnnnnnnnnnnnnnnnnnnnnnnnnnnnnnnnnnnnnnnnnnnnnnnnnnnnnnnnnnnnnnnnnnnnnnnnnnnnnnnnnnnnnnnnnnnnnnnnnnnnnnnnnnnnnnnnnnnnnnnnnnnnnnnnnnnnnnnnnnnnnnnnnnnnnnnnnnnnnnnnnnnnnnnnnnnnnnnnnnnnnnnnnnnnnnnnnnnnnnnnnnnnnnnnnnnnnnnnnnnnnnnnnnnnnnnnnnnnnnnnnnnnnnnnnnnnnnnnnnnnnnnnnnnnnnnnnnnnnnnnnnnnnnnnnnnnnnnnnnnnnnnnnnnnnnnnnnnnnnnnnnnnnnnnnnnnnnnnnnnnnnnnnnnnnnnnnnnnnnnnnnnnnnnnnnnnnnnnnnnnnnnnnnnnnnnnnnnnnnnnnnnnnnnnnnnnnnnnnnnnnnnnnnnnnnnnnnnnnnnnnnnnnnnnnnnnnnnnnnnnnnnnnnnnnnnnnnnnnnnnnnnnnnnnnnnnnnnnnnnnnnnnnnnnnnnnnnnnnnnnnnnnnnnnnnnnnnnnnnnnnnnnnnnnnnnnnnnnnnnnnnnnnnnnnnnnnnnnnnnnnnnnnnnnnnnnnnnnnnnnnnnnnnnnnnnnnnnnnnnnnnnnnnnnnnnnnnnnnnnnnnnnnnnnnnnnnnnnnnnnnnnnnnnnnnnnnnnnnnnnnnnnnnnnnnnnnnnnnnnnnnnnnnnnnnnnnnnnnnnnnnnnnnnnnnnnnnnnnnnnnnnnnnnnnnnnnnnnnnnnnnnnnnnnnnnnnnnnnnnnnnnnnnnnnnnnnnnnnnnnnnnnnnnnnnnnnnnnnnnnnnnnnnnnnnnnnnnnnnnnnnnnnnnnnnnnnnnnnnnnnnnnnnnnnnnnnnnnnnnnnnnnnnnnnnnnnnnnnnnnnnnnnnnnnnnnnnnnnnnnnnnnnnnnnnnnnnnnnnnnnnnnnnnnnnnnnnnnnnnnnnnnnnnnnnnnnnnnnnnnnnnnnnnnnnnnnnnnnnnnnnnnnnnnnnnnnnnnnnnnnnnnnnnnnnnnnnnnnnnnnnnnnnnnnnnnnnnnnnnnnnnnnnnnnnnnnnnnnnnnnnnnnnnnnnnnnnnnnnnnnnnnnnnnnnnnnnnnnnnnnnnnnnnnnnnnnnnnnnnnnnnnnnnnnnnnnnnnnnnnnnnnnnnnnnnnnnnnnnnnnnnnnnnnnnnnnnnnnnnnnnnnnnnnnnnnnnnnnnnnnnnnnnnnnnnnnnnnnnnnnnnnnnnnnnnnnnnnnnnnnnnnnnnnnnnnnnnnnnnnnnnnnnnnnnnnnnnnnnnnnnnnnnnnnnnnnnnnnnnnnnnnnnnnnnnnnnnnnnnnnnnncagtgatctatggagaatcgagtgcgcaaaagcattgatctaaccgccgctctggcggcctctgagcaccacgaagctcagcaatttaccctgtctgaattggttcgcgcctggagcactgtcgctctggacggctctgacctgcgcctgcgcaagtggcttgcggccctgggccatcgctcggcatggggcatccaaagcagtgacttcatcacctgcgcgcaggccatggtgcagcagggctataaaccttcgtcttccaaccgcgacctctccgccctggggtcggcctatcgctgggcaatcaaccggcgcttgagtcctcgcggctttcgttcgcccaccttggatgtgccccgaatggaagagggcattcgccgggtttttgtcaccgatgaggagctggaaaccctgcgggcccgagccctcgggttccgtgatcgccgcttcggggtgtttgtcgccttgctcatcgatacgggcgcccgcaagtcggagctgctcctgcggcgatggggggaggtggatttgggccgtcgggagatcttgtgccccacgaccaaaaccggggtgccccgcgtcctgcacttcgggccagaggttcatgaccttatgtgccgcgtgttcccccgtcgggatgagtccgccctggtgttcgagggccggatgcccggcctccctattgacttcaagaaggcctggagcacctgcgtcacggacatcggccgggcagggctgcgcatccatgacatccggcatgtggttgccgctcgactgctgcgctcgggtgctacgctgggcgttgctgcgcaggtgatggggcactcgccccaggtgctggcgcgacgttatgggcacttggaaacagcggtcctgcgacaagcgcaggagcgttcatggacggtagtgaaatgatggttttagatggctatgaggccgatgactttgtgggcctggctgagctttacttgcagcacggtattgagattggggccctggccacggcgattgaagcgggtggtgtgtggggctgggatcgctacgggcgctttgttcacggctccatggggactcaggtcgcacaggccgcgttggaccgcctggccaggcagtacgagcgcgaggcgtccacctatgacgatgatgaggatctggacccgaccagcgatccgctgtatttccacggctggctctacaaggatttgccgaggttctcacctcaggacaggcaacggcccgcagcaccaattcgccaaggtgatctaactcgtgccagcaacgggctgcttacccaaatcggagccttggtggaggtcgtcttggggcagggcgtttggcgtgacgctgcgcgattctccaatcaatccaagttgatcgaggccttgtcggatcactacgaaggcatgcagagcatgtccaagcgaacacttgagtcgagctttgcaaaggctcggaaggctctagacaagccctgacccctcccaccgcaattggctctggcccaccgcacttgcggtgacccaatcagcgatttctcctgaaatgcggacacgccgcaagcgtgtattgagttgctaccagccggcagcaactgactgtatttttggagattttgaacatgattgatagcgaagcttgggtcctgggccacgaggcctgggatgcctttgccgagaaacaccccgttttggggctgaagcgcggctcttggccgtttcacaacttcctgcgcctccatcgccaggctttggtcgggcacgatgccatccgcaaggtgcgcggacggtggtggattgctcacgctgtgcgattccctgctgcagccttcgcctgtgcaaccggcgtgttcggccaagcggaggcacgagcatgatctcggaattcgaagctttggctgtgaacgccgttccaggtgatcagctcgtggtcttgacctcggcaggccccttgatggccaagcaatggttgaccgatggaacgatcagcagctacacaaatgccaagcagttcaagccccggctggtgcgggtgcacaccatccacgacttgtacaagctgctcaacaagcttgagagtcttccccgggcgtgcctcgtgcgcggtcgctttgtagggcaagaagaggcccagtcggtcgctcaaagggagggcgccaccctccagccggaccacgtgctgcgccgtggggattgtttcgctgaccagcccttgcactggatcatgatcgacgtggatgacttcaagccgcgttgtcatgatccggtgtcaaaccctgtggaggcgatctgcgagttcatctcggacagccttcctgcacccttccacggcgcgagtttttgctgggcgctgtccgccagcgctgggcatcccagcaagcagggcacgctcaaggcgcacctgcatttctggctggagatgcccaggacctgtgctgaattggcggcttgggcgcggaccttgccgggcggcactattgatgcgtcgctgtactcgcctgttcaggtgcactacacggcggcccctttgtttgagccgggcgtgaccgaccctgtgcctgtgcgttctggtttctttgagtcccccctcggtctggatatggtcaggttggagattgatccggccattgttgtgcccaagcgggattacagcggtgaccctttgaccgatcctggcgccaagccgggggtgattggcgctttttgtcgcgctttcaagccgcatgacctggatcgtctgttgccagagatgttcacgcagagccagcgagaagggcactgggtctggaaagggcacagcaaggaaggggtgttcctcagtggttgtgggaacgcgctgatcagcctccacgcgacggcccccacggggactagacggccgagcaatgtttacgattttgtgcgactccacctgttcaagctcttggatctggcggcgcccgaaggctgcagggcgagcgagttgcccagcgtgaaggccatgcgagattggattgaagagcgccactcgcacgtactggaagacattcagtacccgacaaacagccccgaggaagactttgggaatctggatctggatctggatctggatctggatcttgcaccgtcagatccggatgaatctgttgcccggacttctggtgcctccggacgagcaccgcttcgggtttggcggcccgctgaactgcgcagcaggcctccagcgaggtggctcgtcaagggtgtgctgcccctgcgcggtacggcctccctggtcggagattcgaatgtgggcaagtcgttctgcgcgcttgacctggggctggccgttgctcgtggcgtgccttggttcgaaagggaggtgcagcagggagctgtgctgtacgtcgctgcagaagggggctatggcttcggtcggcgcctagaggcatacgggcttcaccacgatgtcaatgtcgatgctctccccttgggcatcattgatgatgggatagatctacgcacaaaccagatcgatgcacagcgtgcgattgctgcggccaatgggcttgagcaagagacgaagactcctgtccgactgatcgtgctggacaccctggcccgcatgctaagcggcggcgatgaaaactccagcacggacatggggcatgtgcttgctatggcagacaagattgctcaggccacaggagcagtggtgctcatcgtccatcatgtggggaaggatcagcagcgcggcgcgcgcgggcactccagctttagggcggcccttgatgcccagctcatggtgaccaagctgaaggatcggtgcgtcatcaggctcgacaagcagcgcgatggcccaactgatctggagatggcctaccggcttgagaccgttgaactcgacccttcaggcgatggcctggaggcggagacctccgccgtagtggtgcagattgaccatgcaaccggccttgatgtcgcgcctacaaaactcaccaagtggcagtctcacgccctcgacgcagtgcaggcttgtcacggctggggatcaactggccgtgtaaagcgcgacgccgtgatcaacactgccgaacagctgctcttgcggccaggcatcaccctgcccaacacgtggaagaagatgctcgaacgagggttgaccgacctcattaaggagggcgtactcgacgccgagggggcgtacctagcccatggcttcatgtttccggcaagccatgacaaacaagcttttcactgaactgggagacatcgcaatgaagaaatcgcacaactcaacaccgaacacgacagacatatcgcactgccagatcggccagttcctcgacgggcgggtttacagcttggttgatgaggcacatcgccgattcggaacgcaagaccttgtggtggttctcgacctgggcagcaacacccccacattgaatgcagtgcctcgccatcgggccacacgagacaagtcgctgtcagaccacatccggcagaaactctccaggcctgcgtcttactttaaaaagtctccctgggcagctgcgcagtccttctggttcgtggtgctggataaggctcgggcggagttctgcgctgtcaacgcaatcccggcaggggccttcgccgcgctgacctgacctgggccccccccgggcattggaactctggaaccctcctatagaggagggttccatgagttccgagttctgcgggaactcaatgaaactgaattccagaacagttccagcgagttccgagttcagcagccaggcttgccggtgcgcgggtcgcgcaggcaacgcggcgctcgtccggttttgggtgtgggccgggtttgtgctggcacttgagcagaggatgcttactgcaaatgcgggtcagcatggtgaagttagggacaagctcacccgtattgggatcagtccatttcagccactagccggcaaccctgccaggcagcatgccccgcagggcacgccatcagtccgacgcagctgccaccaagcgttaggaccgatctcccagttgggttcttgatgcccggcggccggaatgctgcaccacttagcgccccaattcgcaaactgcaaaccctgaagtcaaacggtgctgctgagtctcggacctcagggttcttcaggcaagcctgcccctggcatttgcactacagtgctacacaaaagacagggaggaacgatgcaggctttcgtgctgcgcgcgcatctgcgcacgcccttaattcagatgggatacaccactctggatgcgctgttgatggcgacacttgagacaggtgatgtcagccacctgctgcgctgtgaaacgggcctttactacgccagtgccggtttcccggtggatggaattgccggccccaatgccgcattcatcgccagcatgcgtccggagcacacccccgagcggttggatgtaattgctcccaatacgatgaagggcgatgtgcaaattggcctcgcccgtcagcgtgaaggcggcaacgtgctgaatagttatcccaccacgactgcgtcagccgtggagtggtatgccaccggggacatggcagcagtgttggaggtcgtcgcccccatcatgttcatcggcaagcgacgtgcttcgggctatggtgaggtagttcgctgggaagctgagcccggggtactggatggcattgttggtcacctgggtgagccgcttcgccccatccccgtcgagcggtggactgagggcggcgattgggtcccggtggaggctgcgtggaggcctccgtactgggaggtgcgcaaccgaaccaagtgctacgtccccgaggtggctctgtgaacggcgcggaattcttcatgacgcatgccggctatcggctgctacccaaggatctgcattctggcgatgccgtcaacgatacagaagccctgtttggccgcagcctgccactgcatacgggcaagtccctgcgcctctcatcctgctggatggtggtgactcctgaatgggtcgccacgagtttcaaggcagaagcaagtgcgggattcaggcaggacatggagcgaaaggcagcaatcgccgaggccctgcgctccggcaagccttgcatgctcctgcaactgggcaagcgaactactcgtgcggcggacttgttcgtgacctatgacccccgtgccgcgcggatctgcagtcagggcagtgcagaaacctttgatgccacgaaggacaaggcatggacatcctgatcgacaagcctccgcgattgaaaggttatgcgttgcaccgtttggtcgagcagtaccagcaagggcgccccgcactatgggctgacgaagggcaacaactacgcatccgcccgcgtgatgcgcaagctccactctttgaagttagcaagctgctgggctttgcgaccacggcctgtgtggtgcccagtacccacgccaaacacaaatacctgccgctcaacgattggcgcggccggcgtgagtggcttgagaaacaagccggcaagaacggctttgagctggttggggtgcacgtctcaccaggcatgcgccgtattgagacccacgatggccgcagcttcaccatcgatgccacggagttcacgggcattctcaaagtcacagagccagagaggtttgccgcgtgcctggtgaaaggcctgggccgtgtcggcaaagccttcggcttgaacctgcttgtagttcagtaagcgaatcaaaaggggagcaaatcaaatgactaaccgcatcatcggcaccgtgagcctagccaccgtgcagcccatcgccttcacccatcatggcattgagggccagccactcatgacgcgaggcgttgatgccgaagggcgccccttgcgtaccgtttttctaccggcctctcagctccggggccgcattcgacatgaggctgcaatggccgcactgcacagcaagggtgcgcctgtgaagcttgaagaggcctatctcgctgcgctagggcaggatctgcgccccgaagaagatcgggccgaagaactcgttcgtttgcgtgagcagcaggtgctgcgtgaagctcagcccctgctcgatttgtttggaacctggaaggttgccagtcgcttgaaggtcggccatttgctgcccgatgtcaatgtcgctcccgatagtttcagcatcatccgccgcgacctcgactccaatgaagaactgatgaacttgctgccagacgaagagcaagaccgcttttatgcccgccaggatagtcagtccatggcctccaaggtggacggcatgatcaaggtggccgagcgcgaactgcgtgccgccaagaaggccaagaacgaggctcttactgctgagttgacacagaagctggaagaactgaagaccgccaagcagtctcacaagggggatgatgaatcctccaattccaagcacttgctcagcgtcgaagccatccctgcaggggtcaatctgagtggacgctgggtcatcgagcgagcccgtccgcgcgatctggacgtgatcgttgctgccttcgacgggctcagccggcgccctgtcatgggtgcagccacagcccgtggctgcggcgaggtttccggggcggttgtgttctctgactctgagggcgaagtcctgcttcgcatcaagtttggccagtacaccccggccatcgttgagtggacagtgtcgggcaaggccttcatgaccccagcccaggccgcatgatctatcgcagcaaggagcaggccgcttatgcgaagctgattgcaggcgcgctgcgccccggctcccctttgctggctggcggtgcggctggcctgggcaaaactcatggctacagcatcccgcttctggcatcgggcctgcgtgttgccattgccctgtccacgcgccagctcattgatcagttcgtgagcagtgatgcccttgccgaggcgaataggggccggcaaagagtggtcatggccctcaagacgcgggcccatttcgagaccgctgctgactatcaagcccaccgagcccaggctttggcggcagatgtcctcgtcctgacgcatgcggctgccttgatcgacagctggatccccggttatgccgagctgcggcagcgcgacgtggtgctgtttgatgaagctgatctactggccgatgcggcagaccttcggggcagcttcaccatcccggaagatcaactgcgtggacgtgactgtgagcccagggaagccgccacctatgtgatgcagcacaccgatgacccggaaatcaaggctgcggcgtcagcgattttgtatgcccttgatcaccccacgccttacaaggtcgtgggtcgagatcttgagggcagcctggtcctcaagcaccgcatgcccgggcgcatgctcaagcccctggtgcgcgatgtggcccgctgcatcttcaccagtggcacgttgatggtcaatggccgttttgactactttgtgcgggccttgggtctgtcgggcatcgacccagcctcgcgccacattgatcccctgactcatggggacctgaacatcatctgtgccgagagcgagatgagcccggagcaaaaggcggcgcagatttcgcaggctgcgcgccccgcgcttgtgctcacttcaagccacgaggatacccaggcgctggggggtaacttgcccctggccacggtccgcatgccgggtgaggcactgctggacgctctggagcgatgccctgacgatggcatcctgattgcggcaggtgcatggtcgggccttgacagtccacgccttcgctggcggtccgtcatcatccccaaggcgccatacggccccccagtcgaagtggatggacagcaacttacccattacctagacagtcgcgtggtcgccgtgcggcgcatctgccaggggctgcatcgcggtttgcgcaccccggatgcccattgcacgctgatccttcaagatcctcgctgtcgtcggcccgagctgatggaagccatcccttcaaggttcaagggagcgctgatcagtgccatggaaggcgaagttgaggcggccctgcgcaatgagcgtgagcgacatagacccttcaggaccctggcgctcaagcactatggatgccagtgcatgtggcatgagggctgcgatgtcaaagcgccttatttgctggatgtgcatcaccgcgatcccgtctcagaaggggtgcgccgcaccgctctgcaagacctgatggttctttgtaaaaaccaccatgctgaagcccatcagcagatgcggctactcattttcaatggaggagattcaacaaaaattgatgatggatcaatgatttagcgaacatcgatgcaagctgccctttgtcggggcagctactagaacgagcatcacctcacccgggctgtgcctgacatgcaagctgccctttgtcggggcagctactagaactcgtaggtgtagttcgtcttcgggtagtcgatgcaagctgccttttgtcggggcagctactagaacgagacagccactacatcgatgaagctgaacatgcaagctgccctttgtcggagcagctactagaatgaaaccgcagtgcaggagtaagcccccatgatgcaagctgccctttgtcggggcagctactagaaccgccgcaagttcgacgccaacaagctccaaatgcaagctgccctttgtcggggcagctactagaactagtcgcaggcgcgcagctcccggccctcgatgcaagcagccctttgtcggggcagctactagaacagcacgccctggcttgtgccgctcacgaacatgcaagctgccctttgtcggggcagctactagaaccagcggcgcagcttgcccgagtcgtccagcatgcaagctgccctttgtcggggcagctactagaactacaccttgctggctgctgctgtgggcacgatgcaagctgccctttgtcggagcagctactagaaccaaacaggtcttgcgcctggttcgtgatgaatgcaagctgccctttgtcggggcagctactagaactagtgcacgcgaaacgctgcgggtttgctcatgcaagctgccctttgtcggggcagctactagaacagcaccgatcaggctttcgctgatgccgagatgcaagctgcccattgtcggggcagctactagaacttgggcaagttggtccagcggcttggttttatgcaagctgccctttgtcggggcagctactagaacaccggacgcggccggtattcgacgccgtagatgcaagctgccctttgtcggggcagctactagaaccgggaaactctgcggttggtggctgaaagatgcaagctgccctttgacggggcagctactagaacctggccctgctgctggctgcgctgcctgacatgcaagctgccctttgtcggggcagctactagaacatggcggggtggcatgtgatcgtctgcccgatgcaagctgccctttgtcgaggcagctactagaactacggtgtgtcgatgtcgccgcgaacggccaatgcaagctgccctttgtcggggcagctactagaaccaggaatttctcgacacgatgcaaggtctgatgcaagcagccctttgtcggggcagctactagaacgacatcgagcgtgaggccgctcgcacggtaatgcaagctgccctttgtcggggcagctactagaacaggttgtagttgttgtcggcctgcgtgtagatgcaagctgccctttgtcggagcagctactagaagactatggaagtggtggcggaagattggggcatgcaagctgtcctttgtcggggcagctactagaacttcgtgtacgtcatggaagagttcgccaagatgtaagctgccccttgtcggtgcagctactagaacgtagctcaactggatagagcaccagcctcatgcaagctgccctttgtcggggcagctactagaacttcaaccccgcgcaaaacggtgcccgctcgatgcaagctgacctttgtcggggcagctactagaactccacggcctgggcctagtagttgacctgcacgcaagctgccttttatcggggcagctactagaactagcatgccggcaccgttggggtgatggggatgtaagctgccctttgtcggggcagctactagaactgggatgtgggcggcgagggcgacccgattatgcaagctgccctttgtggggcagttactagaacgggtggatgaggttatcggcctggtcggccatgcaagctgccctttgtcggggcagttactaaagcgtgcagttgtaattctggctgtggaggaagtgcaagcagcccctgtcggggtagatgcgacttttgaaaactggtcagaaactgcgcgcaactacgttgggcttgcaccccgtctggcgtacctgcgaaagaggggtatgggggagggagtccgtccccctctgaattcagtttccgtttttggctttttctatgagccctgggctgcatgcgtcagcgtagctgacgctggcccatacggaaaccctgacctcaatagtgcccagctcgccctaggtagaaagtgttgatggtggctgtacggaattcacttgatttccgtatagtgaccgggcacgatcctgagccaccaactcagggagtccacatgactaagcgaagtcgccagctcagggtcgcgctgtatgcgcgggtgtccaccgacaagcaatccacggagaaccagctgcaagagctgcggcatgccgctgagcgtttgggttggcaggtggttgatgagttcgtggatcgaggcatcagcggg

SEQ ID NO: 120 - DNA, 14075 bp, Artificial Sequence
  Synthetic Oligonucleotide
  misc_feature (1)..(9999): n is a, c, g, or t
nnnnnnnnnnnnnnnnnnnnnnnnnnnnnnnnnnnnnnnnnnnnnnnnnnnnnnnnnnnnnnnnnnnnnnnnnnnnnnnnnnnnnnnnnnnnnnnnnnnnnnnnnnnnnnnnnnnnnnnnnnnnnnnnnnnnnnnnnnnnnnnnnnnnnnnnnnnnnnnnnnnnnnnnnnnnnnnnnnnnnnnnnnnnnnnnnnnnnnnnnnnnnnnnnnnnnnnnnnnnnnnnnnnnnnnnnnnnnnnnnnnnnnnnnnnnnnnnnnnnnnnnnnnnnnnnnnnnnnnnnnnnnnnnnnnnnnnnnnnnnnnnnnnnnnnnnnnnnnnnnnnnnnnnnnnnnnnnnnnnnnnnnnnnnnnnnnnnnnnnnnnnnnnnnnnnnnnnnnnnnnnnnnnnnnnnnnnnnnnnnnnnnnnnnnnnnnnnnnnnnnnnnnnnnnnnnnnnnnnnnnnnnnnnnnnnnnnnnnnnnnnnnnnnnnnnnnnnnnnnnnnnnnnnnnnnnnnnnnnnnnnnnnnnnnnnnnnnnnnnnnnnnnnnnnnnnnnnnnnnnnnnnnnnnnnnnnnnnnnnnnnnnnnnnnnnnnnnnnnnnnnnnnnnnnnnnnnnnnnnnnnnnnnnnnnnnnnnnnnnnnnnnnnnnnnnnnnnnnnnnnnnnnnnnnnnnnnnnnnnnnnnnnnnnnnnnnnnnnnnnnnnnnnnnnnnnnnnnnnnnnnnnnnnnnnnnnnnnnnnnnnnnnnnnnnnnnnnnnnnnnnnnnnnnnnnnnnnnnnnnnnnnnnnnnnnnnnnnnnnnnnnnnnnnnnnnnnnnnnnnnnnnnnnnnnnnnnnnnnnnnnnnnnnnnnnnnnnnnnnnnnnnnnnnnnnnnnnnnnnnnnnnnnnnnnnnnnnnnnnnnnnnnnnnnnnnnnnnnnnnnnnnnnnnnnnnnnnnnnnnnnnnnnnnnnnnnnnnnnnnnnnnnnnnnnnnnnnnnnnnnnnnnnnnnnnnnnnnnnnnnnnnnnnnnnnnnnnnnnnnnnnnnnnnnnnnnnnnnnnnnnnnnnnnnnnnnnnnnnnnnnnnnnnnnnnnnnnnnnnnnnnnnnnnnnnnnnnnnnnnnnnnnnnnnnnnnnnnnnnnnnnnnnnnnnnnnnnnnnnnnnnnnnnnnnnnnnnnnnnnnnnnnnnnnnnnnnnnnnnnnnnnnnnnnnnnnnnnnnnnnnnnnnnnnnnnnnnnnnnnnnnnnnnnnnnnnnnnnnnnnnnnnnnnnnnnnnnnnnnnnnnnnnnnnnnnnnnnnnnnnnnnnnnnnnnnnnnnnnnnnnnnnnnnnnnnnnnnnnnnnnnnnnnnnnnnnnnnnnnnnnnnnnnnnnnnnnnnnnnnnnnnnnnnnnnnnnnnnnnnnnnnnnnnnnnnnnnnnnnnnnnnnnnnnnnnnnnnnnnnnnnnnnnnnnnnnnnnnnnnnnnnnnnnnnnnnnnnnnnnnnnnnnnnnnnnnnnnnnnnnnnnnnnnnnnnnnnnnnnnnnnnnnnnnnnnnnnnnnnnnnnnnnnnnnnnnnnnnnnnnnnnnnnnnnnnnnnnnnnnnnnnnnnnnnnnnnnnnnnnnnnnnnnnnnnnnnnnnnnnnnnnnnnnnnnnnnnnnnnnnnnnnnnnnnnnnnnnnnnnnnnnnnnnnnnnnnnnnnnnnnnnnnnnnnnnnnnnnnnnnnnnnnnnnnnnnnnnnnnnnnnnnnnnnnnnnnnnnnnnnnnnnnnnnnnnnnnnnnnnnnnnnnnnnnnnnnnnnnnnnnnnnnnnnnnnnnnnnnnnnnnnnnnnnnnnnnnnnnnnnnnnnnnnnnnnnnnnnnnnnnnnnnnnnnnnnnnnnnnnnnnnnnnnnnnnnnnnnnnnnnnnnnnnnnnnnnnnnnnnnnnnnnnnnnnnnnnnnnnnnnnnnnnnnnnnnnnnnnnnnnnnnnnnnnnnnnnnnnnnnnnnnnnnnnnnnnnnnnnnnnnnnnnnnnnnnnnnnnnnnnnnnnnnnnnnnnnnnnnnnnnnnnnnnnnnnnnnnnnnnnnnnnnnnnnnnnnnnnnnnnnnnnnnnnnnnnnnnnnnnnnnnnnnnnnnnnnnnnnnnnnnnnnnnnnnnnnnnnnnnnnnnnnnnnnnnnnnnnnnnnnnnnnnnnnnnnnnnnnnnnnnnnnnnnnnnnnnnnnnnnnnnnnnnnnnnnnnnnnnnnnnnnnnnnnnnnnnnnnnnnnnnnnnnnnnnnnnnnnnnnnnnnnnnnnnnnnnnnnnnnnnnnnnnnnnnnnnnnnnnnnnnnnnnnnnnnnnnnnnnnnnnnnnnnnnnnnnnnnnnnnnnnnnnnnnnnnnnnnnnnnnnnnnnnnnnnnnnnnnnnnnnnnnnnnnnnnnnnnnnnnnnnnnnnnnnnnnnnnnnnnnnnnnnnnnnnnnnnnnnnnnnnnnnnnnnnnnnnnnnnnnnnnnnnnnnnnnnnnnnnnnnnnnnnnnnnnnnnnnnnnnnnnnnnnnnnnnnnnnnnnnnnnnnnnnnnnnnnnnnnnnnnnnnnnnnnnnnnnnnnnnnnnnnnnnnnnnnnnnnnnnnnnnnnnnnnnnnnnnnnnnnnnnnnnnnnnnnnnnnnnnnnnnnnnnnnnnnnnnnnnnnnnnnnnnnnnnnnnnnnnnnnnnnnnnnnnnnnnnnnnnnnnnnnnnnnnnnnnnnnnnnnnnnnnnnnnnnnnnnnnnnnnnnnnnnnnnnnnnnnnnnnnnnnnnnnnnnnnnnnnnnnnnnnnnnnnnnnnnnnnnnnnnnnnnnnnnnnnnnnnnnnnnnnnnnnnnnnnnnnnnnnnnnnnnnnnnnnnnnnnnnnnnnnnnnnnnnnnnnnnnnnnnnnnnnnnnnnnnnnnnnnnnnnnnnnnnnnnnnnnnnnnnnnnnnnnnnnnnnnnnnnnnnnnnnnnnnnnnnnnnnnnnnnnnnnnnnnnnnnnnnnnnnnnnnnnnnnnnnnnnnnnnnnnnnnnnnnnnnnnnnnnnnnnnnnnnnnnnnnnnnnnnnnnnnnnnnnnnnnnnnnnnnnnnnnnnnnnnnnnnnnnnnnnnnnnnnnnnnnnnnnnnnnnnnnnnnnnnnnnnnnnnnnnnnnnnnnnnnnnnnnnnnnnnnnnnnnnnnnnnnnnnnnnnnnnnnnnnnnnnnnnnnnnnnnnnnnnnnnnnnnnnnnnnnnnnnnnnnnnnnnnnnnnnnnnnnnnnnnnnnnnnnnnnnnnnnnnnnnnnnnnnnnnnnnnnnnnnnnnnnnnnnnnnnnnnnnnnnnnnnnnnnnnnnnnnnnnnnnnnnnnnnnnnnnnnnnnnnnnnnnnnnnnnnnnnnnnnnnnnnnnnnnnnnnnnnnnnnnnnnnnnnnnnnnnnnnnnnnnnnnnnnnnnnnnnnnnnnnnnnnnnnnnnnnnnnnnnnnnnnnnnnnnnnnnnnnnnnnnnnnnnnnnnnnnnnnnnnnnnnnnnnnnnnnnnnnnnnnnnnnnnnnnnnnnnnnnnnnnnnnnnnnnnnnnnnnnnnnnnnnnnnnnnnnnnnnnnnnnnnnnnnnnnnnnnnnnnnnnnnnnnnnnnnnnnnnnnnnnnnnnnnnnnnnnnnnnnnnnnnnnnnnnnnnnnnnnnnnnnnnnnnnnnnnnnnnnnnnnnnnnnnnnnnnnnnnnnnnnnnnnnnnnnnnnnnnnnnnnnnnnnnnnnnnnnnnnnnnnnnnnnnnnnnnnnnnnnnnnnnnnnnnnnnnnnnnnnnnnnnnnnnnnnnnnnnnnnnnnnnnnnnnnnnnnnnnnnnnnnnnnnnnnnnnnnnnnnnnnnnnnnnnnnnnnnnnnnnnnnnnnnnnnnnnnnnnnnnnnnnnnnnnnnnnnnnnnnnnnnnnnnnnnnnnnnnnnnnnnnnnnnnnnnnnnnnnnnnnnnnnnnnnnnnnnnnnnnnnnnnnnnnnnnnnnnnnnnnnnnnnnnnnnnnnnnnnnnnnnnnnnnnnnnnnnnnnnnnnnnnnnnnnnnnnnnnnnnnnnnnnnnnnnnnnnnnnnnnnnnnnnnnnnnnnnnnnnnnnnnnnnnnnnnnnnnnnnnnnnnnnnnnnnnnnnnnnnnnnnnnnnnnnnnnnnnnnnnnnnnnnnnnnnnnnnnnnnnnnnnnnnnnnnnnnnnnnnnnnnnnnnnnnnnnnnnnnnnnnnnnnnnnnnnnnnnnnnnnnnnnnnnnnnnnnnnnnnnnnnnnnnnnnnnnnnnnnnnnnnnnnnnnnnnnnnnnnnnnnnnnnnnnnnnnnnnnnnnnnnnnnnnnnnnnnnnnnnnnnnnnnnnnnnnnnnnnnnnnnnnnnnnnnnnnnnnnnnnnnnnnnnnnnnnnnnnnnnnnnnnnnnnnnnnnnnnnnnnnnnnnnnnnnnnnnnnnnnnnnnnnnnnnnnnnnnnnnnnnnnnnnnnnnnnnnnnnnnnnnnnnnnnnnnnnnnnnnnnnnnnnnnnnnnnnnnnnnnnnnnnnnnnnnnnnnnnnnnnnnnnnnnnnnnnnnnnnnnnnnnnnnnnnnnnnnnnnnnnnnnnnnnnnnnnnnnnnnnnnnnnnnnnnnnnnnnnnnnnnnnnnnnnnnnnnnnnnnnnnnnnnnnnnnnnnnnnnnnnnnnnnnnnnnnnnnnnnnnnnnnnnnnnnnnnnnnnnnnnnnnnnnnnnnnnnnnnnnnnnnnnnnnnnnnnnnnnnnnnnnnnnnnnnnnnnnnnnnnnnnnnnnnnnnnnnnnnnnnnnnnnnnnnnnnnnnnnnnnnnnnnnnnnnnnnnnnnnnnnnnnnnnnnnnnnnnnnnnnnnnnnnnnnnnnnnnnnnnnnnnnnnnnnnnnnnnnnnnnnnnnnnnnnnnnnnnnnnnnnnnnnnnnnnnnnnnnnnnnnnnnnnnnnnnnnnnnnnnnnnnnnnnnnnnnnnnnnnnnnnnnnnnnnnnnnnnnnnnnnnnnnnnnnnnnnnnnnnnnnnnnnnnnnnnnnnnnnnnnnnnnnnnnnnnnnnnnnnnnnnnnnnnnnnnnnnnnnnnnnnnnnnnnnnnnnnnnnnnnnnnnnnnnnnnnnnnnnnnnnnnnnnnnnnnnnnnnnnnnnnnnnnnnnnnnnnnnnnnnnnnnnnnnnnnnnnnnnnnnnnnnnnnnnnnnnnnnnnnnnnnnnnnnnnnnnnnnnnnnnnnnnnnnnnnnnnnnnnnnnnnnnnnnnnnnnnnnnnnnnnnnnnnnnnnnnnnnnnnnnnnnnnnnnnnnnnnnnnnnnnnnnnnnnnnnnnnnnnnnnnnnnnnnnnnnnnnnnnnnnnnnnnnnnnnnnnnnnnnnnnnnnnnnnnnnnnnnnnnnnnnnnnnnnnnnnnnnnnnnnnnnnnnnnnnnnnnnnnnnnnnnnnnnnnnnnnnnnnnnnnnnnnnnnnnnnnnnnnnnnnnnnnnnnnnnnnnnnnnnnnnnnnnnnnnnnnnnnnnnnnnnnnnnnnnnnnnnnnnnnnnnnnnnnnnnnnnnnnnnnnnnnnnnnnnnnnnnnnnnnnnnnnnnnnnnnnnnnnnnnnnnnnnnnnnnnnnnnnnnnnnnnnnnnnnnnnnnnnnnnnnnnnnnnnnnnnnnnnnnnnnnnnnnnnnnnnnnnnnnnnnnnnnnnnnnnnnnnnnnnnnnnnnnnnnnnnnnnnnnnnnnnnnnnnnnnnnnnnnnnnnnnnnnnnnnnnnnnnnnnnnnnnnnnnnnnnnnnnnnnnnnnnnnnnnnnnnnnnnnnnnnnnnnnnnnnnnnnnnnnnnnnnnnnnnnnnnnnnnnnnnnnnnnnnnnnnnnnnnnnnnnnnnnnnnnnnnnnnnnnnnnnnnnnnnnnnnnnnnnnnnnnnnnnnnnnnnnnnnnnnnnnnnnnnnnnnnnnnnnnnnnnnnnnnnnnnnnnnnnnnnnnnnnnnnnnnnnnnnnnnnnnnnnnnnnnnnnnnnnnnnnnnnnnnnnnnnnnnnnnnnnnnnnnnnnnnnnnnnnnnnnnnnnnnnnnnnnnnnnnnnnnnnnnnnnnnnnnnnnnnnnnnnnnnnnnnnnnnnnnnnnnnnnnnnnnnnnnnnnnnnnnnnnnnnnnnnnnnnnnnnnnnnnnnnnnnnnnnnnnnnnnnnnnnnnnnnnnnnnnnnnnnnnnnnnnnnnnnnnnnnnnnnnnnnnnnnnnnnnnnnnnnnnnnnnnnnnnnnnnnnnnnnnnnnnnnnnnnnnnnnnnnnnnnnnnnnnnnnnnnnnnnnnnnnnnnnnnnnnnnnnnnnnnnnnnnnnnnnnnnnnnnnnnnnnnnnnnnnnnnnnnnnnnnnnnnnnnnnnnnnnnnnnnnnnnnnnnnnnnnnnnnnnnnnnnnnnnnnnnnnnnnnnnnnnnnnnnnnnnnnnnnnnnnnnnnnnnnnnnnnnnnnnnnnnnnnnnnnnnnnnnnnnnnnnnnnnnnnnnnnnnnnnnnnnnnnnnnnnnnnnnnnnnnnnnnnnnnnnnnnnnnnnnnnnnnnnnnnnnnnnnnnnnnnnnnnnnnnnnnnnnnnnnnnnnnnnnnnnnnnnnnnnnnnnnnnnnnnnnnnnnnnnnnnnnnnnnnnnnnnnnnnnnnnnnnnnnnnnnnnnnnnnnnnnnnnnnnnnnnnnnnnnnnnnnnnnnnnnnnnnnnnnnnnnnnnnnnnnnnnnnnnnnnnnnnnnnnnnnnnnnnnnnnnnnnnnnnnnnnnnnnnnnnnnnnnnnnnnnnnnnnnnnnnnnnnnnnnnnnnnnnnnnnnnnnnnnnnnnnnnnnnnnnnnnnnnnnnnnnnnnnnnnnnnnnnnnnnnnnnnnnnnnnnnnnnnnnnnnnnnnnnnnnnnnnnnnnnnnnnnnnnnnnnnnnnnnnnnnnnnnnnnnnnnnnnnnnnnnnnnnnnnnnnnnnnnnnnnnnnnnnnnnnnnnnnnnnnnnnnnnnnnnnnnnnnnnnnnnnnnnnnnnnnnnnnnnnnnnnnnnnnnnnnnnnnnnnnnnnnnnnnnnnnnnnnnnnnnnnnnnnnnnnnnnnnnnnnnnnnnnnnnnnnnnnnnnnnnnnnnnnnnnnnnnnnnnnnnnnnnnnnnnnnnnnnnnnnnnnnnnnnnnnnnnnnnnnnnnnnnnnnnnnnnnnnnnnnnnnnnnnnnnnnnnnnnnnnnnnnnnnnnnnnnnnnnnnnnnnnnnnnnnnnnnnnnnnnnnnnnnnnnnnnnnnnnnnnnnnnnnnnnnnnnnnnnnnnnnnnnnnnnnnnnnnnnnnnnnnnnnnnnnnnnnnnnnnnnnnnnnnnnnnnnnnnnnnnnnnnnnnnnnnnnnnnnnnnnnnnnnnnnnnnnnnnnnnnnnnnnnnnnnnnnnnnnnnnnnnnnnnnnnnnnnnnnnnnnnnnnnnnnnnnnnnnnnnnnnnnnnnnnnnnnnnnnnnnnnnnnnnnnnnnnnnnnnnnnnnnnnnnnnnnnnnnnnnnnnnnnnnnnnnnnnnnnnnnnnnnnnnnnnnnnnnnnnnnnnnnnnnnnnnnnnnnnnnnnnnnnnnnnnnnnnnnnnnnnnnnnnnnnnnnnnnnnnnnnnnnnnnnnnnnnnnnnnnnnnnnnnnnnnnnnnnnnnnnnnnnnnnnnnnnnnnnnnnnnnnnnnnnnnnnnnnnnnnnnnnnnnnnnnnnnnnnnnnnnnnnnnnnnnnnnnnnnnnnnnnnnnnnnnnnnnnnnnnnnnnnnnnnnnnnnnnnnnnnnnnnnnnnnnnnnnnnnnnnnnnnnnnnnnnnnnnnnnnnnnnnnnnnnnnnnnnnnnnnnnnnnnnnnnnnnnnnnnnnnnnnnnnnnnnnnnnnnnnnnnnnnnnnnnnnnnnnnnnnnnnnnnnnnnnnnnnnnnnnnnnnnnnnnnnnnnnnnnnnnnnnnnnnnnnnnnnnnnnnnnnnnnnnnnnnnnnnnnnnnnnnnnnnnnnnnnnnnnnnnnnnnnnnnnnnnnnnnnnnnnnnnnnnnnnnnnnnnnnnnnnnnnnnnnnnnnnnnnnnnnnnnnnnnnnnnnnnnnnnnnnnnnnnnnnnnnnnnnnnnnnnnnnnnnnnnnnnnnnnnnnnnnnnnnnnnnnnnnnnnnnnnnnnnnnnnnnnnnnnnnnnnnnnnnnnnnnnnnnnnnnnnnnnnnnnnnnnnnnnnnnnnnnnnnnnnnnnnnnnnnnnnnnnnnnnnnnnnnnnnnnnnnnnnnnnnnnnnnnnnnnnnnnnnnnnnnnnnnnnnnnnnnnnnnnnnnnnnnnnnnnnnnnnnnnnnnnnnnnnnnnnnnnnnnnnnnnnnnnnnnnnnnnnnnnnnnnnnnnnnnnnnnnnnnnnnnnnnnnnnnnnnnnnnnnnnnnnnnnnnnnnnnnnnnnnnnnnnnnnnnnnnnnnnnnnnnnnnnnnnnnnnnnnnnnnnnnnnnnnnnnnnnnnnnnnnnnnnnnnnnnnnnnnnnnnnnnnnnnnnnnnnnnnnnnnnnnnnnnnnnnnnnnnnnnnnnnnnnnnnnnnnnnnnnnnnnnnnnnnnnnnnnnnnnnnnnnnnnnnnnnnnnnnnnnnnnnnnnnnnnnnnnnnnnnnnnnnnnnnnnnnnnnnnnnnnnnnnnnnnnnnnnnnnnnnnnnnnnnnnnnnnnnnnnnnnnnnnnnnnnnnnnnnnnnnnnnnnnnnnnnnnnnnnnnnnnnnnnnnnnnnnnnnnnnnnnnnnnnnnnnnnnnnnnnnnnnnnnnnnnnnnnnnnnnnnnnnnnnnnnnnnnnnnnnnnnnnnnnnnnnnnnnnnnnnnnnnnnnnnnnnnnnnnnnnnnnnnnnnnnnnnnnnnnnnnnnnnnnnnnnnnnnnnnnnnnnnnnnnnnnnnnnnnnnnnnnnnnnnnnnnnnnnnnnnnnnnnnnnnnnnnnnnnnnnnnnnnnnnnnnnnnnnnnnnnnnnnnnnnnnnnnnnnnnnnnnnnnnnnnnnnnnnnnnnnnnnnnnnnnnnnnnnnnnnnnnnnnnnnnnnnnnnnnnnnnnnnnnnnnnnnnnnnnnnnnnnnnnnnnnnnnnnnnnnnnnnnnnnnnnnnnnnnnnnnnnnnnnnnnnnnnnnnnnnnnnnnnnnnnnnnnnnnnnnnnnnnnnnnnnnnnnnnnnnnnnnnnnnnnnnnnnnnnnnnnnnnnnnnnnnnnnnnnnnnnnnnnnnnnnnnnnnnnnnnnnnnnnnnnnnnnnnnnnnnnnnnnnnnnnnnnnnnnnnnnnnnnnnnnnnnnnnnnnnnnnnnnnnnnnnnnnnnnnnnnnnnnnnnnnnnnnnnnnnnnnnnnnnnnnnnnnnnnnnnnnnnnnnnnnnnnnnnnnnnnnnnnnnnnnnnnnnnnnnnnnnnnnnnnnnnnnnnnnnnnnnnnnnnnnnnnnnnnnnnnnnnnnnnnnnnnnnnnnnnnnnnnnnnnnnnnnnnnnnnnnnnnnnnnnnnnnnnnnnnnnnnnnnnnnnnnnnnnnnnnnnnnnnnnnnnnnnnnnnnnnnnnnnnnnnnnnnnnnnnnnnnnnnnnnnnnnnnnnnnnnnnnnnnnnnnnnnnnnnnnnnnnnnnnnnnnnnnnnnnnnnnnnnnnnnnnnnnnnnnnnnnnnnnnnnnnnnnnnnnnnnnnnnnnnnnnnnnnnnnnnnnnnnnnnnnnnnnnnnnnnnnnnnnnnnnnnnnnnnnnnnnnnnnnnnnnnnnnnnnnnnnnnnnnnnnnnnnnnnnnnnnnnnnnnnnnnnnnnnnnnnnnnnnnnnnnnnnnnnnnnnnnnnnnnnnnnnnnnnnnnnnnnnnnnnnnnnnnnnnnnnnnnnnnnnnnnnnnnnnnnnnnnnnnnnnnnnnnnnnnnnnnnnnnnnnnnnnnnnnnnnnnnnnnnnnnnnnnnnnnnnnnnnnnnnnnnnnnnnnnnnnnnnnnnnnnnnnnnnnnnnnnnnnnnnnnnnnnnnnnnnnnnnnnnnnnnnnnnnnnnnnnnnnnnnnnnnnnnnnnnnnnnnnnnnnnnnnnnnnnnnnnnnnnnnnnnnnnnnnnnnnnnnnnnnnnnnnnnnnnnnnnnnnnnnnnnnnnnnnnnnnnnnnnnnnnnnnnnnnnnnnnnnnnnnnnnnnnnnnnnnnnnnnnnnnnnnnnnnnnnnnnnnnnnnnnnnnnnnnnnnnnnnnnnnnnnnnnnnnnnnnnnnnnnnnnnnnnnnnnnnnnnngcactcttgctgctggacccacgctgcgccaggacggagctgcgcgaggccgtgcctgcgcgattcatggtgctgtggtcgtccttcgaggaaggggcacgcgtcgaagtggtgctatcgaaggccgagcgcaacccgagcctgagggcgcaggcactgagacaccacggtgcgcaatgctcgtgggcgggctgctcggtcacgatgctcgaatggctcgacgtccatcacaaggacccggtgtcggaaggcgtccgccggacgaccctgtccgaccttgaagtcctctgcaagaaccaccatgccgaggctcatcggttgcttcggttggcgcgaatttcagggggcgaaacggaaggaacggaaggggggacaaagacttgcgggttacgacgtcaagctgctcagggcatgggcagttactagaactccaccaccagctcggccgacatcgcgcggggtcaagctgttcagggaatgggcagttactagaactacacaccgccggccgcgctgacgactctcggtcaagctgctcaggcaatgggcagttactagaacagataacacgcggcggtgtaggcgctgccgggtcaagctgctcagggaatgggcagttgctagaacccctgcggtgtggccgcgagatcatcggtgggtcaagctgctcagggaatgggcagttactagaacgccgttatcgccgaagaagtgctgcacaacggtcaagctggccagggaatgggcagttgctagaactatgcgtggtcgtaccgggtgccgagctttggtcaagctgctcagtgaatgggcagttactagaacttcacggctgcgtggcacgcattgaacaggggtcaagctgctcaggaaatgggcagttgctagaactcgatgacgctcgggcgcatcaacgcggcggtcaagctgctcaggtaatgagcagttactggaactacaggttgtagatcaccgtgcagtcgcgcagtcaagctgctcattgaatgagcagttgctagatcatggacacgatcttcatgtccaacgccgggggtcaagctgctcaaggaatgggcagttactagaacatgatcggcttgccgccaaccacgttgaagggtcaagctgcccagtgaatgggcagttactggaacatcctcgccgctcttctgccgtcgctggtgggtcaagctgcttagtgaaaaagcagttattagaacgggcacaactcccggctgcagtacatgcggtgtcaagctgctcagtgaatggacagttgccataacgaaccgttgccaacgtgcagtggttgatgatcggctgcaaagtagcgtagggcagcggctacccgtcgcggtggcactgcgtaggtcgcatttgagcgggagaagcaccgcctttcgggagcgacattgacgcaggtcgaatggcgaagtcctttgacacaagatcatcgcgcctcgggccttcgactcacaacaactcataacggcgcacgtcagcgccgtcgctgccatgaaatgcaagcttgtgacactgtgtttggcaactgcagcgtttttcgtaagcaatgccgatgcacatcccgttcaattcaacttcacggcaaatggcggcctcggaactcattacgaagggttcttggtagtcgatgacgacctgttcgacggcgggacatttcaatcgatcaagcaaagtcaattgactgatttcggcatgtcgttcagccaaaacggcacgccggtgtggcagtggagttatggcgacttggtgctggactctgagtggttcttcgatagcagccaaccggtgccggatattgtcggcatgggaggactgatctctgaaaaccaccgattggtagccgcttcgactggcaatatcagcgctgaattcttcggtgcaagtggagattgggtctatgtcggcgctgtggcgcccacaggcgtcccagaaccgagcacacgcgctctcgcgtgcgcggcgctgttgttggccgcctccacgtgcgtggcgaccgcctgtcgacatagacgatcaaccggcttccgcagccccttgatgtgctgccaccgtggcgtcgactctgccggtgcccaatcgggcaaagttgcgtagggcagcggtcaacgcacgtcgttgccgctgcgctgctttcgtcgcttgctcagcgcctgcacagagtcacttgcagcgacgtcgtcgcggactgacgcctcgaccagcgtcaacgccctgccgatggcgcgaaggtaggcggtagcgcactgcctgtctgccgagaagaacagatgttttgctgcgttgcgctcccgagggttacgcatcgagcctctgtcgcgtgccaacagccctcaattgggttactgcaccgatacagcgggtataggcgccctgcgcctgcattgccgccttcaaatacttgagtctgtgctccgggctctgacactcgacagcagcagccgagaacctgacgaacagcgcgtcgcatattgcggcatgcgacagtagttcgttttgaactgtcagtccgtcttgtgacccaagaagagcaattcggcgattcattgcctcaagggccgatcctttctcaactgtggttgagtctccacttgagacgtattgagtcggccctgcaaattccaaattcgccacgcagcttgaccgctgggcgacggctacacgccgcgagccatcgcgaggcctgtgagccaacagccggcgcgccgatcttcggttgccagtcggccgctgagtccaccataggctattcggcccatggcccgaagcaggccaagaaaaggcgccgtgatgcggcgcagggcgatctggcgcagcagccagcgcacgttgtagccggcggcgcagctgatggtgtgcaacgcgtcgccgagagcgcccttgagccagcagcggtccatgcggtgatcagatttcaggtgcccgatggctggctccaccgcttggcggcgtcgcaaccagcccttttgctgcgggctcaggctcttgaacttgccgcggtggatgatgaacttgccagggttgtcggcatccacgcccctgaagccgagatcggccaccacttccttgatctcgccgtcgacgtcttgcatcaggttggtggcctgctcgagcgcggggttgaggatgtggccgtcgaaggggttgccgcggaaggtgcgcgcgcccaccatcaatccgatgcggtgcaggatgaccacggcggccttcacgccgaactcgtaaggcttgcgcgctttacccttgccgatgcactcgacctccggcgcgtgcagcgcgtacagcttgttcttgtcgtgcgtgcgctgcgtgcggatgcgctcggcgcgcgtcatcagcgtgcccagcgcggttatcgccagagcgttctcgccggcaaacccgggcgccttgagcttgcgatcgatctcgcgcatcacgatgcccaggatcgtgcgctggcgcttgaccgtgcggcgcagccgcttgaactgcttggcgtgcgcgtagccgccggccttacggcgcaactccttgccctgcttggcgaaggtctgcttcagcgtcatgcccactcgcttggcggcggcgaccaccttgtgccgggcgatctccagcagccggctgtccaccggatgcgcgatggccttctcctgcacggtggtgtccacggtcacgcgttggaagtctgccggcttgacaaccttcatcgccgcggcggcgtcgatggtggccttgagcaactgctccagcccgtcctcgccgatgtcgcggcgaaagcgcccgatctgcgtggcgtcgcagggcaagcggtgctcgtagtactcctggccgctgaagaactgccacagcacgttctcgctccagcgctcgcacacctcctcgtcgctcaggttgaagctgtgcttgaggtagaccaggctgatcagcaggcgcatgggcagtcgtgggcggccagcgttgctgcgccccgcacctgccaccgccagcgtcggccccagcatgtccacgccttcgacgaccacaccggcgcggtcctggcgcgcgaacttcggcgccagcgcggcttcgatctg

SEQ ID NO: 121 - DNA, 14036 bp, Artificial Sequence
  Synthetic Oligonucleotide
  misc_feature (1)..(6075): n is a, c, g, or t
nnnnnnnnnnnnnnnnnnnnnnnnnnnnnnnnnnnnnnnnnnnnnnnnnnnnnnnnnnnnnnnnnnnnnnnnnnnnnnnnnnnnnnnnnnnnnnnnnnnnnnnnnnnnnnnnnnnnnnnnnnnnnnnnnnnnnnnnnnnnnnnnnnnnnnnnnnnnnnnnnnnnnnnnnnnnnnnnnnnnnnnnnnnnnnnnnnnnnnnnnnnnnnnnnnnnnnnnnnnnnnnnnnnnnnnnnnnnnnnnnnnnnnnnnnnnnnnnnnnnnnnnnnnnnnnnnnnnnnnnnnnnnnnnnnnnnnnnnnnnnnnnnnnnnnnnnnnnnnnnnnnnnnnnnnnnnnnnnnnnnnnnnnnnnnnnnnnnnnnnnnnnnnnnnnnnnnnnnnnnnnnnnnnnnnnnnnnnnnnnnnnnnnnnnnnnnnnnnnnnnnnnnnnnnnnnnnnnnnnnnnnnnnnnnnnnnnnnnnnnnnnnnnnnnnnnnnnnnnnnnnnnnnnnnnnnnnnnnnnnnnnnnnnnnnnnnnnnnnnnnnnnnnnnnnnnnnnnnnnnnnnnnnnnnnnnnnnnnnnnnnnnnnnnnnnnnnnnnnnnnnnnnnnnnnnnnnnnnnnnnnnnnnnnnnnnnnnnnnnnnnnnnnnnnnnnnnnnnnnnnnnnnnnnnnnnnnnnnnnnnnnnnnnnnnnnnnnnnnnnnnnnnnnnnnnnnnnnnnnnnnnnnnnnnnnnnnnnnnnnnnnnnnnnnnnnnnnnnnnnnnnnnnnnnnnnnnnnnnnnnnnnnnnnnnnnnnnnnnnnnnnnnnnnnnnnnnnnnnnnnnnnnnnnnnnnnnnnnnnnnnnnnnnnnnnnnnnnnnnnnnnnnnnnnnnnnnnnnnnnnnnnnnnnnnnnnnnnnnnnnnnnnnnnnnnnnnnnnnnnnnnnnnnnnnnnnnnnnnnnnnnnnnnnnnnnnnnnnnnnnnnnnnnnnnnnnnnnnnnnnnnnnnnnnnnnnnnnnnnnnnnnnnnnnnnnnnnnnnnnnnnnnnnnnnnnnnnnnnnnnnnnnnnnnnnnnnnnnnnnnnnnnnnnnnnnnnnnnnnnnnnnnnnnnnnnnnnnnnnnnnnnnnnnnnnnnnnnnnnnnnnnnnnnnnnnnnnnnnnnnnnnnnnnnnnnnnnnnnnnnnnnnnnnnnnnnnnnnnnnnnnnnnnnnnnnnnnnnnnnnnnnnnnnnnnnnnnnnnnnnnnnnnnnnnnnnnnnnnnnnnnnnnnnnnnnnnnnnnnnnnnnnnnnnnnnnnnnnnnnnnnnnnnnnnnnnnnnnnnnnnnnnnnnnnnnnnnnnnnnnnnnnnnnnnnnnnnnnnnnnnnnnnnnnnnnnnnnnnnnnnnnnnnnnnnnnnnnnnnnnnnnnnnnnnnnnnnnnnnnnnnnnnnnnnnnnnnnnnnnnnnnnnnnnnnnnnnnnnnnnnnnnnnnnnnnnnnnnnnnnnnnnnnnnnnnnnnnnnnnnnnnnnnnnnnnnnnnnnnnnnnnnnnnnnnnnnnnnnnnnnnnnnnnnnnnnnnnnnnnnnnnnnnnnnnnnnnnnnnnnnnnnnnnnnnnnnnnnnnnnnnnnnnnnnnnnnnnnnnnnnnnnnnnnnnnnnnnnnnnnnnnnnnnnnnnnnnnnnnnnnnnnnnnnnnnnnnnnnnnnnnnnnnnnnnnnnnnnnnnnnnnnnnnnnnnnnnnnnnnnnnnnnnnnnnnnnnnnnnnnnnnnnnnnnnnnnnnnnnnnnnnnnnnnnnnnnnnnnnnnnnnnnnnnnnnnnnnnnnnnnnnnnnnnnnnnnnnnnnnnnnnnnnnnnnnnnnnnnnnnnnnnnnnnnnnnnnnnnnnnnnnnnnnnnnnnnnnnnnnnnnnnnnnnnnnnnnnnnnnnnnnnnnnnnnnnnnnnnnnnnnnnnnnnnnnnnnnnnnnnnnnnnnnnnnnnnnnnnnnnnnnnnnnnnnnnnnnnnnnnnnnnnnnnnnnnnnnnnnnnnnnnnnnnnnnnnnnnnnnnnnnnnnnnnnnnnnnnnnnnnnnnnnnnnnnnnnnnnnnnnnnnnnnnnnnnnnnnnnnnnnnnnnnnnnnnnnnnnnnnnnnnnnnnnnnnnnnnnnnnnnnnnnnnnnnnnnnnnnnnnnnnnnnnnnnnnnnnnnnnnnnnnnnnnnnnnnnnnnnnnnnnnnnnnnnnnnnnnnnnnnnnnnnnnnnnnnnnnnnnnnnnnnnnnnnnnnnnnnnnnnnnnnnnnnnnnnnnnnnnnnnnnnnnnnnnnnnnnnnnnnnnnnnnnnnnnnnnnnnnnnnnnnnnnnnnnnnnnnnnnnnnnnnnnnnnnnnnnnnnnnnnnnnnnnnnnnnnnnnnnnnnnnnnnnnnnnnnnnnnnnnnnnnnnnnnnnnnnnnnnnnnnnnnnnnnnnnnnnnnnnnnnnnnnnnnnnnnnnnnnnnnnnnnnnnnnnnnnnnnnnnnnnnnnnnnnnnnnnnnnnnnnnnnnnnnnnnnnnnnnnnnnnnnnnnnnnnnnnnnnnnnnnnnnnnnnnnnnnnnnnnnnnnnnnnnnnnnnnnnnnnnnnnnnnnnnnnnnnnnnnnnnnnnnnnnnnnnnnnnnnnnnnnnnnnnnnnnnnnnnnnnnnnnnnnnnnnnnnnnnnnnnnnnnnnnnnnnnnnnnnnnnnnnnnnnnnnnnnnnnnnnnnnnnnnnnnnnnnnnnnnnnnnnnnnnnnnnnnnnnnnnnnnnnnnnnnnnnnnnnnnnnnnnnnnnnnnnnnnnnnnnnnnnnnnnnnnnnnnnnnnnnnnnnnnnnnnnnnnnnnnnnnnnnnnnnnnnnnnnnnnnnnnnnnnnnnnnnnnnnnnnnnnnnnnnnnnnnnnnnnnnnnnnnnnnnnnnnnnnnnnnnnnnnnnnnnnnnnnnnnnnnnnnnnnnnnnnnnnnnnnnnnnnnnnnnnnnnnnnnnnnnnnnnnnnnnnnnnnnnnnnnnnnnnnnnnnnnnnnnnnnnnnnnnnnnnnnnnnnnnnnnnnnnnnnnnnnnnnnnnnnnnnnnnnnnnnnnnnnnnnnnnnnnnnnnnnnnnnnnnnnnnnnnnnnnnnnnnnnnnnnnnnnnnnnnnnnnnnnnnnnnnnnnnnnnnnnnnnnnnnnnnnnnnnnnnnnnnnnnnnnnnnnnnnnnnnnnnnnnnnnnnnnnnnnnnnnnnnnnnnnnnnnnnnnnnnnnnnnnnnnnnnnnnnnnnnnnnnnnnnnnnnnnnnnnnnnnnnnnnnnnnnnnnnnnnnnnnnnnnnnnnnnnnnnnnnnnnnnnnnnnnnnnnnnnnnnnnnnnnnnnnnnnnnnnnnnnnnnnnnnnnnnnnnnnnnnnnnnnnnnnnnnnnnnnnnnnnnnnnnnnnnnnnnnnnnnnnnnnnnnnnnnnnnnnnnnnnnnnnnnnnnnnnnnnnnnnnnnnnnnnnnnnnnnnnnnnnnnnnnnnnnnnnnnnnnnnnnnnnnnnnnnnnnnnnnnnnnnnnnnnnnnnnnnnnnnnnnnnnnnnnnnnnnnnnnnnnnnnnnnnnnnnnnnnnnnnnnnnnnnnnnnnnnnnnnnnnnnnnnnnnnnnnnnnnnnnnnnnnnnnnnnnnnnnnnnnnnnnnnnnnnnnnnnnnnnnnnnnnnnnnnnnnnnnnnnnnnnnnnnnnnnnnnnnnnnnnnnnnnnnnnnnnnnnnnnnnnnnnnnnnnnnnnnnnnnnnnnnnnnnnnnnnnnnnnnnnnnnnnnnnnnnnnnnnnnnnnnnnnnnnnnnnnnnnnnnnnnnnnnnnnnnnnnnnnnnnnnnnnnnnnnnnnnnnnnnnnnnnnnnnnnnnnnnnnnnnnnnnnnnnnnnnnnnnnnnnnnnnnnnnnnnnnnnnnnnnnnnnnnnnnnnnnnnnnnnnnnnnnnnnnnnnnnnnnnnnnnnnnnnnnnnnnnnnnnnnnnnnnnnnnnnnnnnnnnnnnnnnnnnnnnnnnnnnnnnnnnnnnnnnnnnnnnnnnnnnnnnnnnnnnnnnnnnnnnnnnnnnnnnnnnnnnnnnnnnnnnnnnnnnnnnnnnnnnnnnnnnnnnnnnnnnnnnnnnnnnnnnnnnnnnnnnnnnnnnnnnnnnnnnnnnnnnnnnnnnnnnnnnnnnnnnnnnnnnnnnnnnnnnnnnnnnnnnnnnnnnnnnnnnnnnnnnnnnnnnnnnnnnnnnnnnnnnnnnnnnnnnnnnnnnnnnnnnnnnnnnnnnnnnnnnnnnnnnnnnnnnnnnnnnnnnnnnnnnnnnnnnnnnnnnnnnnnnnnnnnnnnnnnnnnnnnnnnnnnnnnnnnnnnnnnnnnnnnnnnnnnnnnnnnnnnnnnnnnnnnnnnnnnnnnnnnnnnnnnnnnnnnnnnnnnnnnnnnnnnnnnnnnnnnnnnnnnnnnnnnnnnnnnnnnnnnnnnnnnnnnnnnnnnnnnnnnnnnnnnnnnnnnnnnnnnnnnnnnnnnnnnnnnnnnnnnnnnnnnnnnnnnnnnnnnnnnnnnnnnnnnnnnnnnnnnnnnnnnnnnnnnnnnnnnnnnnnnnnnnnnnnnnnnnnnnnnnnnnnnnnnnnnnnnnnnnnnnnnnnnnnnnnnnnnnnnnnnnnnnnnnnnnnnnnnnnnnnnnnnnnnnnnnnnnnnnnnnnnnnnnnnnnnnnnnnnnnnnnnnnnnnnnnnnnnnnnnnnnnnnnnnnnnnnnnnnnnnnnnnnnnnnnnnnnnnnnnnnnnnnnnnnnnnnnnnnnnnnnnnnnnnnnnnnnnnnnnnnnnnnnnnnnnnnnnnnnnnnnnnnnnnnnnnnnnnnnnnnnnnnnnnnnnnnnnnnnnnnnnnnnnnnnnnnnnnnnnnnnnnnnnnnnnnnnnnnnnnnnnnnnnnnnnnnnnnnnnnnnnnnnnnnnnnnnnnnnnnnnnnnnnnnnnnnnnnnnnnnnnnnnnnnnnnnnnnnnnnnnnnnnnnnnnnnnnnnnnnnnnnnnnnnnnnnnnnnnnnnnnnnnnnnnnnnnnnnnnnnnnnnnnnnnnnnnnnnnnnnnnnnnnnnnnnnnnnnnnnnnnnnnnnnnnnnnnnnnnnnnnnnnnnnnnnnnnnnnnnnnnnnnnnnnnnnnnnnnnnnnnnnnnnnnnnnnnnnnnnnnnnnnnnnnnnnnnnnnnnnnnnnnnnnnnnnnnnnnnnnnnnnnnnnnnnnnnnnnnnnnnnnnnnnnnnnnnnnnnnnnnnnnnnnnnnnnnnnnnnnnnnnnnnnnnnnnnnnnnnnnnnnnnnnnnnnnnnnnnnnnnnnnnnnnnnnnnnnnnnnnnnnnnnnnnnnnnnnnnnnnnnnnnnnnnnnnnnnnnnnnnnnnnnnnnnnnnnnnnnnnnnnnnnnnnnnnnnnnnnnnnnnnnnnnnnnnnnnnnnnnnnnnnnnnnnnnnnnnnnnnnnnnnnnnnnnnnnnnnnnnnnnnnnnnnnnnnnnnnnnnnnnnnnnnnnnnnnnnnnnnnnnnnnnnnnnnnnnnnnnnnnnnnnnnnnnnnnnnnnnnnnnnnnnnnnnnnnnnnnnnnnnnnnnnnnnnnnnnnnnnnnnnnnnnnnnnnnnnnnnnnnnnnnnnnnnnnnnnnnnnnnnnnnnnnnnnnnnnnnnnnnnnnnnnnnnnnnnnnnnnnnnnnnnnnnnnnnnnnnnnnnnnnnnnnnnnnnnnnnnnnnnnnnnnnnnnnnnnnnnnnnnnnnnnnnnnnnnnnnnnnnnnnnnnnnnnnnnnnnnnnnnnnnnnnnnnnnnnnnnnnnnnnnnnnnnnnnnnnnnnnnnnnnnnnnnnnnnnnnnnnnnnnnnnnnnnnnnnnnnnnnnnnnnnnnnnnnnnnnnnnnnnnnnnnnnnnnnnnnnnnnnnnnnnnnnnnnnnnnnnnnnnnnnnnnnnnnnnnnnnnnnnnnnnnnnnnnnnnnnnnnnnnnnnnnnnnnnnnnnnnnnnnnnnnnnnnnnnnnnnnnnnnnnnnnnnnnnnnnnnnnnnnnnnnnnnnnnnnnnnnnnnnnnnnnnnnnnnnnnnnnnnnnnnnnnnnnnnnnnnnnnnnnnnnnnnnnnnnnnnnnnnnnnnnnnnnnnnnnnnnnnnnnnnnnnnnnnnnnnnnnnnnnnnnnnnnnnnnnnnnnnnnnnnnnnnnnnnnnnnnnnnnnnnnnnnnnnnnncagtcatcagtctcgttttcaatgcatgcctctgagggggagggctgtaattccgcatcgctctaagtaagtaaacgtttcatcatagaaacttggtggtcgagttgggtcggtcacagcaccgcacgggataaaaattaccataccctgtctggcacgtgtcagtaggacgcgataggcgttttctaaagatagatacttttctatttccttcgctcgtcacaccatactttttgcaacgcctccagcgtctgtctcaccccatgacacactaaggatttatattcgttattaagataacattaattcgtgatccgatcaggagaggtgaaagtgcaaggactacaaatcactgcgactctcaagtcgcccgtcatcattggatcgagcgcatacatgaccttggacggcatccttggagcggttttgtttgaccagatgcaggacatagagggcgcgcacaattcaataccaattaaacagactgaaggtcttttccacgcaagtgcggtgatcatcgaggcgatagagaaaagtcggacagctttcattgcaggtttgtatcctacgcatagcctcgacccagaccttattttgaaaaataaaaaaggcggtctgcatcgtgcctttgattcatcggtcaccaatgtaatgaatacataccgccagatcaccgcacccatagccacttggtatgtcgttggtgatgccgaacggattctttctttactgaacacagttcactttattggtaagcgtagggccagtggttttggtcaggttgcttcatggaatattgagccaaccgacacagatggtctgacttatgaggatgagccacttagaccaattccagtagatctgtttcaaggcgacaaaaccttacctattgtggatgccgcgtggcgtcctgcgtattgggatctgcgcaatagagcagcctgttacgcccccgcttcaatcaactgagtggacagaatgaatacgtttgatttctttaaccaaaattttgggcgtttcttggctgtgcagaccgataatgcaatggctgacgcacaggcagcactatcaaaaaaccacgaattgctaacaggtaaaacaagtcgcttatctagcggttgggcaattgttaggcccggtcgttcaagccttcagcttggcgtgaagtgcacaggcatcgaaatagttggcaacaccgtcagccgctttcaggcgtttattgcagatcttaaaaattggaataacgagccgaggatttatctcacgtttgataaacggccaataccgattgcaaatttatttgtcacctatgacctaagagcggtgaggatctgctctgcaaaaggagtggagacctttgactttactaaagatccgaccgatgagtcaggcatggtgcataaagttttgttcaaacaaatgaaagaggttgcctgacatggaatacgtgatcgaaaaaccatttgccgttaataaatacgcatgtcaccgaatgctttctgggttgactgggggtaagccggccagttgggtcgacgagggggagcaacttagagtgcgaacagcagacccattacctgctcaggtacagtctgatcgtaaattcaccggcggtcagatcgtggggttccagcttaaagccagttgtgggaaaaaagttaaaggaaaacaccgctactttcacacagccgattggcgaagtcgacatgcgtggttaaagcgaaaaggagagttgcatggcttcgaagtgttgactgtgcattgccatgctgagcaagaacgaattgttgctggcaagcgaaccttcacagtcgacgcaacttcttttacaggcattttgaaggtcatagatatcgtcaaattccaggcagtgctaataagtggcattggttcaacggctaaagcttttggttttggtttcattcagttttgaatacaggggtcacgtatatgactaagcagacgatcgtcgttgatggagtaataacaaccgttgctcctctctcaatagctatgccagtaccagagggtggacgcgagaatcagtacaagcaatttccaataatgactagaggtcttgatgatgagggtaataagcttcagaccgggtatcttccagctacaactttgcgggggtttatgcgaagggcaatcgtcaccgacgcaatgattaaagccgctgaggccgggaggcactacacattgcaaaaagcctatgccgagttgattggtcaggatgctgctagtgaggcggccagtgaagacattgacctgattaagcagcagcaacagcgtgatcagaatcctgttctggatctgtttggcgtaggcatgagccttaaatctaggctgctggtgtctcacttcgtgccagtgactaatgttttgcctgaggcgttttcaggggtacgcaaagaccttgaggatactcctgaggcatttgaggccttgtctttagaaactcagaacactcatgcaaaccgcagtcaggctaatagccaacgggctgaagctgagtcactggttaaatcattggtgcgccaaattcgtgccgctgagaaaaagggggctgggaccgcagaactaaaggctcagttggaggcggcacaagtattggcagcaaagttcgctgatcagatgggcgacatgcaaaactcaagccgtactctggtcggacactttgcgttacccgccggtattgacctgcacggtaagttgattgtcgagagagcgagggatcgtgaccttgagatgctactactcgctttggatgccctgtcgagacgccccttgttaggcgcgcaggtggcccgtggttgcggggagatcgccgggaagtttacgattaaggttgatggtgtcgtgaagaaaatcgttgaaattggtaactgggaagctgcaaaatcagtggatttttaatgaaagcatggcaaaaagttgttatctgcgctggacttactgaataatgggtcaagccaccctgaaattgggtggctactggaacgttgacgaacgccacacgattagacagtgaggtcaagccaccctgaaattgggtggctactggaacacatactgcgttgaatacatctacaaacctggtcaagccaccctgaaattgggtggctactggaacagcgtccatatgcgcaatgcgttcccagctggtcaagccaccctgaaattgggtggctactggaacaatatacgattgggacacaaaagacatttgggtcaagccaccctgaaattgggtggctactggaacgacggtggctatgtcagaccaactgtttaaggtcaagccaccctgaaattgggtggctactggaacacaaatagacaatgcccgtcggtacccgctaggtcaagccaccctgaaattgggtggctactggaacttggccgatgctttgcactgttgctgggctggtcaagccaccctgaaattgggtggctactggaacagtgcaggcaacatagaggatgcgagttgaggtcaagccaccctgaaattgggtggctactggaacagtgcgtgctgagttagctgatgaatcacgggtcaagccaccctgaaattgggtggctactggaactaaaacacattacgcttctcatcgtactccggtcaagccaccctgaaattgggtggctactggaactagtaactgccctcgatagcagcatgaaaaggtcaagccaccctgaaattgggtggctactggaaccgtggacatctatccgacctgctgcccagcggtcaagccaccctgaaattgggtggctactggaactagtcagtgagatatttataaatgacttttggtcaagccaccctgaaattgggtggctactgcattgtgtgcaacctccccccggttggtgtaacttacttcgttagtgacctcgcaaaaggtattcatgtttcgcagcccagagcagcagcactttagtgccatagtcagtaagcacattgctcaacccgatgccccgttattactagagggtggtacgggcttgggcaagacacgcgcatacctagcttcgattgggcaagcacgtgtggcgatcgttctgccgacccatcaacttatcgatcaaatgctcggatcagcagatcttcgggcggttggtctgacggatgtgaaagcctttcgtcctgctagattttatgaggcccgtgcggaatatgaaaaagctcgtgaacaggcaaaaaacgcgcaagtcatgctttgcacggcagcctcagtcattatcgatcagcgcttagacggggaatacaacggtatcaccacggaccgtgagtacattatcttcgacgaggcagaccagttgcccgacatggcagcgttgcagtcagatttcactatttctcagcatgacctgtccgaacttggtatcaagctaataacagccgatcaggcattggcagacatcgtggctaaaaagccgcgtacagttcaacccgagctccgtgcggcagccaagttaatgcttgaggtgctggcgcaacctgcgtggtaccacgcctgtggtcaagatgatcagggtggccttgttctgacacacaagctcccgggaaggttgttgaagaaaatcagtaataggccccgcacggcttttatcagtgcaacgctatcggtgtctggaaagtttcaaaatttcaaaatgtcgatgggtattgaaaacgaatcgatgctgtcgaccattattgagcctattagacacggttctcttacctttcataccgttgatgccgttgttgatacacccgagtggattgatgctgttgtcgatgccgtcaaccaatctcccaaaccaaccttggttgcgactacttctcatgacctgactcaagttttagctaagcgactgccagacgccacagcgcgtttaaatgatgagaccgctgccatggcttccgaacgggttgatcagggtggcgttcttatagcagcaggagcatgggcagggcttgacacggcggttcgctggcgttcgatcgtagtaccgagagtgccatacagcaagccagtggtcgttgagggtgatgtgacaacaagttaccttgatgcaagaaacactgccatacgacgcctgaggcaagtcatagggcgagggctgagaacgccagacgcagtgtgtgacatctatatcttagacggacgttatgatcgtttggaagcgtttgtgccggagagatttaagactgcttggagagatcgagataaccaatctttcttagaaggtgcgaggaaagaagttgttttgagtaaagccgagcgtgatccgatgctgcgccaaacagcaatacggaaatatggtttggtatgtatggcttgtggctatgttccaaaggtatcaacgcaaatagacgttcatcacaaggatccaattgcggagggtgagcgtaaaacaacggtagccgacgtacttgttttgtgtgcgaattgtcacagatttgcgcatagcgagtcacctccgcttgaacttgaagcaatacgtctttaagttaggttgtaaactaaaaatcaagggcagaagaccggctgcataagtgtccatccgtttattaaaaaataaaatcttatgatcaagttagccctacttacggtatccatagctgctagcgcgatgagtgtggctagttcgtatacacccgagcaggtgcgatctgcagtcaaacaggcagggggtgctgagcgctttattgtcgagattgcacagaacacggcaaagatgtcgggacagatgttagacgatcaaacgcagttaactggttctgttgcctttgaaagaacgatcgtctactacttgcgtatggtgaattacgataagagagatatccagaacatcagtgcttttcgacgaaaagtggctagcctgttggcaccatcagtatgcacagcacccctcgcgtcaattttgataaatgagtatcgtgctgagtacaagtacatggcatattctaagtcgcgtgaatacttatttgaatacggattcaaccgaaacacttgtgcgccaagctaccgttggtagcggatacattacctcgacaattacggaactcgaaagtctgaaagaaggcacacaaccgtggaggtgggctctattcaattttgttttttggtcgtcgcccccggagtttcacttcctctgcaaagagtccaattttgttccctaagttgttgacgccggttgaaaactgaccaggtggtcagtattcaaccggcgccaacagccaagagaccaaaaagtgcatgacacacgtgacctgaagacaaaagggctgagcgtgattagagagtgcaaacttaatcaaaacaagttaagctttataagcgatcaagcgtagctaaggacatacccatatgttgcaaactcgactagcaatgctactcgtctcctgtgtaatcacagccttaactggttgcgccaacatatccgttccaaccggaactagtgaggaaaggtacctaaatacaagctcggtttcgcctgtagccaccgtcatttactcggctaaatacgatccaattggtcaaacaatttatttggaagttagccaatacaaattgcagcagttgtacaccgtacccaaacacttcaacaccgcatcgcgcaccattgaattgagttaccccaatgcgaaaccgaaaaataattacaagtgggaatcccaaaaaattagttggttttccttatatcagatgcggcaggtttcattgacctcgcagggaggggattcgatttccgtacccgtagacctaaaaaatgagcgcgttgaactcgaattaagtggtgtgattgataagcttcaccctaacgtcctttacaaggtagcttgtgcttcttgcactccttgggtttataagaagttaatcccatctgaatatttgccagcccctcctagtaatagcaacgaagtcagcttttctatccttcctcctgaaaaggtctcaatactgaacaaattagaagatctacgaaaagctcaactggcggagaaaagagcgcgggagactgaagcccacgagttggaacagcgaatggctaaagagaaacgtgaattagagctgaaactggcccgtgaaaagcgtgagagggagcagcagttagccgcagaaaagcgtgagcgcgatgctcgaataagaacagcggatgcagaaagaaagcgcgaagccgccagagtcgtgcgagaaggcgatggaagcaccgatgacttagtctgcaaaaaatacgggtttaggccaaatacgcaagcttatgccaattgcagactacaaatcgacgttgcaaaacgggagatgcaacagcaacaggctcagtatatggcccaacagcaacagttcgaagctgctcaagaaactgcaagagaaagacgacagaacgaattcttgttgggaatgggattgcgcatgatgggcggtcagagtcctgctggggcttatgttgatcagtcagtgggagcacctatgtatcagccacccccaccaagcacacgtacttactcatttccaaatggccgaatgatgacctgcacttccaatgggagttttacgaattgttattgaaggttgttttcacctgtgctgtaagtgccaattgctttctaaaagcgtctaaaaaattagggagtacctgacggataactacgataataataaactgcaacatcataattaatttagcgaatccaaaatttaaccggttgagttcaaaagtgaagtgcaacactaaccttgaggtactgtgttgcgatgaaaaccaaatacaagcaacttaattgtgaagagcgaattttgattcagctgagccttgagaaaggaagcaccatacgggccattgcgcttagcttggaccgaagcgcgagctccataagtcgagagctggctcgtaaccagtggtgtagtcctcaggcacaggcttttaggcctggcaggtccgctttggccggt

SEQ ID NO: 122 - DNA, 14036 bp, Artificial Sequence
  Synthetic Oligonucleotide
  misc_feature (1)..(3900): n is a, c, g, or t
nnnnnnnnnnnnnnnnnnnnnnnnnnnnnnnnnnnnnnnnnnnnnnnnnnnnnnnnnnnnnnnnnnnnnnnnnnnnnnnnnnnnnnnnnnnnnnnnnnnnnnnnnnnnnnnnnnnnnnnnnnnnnnnnnnnnnnnnnnnnnnnnnnnnnnnnnnnnnnnnnnnnnnnnnnnnnnnnnnnnnnnnnnnnnnnnnnnnnnnnnnnnnnnnnnnnnnnnnnnnnnnnnnnnnnnnnnnnnnnnnnnnnnnnnnnnnnnnnnnnnnnnnnnnnnnnnnnnnnnnnnnnnnnnnnnnnnnnnnnnnnnnnnnnnnnnnnnnnnnnnnnnnnnnnnnnnnnnnnnnnnnnnnnnnnnnnnnnnnnnnnnnnnnnnnnnnnnnnnnnnnnnnnnnnnnnnnnnnnnnnnnnnnnnnnnnnnnnnnnnnnnnnnnnnnnnnnnnnnnnnnnnnnnnnnnnnnnnnnnnnnnnnnnnnnnnnnnnnnnnnnnnnnnnnnnnnnnnnnnnnnnnnnnnnnnnnnnnnnnnnnnnnnnnnnnnnnnnnnnnnnnnnnnnnnnnnnnnnnnnnnnnnnnnnnnnnnnnnnnnnnnnnnnnnnnnnnnnnnnnnnnnnnnnnnnnnnnnnnnnnnnnnnnnnnnnnnnnnnnnnnnnnnnnnnnnnnnnnnnnnnnnnnnnnnnnnnnnnnnnnnnnnnnnnnnnnnnnnnnnnnnnnnnnnnnnnnnnnnnnnnnnnnnnnnnnnnnnnnnnnnnnnnnnnnnnnnnnnnnnnnnnnnnnnnnnnnnnnnnnnnnnnnnnnnnnnnnnnnnnnnnnnnnnnnnnnnnnnnnnnnnnnnnnnnnnnnnnnnnnnnnnnnnnnnnnnnnnnnnnnnnnnnnnnnnnnnnnnnnnnnnnnnnnnnnnnnnnnnnnnnnnnnnnnnnnnnnnnnnnnnnnnnnnnnnnnnnnnnnnnnnnnnnnnnnnnnnnnnnnnnnnnnnnnnnnnnnnnnnnnnnnnnnnnnnnnnnnnnnnnnnnnnnnnnnnnnnnnnnnnnnnnnnnnnnnnnnnnnnnnnnnnnnnnnnnnnnnnnnnnnnnnnnnnnnnnnnnnnnnnnnnnnnnnnnnnnnnnnnnnnnnnnnnnnnnnnnnnnnnnnnnnnnnnnnnnnnnnnnnnnnnnnnnnnnnnnnnnnnnnnnnnnnnnnnnnnnnnnnnnnnnnnnnnnnnnnnnnnnnnnnnnnnnnnnnnnnnnnnnnnnnnnnnnnnnnnnnnnnnnnnnnnnnnnnnnnnnnnnnnnnnnnnnnnnnnnnnnnnnnnnnnnnnnnnnnnnnnnnnnnnnnnnnnnnnnnnnnnnnnnnnnnnnnnnnnnnnnnnnnnnnnnnnnnnnnnnnnnnnnnnnnnnnnnnnnnnnnnnnnnnnnnnnnnnnnnnnnnnnnnnnnnnnnnnnnnnnnnnnnnnnnnnnnnnnnnnnnnnnnnnnnnnnnnnnnnnnnnnnnnnnnnnnnnnnnnnnnnnnnnnnnnnnnnnnnnnnnnnnnnnnnnnnnnnnnnnnnnnnnnnnnnnnnnnnnnnnnnnnnnnnnnnnnnnnnnnnnnnnnnnnnnnnnnnnnnnnnnnnnnnnnnnnnnnnnnnnnnnnnnnnnnnnnnnnnnnnnnnnnnnnnnnnnnnnnnnnnnnnnnnnnnnnnnnnnnnnnnnnnnnnnnnnnnnnnnnnnnnnnnnnnnnnnnnnnnnnnnnnnnnnnnnnnnnnnnnnnnnnnnnnnnnnnnnnnnnnnnnnnnnnnnnnnnnnnnnnnnnnnnnnnnnnnnnnnnnnnnnnnnnnnnnnnnnnnnnnnnnnnnnnnnnnnnnnnnnnnnnnnnnnnnnnnnnnnnnnnnnnnnnnnnnnnnnnnnnnnnnnnnnnnnnnnnnnnnnnnnnnnnnnnnnnnnnnnnnnnnnnnnnnnnnnnnnnnnnnnnnnnnnnnnnnnnnnnnnnnnnnnnnnnnnnnnnnnnnnnnnnnnnnnnnnnnnnnnnnnnnnnnnnnnnnnnnnnnnnnnnnnnnnnnnnnnnnnnnnnnnnnnnnnnnnnnnnnnnnnnnnnnnnnnnnnnnnnnnnnnnnnnnnnnnnnnnnnnnnnnnnnnnnnnnnnnnnnnnnnnnnnnnnnnnnnnnnnnnnnnnnnnnnnnnnnnnnnnnnnnnnnnnnnnnnnnnnnnnnnnnnnnnnnnnnnnnnnnnnnnnnnnnnnnnnnnnnnnnnnnnnnnnnnnnnnnnnnnnnnnnnnnnnnnnnnnnnnnnnnnnnnnnnnnnnnnnnnnnnnnnnnnnnnnnnnnnnnnnnnnnnnnnnnnnnnnnnnnnnnnnnnnnnnnnnnnnnnnnnnnnnnnnnnnnnnnnnnnnnnnnnnnnnnnnnnnnnnnnnnnnnnnnnnnnnnnnnnnnnnnnnnnnnnnnnnnnnnnnnnnnnnnnnnnnnnnnnnnnnnnnnnnnnnnnnnnnnnnnnnnnnnnnnnnnnnnnnnnnnnnnnnnnnnnnnnnnnnnnnnnnnnnnnnnnnnnnnnnnnnnnnnnnnnnnnnnnnnnnnnnnnnnnnnnnnnnnnnnnnnnnnnnnnnnnnnnnnnnnnnnnnnnnnnnnnnnnnnnnnnnnnnnnnnnnnnnnnnnnnnnnnnnnnnnnnnnnnnnnnnnnnnnnnnnnnnnnnnnnnnnnnnnnnnnnnnnnnnnnnnnnnnnnnnnnnnnnnnnnnnnnnnnnnnnnnnnnnnnnnnnnnnnnnnnnnnnnnnnnnnnnnnnnnnnnnnnnnnnnnnnnnnnnnnnnnnnnnnnnnnnnnnnnnnnnnnnnnnnnnnnnnnnnnnnnnnnnnnnnnnnnnnnnnnnnnnnnnnnnnnnnnnnnnnnnnnnnnnnnnnnnnnnnnnnnnnnnnnnnnnnnnnnnnnnnnnnnnnnnnnnnnnnnnnnnnnnnnnnnnnnnnnnnnnnnnnnnnnnnnnnnnnnnnnnnnnnnnnnnnnnnnnnnnnnnnnnnnnnnnnnnnnnnnnnnnnnnnnnnnnnnnnnnnnnnnnnnnnnnnnnnnnnnnnnnnnnnnnnnnnnnnnnnnnnnnnnnnnnnnnnnnnnnnnnnnnnnnnnnnnnnnnnnnnnnnnnnnnnnnnnnnnnnnnnnnnnnnnnnnnnnnnnnnnnnnnnnnnnnnnnnnnnnnnnnnnnnnnnnnnnnnnnnnnnnnnnnnnnnnnnnnnnnnnnnnnnnnnnnnnnnnnnnnnnnnnnnnnnnnnnnnnnnnnnnnnnnnnnnnnnnnnnnnnnnnnnnnnnnnnnnnnnnnnnnnnnnnnnnnnnnnnnnnnnnnnnnnnnnnnnnnnnnnnnnnnnnnnnnnnnnnnnnnnnnnnnnnnnnnnnnnnnnnnnnnnnnnnnnnnnnnnnnnnnnnnnnnnnnnnnnnnnnnnnnnnnnnnnnnnnnnnnnnnnnnnnnnnnnnnnnnnnnnnnnnnnnnnnnnnnnnnnnnnnnnnnnnnnnnnnnnnnnnnnnnnnnnnnnnnnnnnnnnnnnnnnnnnnnnnnnnnnnnnnnnnnnnnnnnnnnnnnnnnnnnnnnnnnnnnnnnnnnnnnnnnnnnnnnnnnnnnnnnnnnnnnnnnnnnnnnnnnnnnnnnnnnnnnnnnnnnnnnnnnnnnnnnnnnnnnnnnnnnnnnnnnnnnnnnnnnnnnnnnnnnnnnnnnnnnnnnnnnnnnnnnnnnnnnnnnnnnnnnnnnnnnnnnnnnnnnnnnnnnnnnnnnnnnnnnnnnnnnnnnnnnnnnnnnnnnnnnnnnnnnnnnnnnnnnnnnnnnnnnnnnnnnnnnnnnnnnnnnnnnnnnnnnnnnnnnnnnnnnnnnnnnnnnnnnnnnnnnnnnnnnnnnnnnnnnnnnnnnnnnnnnnnnnnnnnnnnnnnnnnnnnnnnnnnnnnnnnnnnnnnnnnnnnnnnnnnnnnnnnnnnnnnnnnnnnnnnagtctgcaattggcataagcttgcgtatttggcctaaaaccgtattttttgcagacaaagtcatcggcgcttccatcgccttctcgcatgactctggcggcttcgcgctttctttctgcatccgctgttcttattcgagcatcgcgctcacgcttttctgcagctaactgctgctgtcgttttctttcagcttgttcaagcgcgcgttgattccttttctcaactaactgctcctcacgaacccgagcttttatcgcggctaattgtttggcctctatcttgaaattaagacttgtatttaattctggtgttgcgggaattgacgttccataattctttaattgggacgcatcaggcaagcacctagggcaggtaataatgtaggttgtatcaggctgaaatttttgaacaacatcttttatagcgagcacaactttctcgcctccgtcgttaattctcagcgtatatttcgaacctatatcgcgaacttggacagtaaattgctggccattcggctgattaattacaacttcagtgaccgcatcacggatggaagagtctgttacttgcattggttcccatagaaaatcgtccaaaggtttggcctctgcgtagttcagatagctggtcaattcatttgaaagatctaggtatatcggtactttgtgtaattgtccaaggcggtattgattgacgtccaaaacaagtagcttatttagcgactcgtacctaacagcctttagattggttgctactatgaattttgattgtggatcaagatactttttctcactagctccggttggaacggatatgttggcgcaaccagttaaggctgtgattacacaggagacgaggagcattgctagtcgagtttgcaacatgtgggtatgtcctaagctacgcttgatcgcttataaagcttaactcggtttgattaagtttgcactctctaatcacgctcggcctctttgtatatggtgtgtgccatacactttttgttcacttggttgaattgtttcttttctctaatcccaatactcataaaatcctaaaatcaaccactctgccgccacaatcatcgtcaattttcgagtagtgccgttcaaaattgtaattttttcttgaacttcacccgataatcttaagggaacgaggcgaatgaacaaatcgcttctaggcgtcgtgattgcagagatcacagccctctaaatttaactaaaccagccttttttaattgctagtaatttcctaaactgaggttcggtcgaagcaaaaaaagaagtccgaagaaccattattataaaaacgtctatcatctgattttcgctaagattcaatttaaattcttttgaaaatttatcgatttcttctaccgcatgggtgaaaaccaaacttagatctacatcaactatgttcggttgaaaccaattttgtatgtaatgcagtgtgaaatcactcacaatctcgcgggaaggttctggaagctttgtgtacatttcgaacactgcattttcaagttgcgtctttgtttggcttttaatgtgatgctcaataagctttgggagcgtagatcctttgtactgcctaataagttcatttttcatttattatccctatcagtctttacagcattcatactggttacgtaagtacgaacgtgtacttcaaaccattatattgataagcttgaatgtagctgcgaggtaatctacacccccttgatccctaccccttcacaaacggattccatgatgccttcgaccacacttcccacaggtggctccatccacggaatttttagatctatttctttaagcatttttcccttcgcccaaagctctgtatagagactaagcttgaacatgctggactgacgtttcacgcaatcaaagaaggtcaatgccaatgctgaaagatagggcacaccttcctcagaaaattgctcaacctcgtaattgagtaactcatgcacaacagcataatcatcgacccgcttcacgctattgatgtcaatataggctgagagcttctttgaaccacccgtgaaataccaagatgcttgagctggctctgattgcgccacaggcattattgttaaaagggctagcgctgcggctgcggttcggctcaatgttattttcaatgcgacgcctttcaagtcacggctaaagtcagtcatcagtctcgttttcaatgcatgcctctgagggggagggctgtaattccgcatcgctctaagtaagtaaacgtttcatcatagaaacttggtggtcgagttgggtcggtcacagcaccgcacgggataaaaattaccataccctgtctggcacgtgtcagtaggacgcgataggcgttttctaaagatagatacttttctatttccttcgctcgtcacaccatactttttgcaacgcctccagcgtctgtctcaccccatgacacactaaggatttatattcgttattaagataacattaattcgtgatccgatcaggagaggtgaaagtgcaaggactacaaatcactgcgactctcaagtcgcccgtcatcattggatcgagcgcatacatgaccttggacggcatccttggagcggttttgtttgaccagatgcaggacatagagggcgcgcacaattcaataccaattaaacagactgaaggtcttttccacgcaagtgcggtgatcatcgaggcgatagagaaaagtcggacagctttcattgcaggtttgtatcctacgcatagcctcgacccagaccttattttgaaaaataaaaaaggcggtctgcatcgtgcctttgattcatcggtcaccaatgtaatgaatacataccgccagatcaccgcacccatagccacttggtatgtcgttggtgatgccgaacggattctttctttactgaacacagttcactttattggtaagcgtagggccagtggttttggtcaggttgcttcatggaatattgagccaaccgacacagatggtctgacttatgaggatgagccacttagaccaattccagtagatctgtttcaaggcgacaaaaccttacctattgtggatgccgcgtggcgtcctgcgtattgggatctgcgcaatagagcagcctgttacgcccccgcttcaatcaactgagtggacagaatgaatacgtttgatttctttaaccaaaattttgggcgtttcttggctgtgcagaccgataatgcaatggctgacgcacaggcagcactatcaaaaaaccacgaattgctaacaggtaaaacaagtcgcttatctagcggttgggcaattgttaggcccggtcgttcaagccttcagcttggcgtgaagtgcacaggcatcgaaatagttggcaacaccgtcagccgctttcaggcgtttattgcagatcttaaaaattggaataacgagccgaggatttatctcacgtttgataaacggccaataccgattgcaaatttatttgtcacctatgacctaagagcggtgaggatctgctctgcaaaaggagtggagacctttgactttactaaagatccgaccgatgagtcaggcatggtgcataaagttttgttcaaacaaatgaaagaggttgcctgacatggaatacgtgatcgaaaaaccatttgccgttaataaatacgcatgtcaccgaatgctttctgggttgactgggggtaagccggccagttgggtcgacgagggggagcaacttagagtgcgaacagcagacccattacctgctcaggtacagtctgatcgtaaattcaccggcggtcagatcgtggggttccagcttaaagccagttgtgggaaaaaagttaaaggaaaacaccgctactttcacacagccgattggcgaagtcgacatgcgtggttaaagcgaaaaggagagttgcatggcttcgaagtgttgactgtgcattgccatgctgagcaagaacgaattgttgctggcaagcgaaccttcacagtcgacgcaacttcttttacaggcattttgaaggtcatagatatcgtcaaattccaggcagtgctaataagtggcattggttcaacggctaaagcttttggttttggtttcattcagttttgaatacaggggtcacgtatatgactaagcagacgatcgtcgttgatggagtaataacaaccgttgctcctctctcaatagctatgccagtaccagagggtggacgcgagaatcagtacaagcaatttccaataatgactagaggtcttgatgatgagggtaataagcttcagaccgggtatcttccagctacaactttgcgggggtttatgcgaagggcaatcgtcaccgacgcaatgattaaagccgctgaggccgggaggcactacacattgcaaaaagcctatgccgagttgattggtcaggatgctgctagtgaggcggccagtgaagacattgacctgattaagcagcagcaacagcgtgatcagaatcctgttctggatctgtttggcgtaggcatgagccttaaatctaggctgctggtgtctcacttcgtgccagtgactaatgttttgcctgaggcgttttcaggggtacgcaaagaccttgaggatactcctgaggcatttgaggccttgtctttagaaactcagaacactcatgcaaaccgcagtcaggctaatagccaacgggctgaagctgagtcactggttaaatcattggtgcgccaaattcgtgccgctgagaaaaagggggctgggaccgcagaactaaaggctcagttggaggcggcacaagtattggcagcaaagttcgctgatcagatgggcgacatgcaaaactcaagccgtactctggtcggacactttgcgttacccgccggtattgacctgcacggtaagttgattgtcgagagagcgagggatcgtgaccttgagatgctactactcgctttggatgccctgtcgagacgccccttgttaggcgcgcaggtggcccgtggttgcggggagatcgccgggaagtttacgattaaggttgatggtgtcgtgaagaaaatcgttgaaattggtaactgggaagctgcaaaatcagtggatttttaatgaaagcatggcaaaaagttgttatctgcgctggacttactgaataatgggtcaagccaccctgaaattgggtggctactggaacacgatgttcacattggctatagacccagctggtcaagccaccctgaaattgggtggctactggaacacatactgcgttgaatacatctacaaacctggtcaagccaccctgaaattgggtggctactggaacagcgtccatatgcgcaatgcgttcccagctggtcaagccaccctgaaattgggtggctactggaacaatatacgattgggacacaaaagacatttgggtcaagccaccctgaaattgggtggctactggaacgacggtggctatgtcagaccaactgtttaaggtcaagccaccctgaaattgggtggctactggaacacaaatagacaatgcccgtcggtacccgctaggtcaagccaccctgaaattgggtggctactggaacttggccgatgctttgcactgttgctgggctggtcaagccaccctgaaattgggtggctactggaacagtgcaggcaacatagaggatgcgagttgaggtcaagccaccctgaaattgggtggctactggaacagtgcgtgctgagttagctgatgaatcacgggtcaagccaccctgaaattgggtggctactggaactaaaacacattacgcttctcatcgtactccggtcaagccaccctgaaattgggtggctactggaactagtaactgccctcgatagcagcatgaaaaggtcaagccaccctgaaattgggtggctactggaaccgtggacatctatccgacctgctgcccagcggtcaagccaccctgaaattgggtggctactggaactagtcagtgagatatttataaatgacttttggtcaagccaccctgaaattgggtggctactgcattgtgtgcaacctccccccggttggtgtaacttacttcgttagtgacctcgcaaaaggtattcatgtttcgcagcccagagcagcagcactttagtgccatagtcagtaagcacattgctcaacccgatgccccgttattactagagggtggtacgggcttgggcaagacacgcgcatacctagcttcgattgggcaagcacgtgtggcgatcgttctgccgacccatcaacttatcgatcaaatgctcggatcagcagatcttcgggcggttggtctgacggatgtgaaagcctttcgtcctgctagattttatgaggcccgtgcggaatatgaaaaagctcgtgaacaggcaaaaaacgcgcaagtcatgctttgcacggcagcctcagtcattatcgatcagcgcttagacggggaatacaacggtatcaccacggaccgtgagtacattatcttcgacgaggcagaccagttgcccgacatggcagcgttgcagtcagatttcactatttctcagcatgacctgtccgaacttggtatcaagctaataacagccgatcaggcattggcagacatcgtggctaaaaagccgcgtacagttcaacccgagctccgtgcggcagccaagttaatgcttgaggtgctggcgcaacctgcgtggtaccacgcctgtggtcaagatgatcagggtggccttgttctgacacacaagctcccgggaaggttgttgaagaaaatcagtaataggccccgcacggcttttatcagtgcaacgctatcggtgtctggaaagtttcaaaatttcaaaatgtcgatgggtattgaaaacgaatcgatgctgtcgaccattattgagcctattagacacggttctcttacctttcataccgttgatgccgttgttgatacacccgagtggattgatgctgttgtcgatgccgtcaaccaatctcccaaaccaaccttggttgcgactacttctcatgacctgactcaagttttagctaagcgactgccagacgccacagcgcgtttaaatgatgagaccgctgccatggcttccgaacgggttgatcagggtggcgttcttatagcagcaggagcatgggcagggcttgacacggcggttcgctggcgttcgatcgtagtaccgagagtgccatacagcaagccagtggtcgttgagggtgatgtgacaacaagttaccttgatgcaagaaacactgccatacgacgcctgaggcaagtcatagggcgagggctgagaacgccagacgcagtgtgtgacatctatatcttagacggacgttatgatcgtttggaagcgtttgtgccggagagatttaagactgcttggagagatcgagataaccaatctttcttagaaggtgcgaggaaagaagttgttttgagtaaagccgagcgtgatccgatgctgcgccaaacagcaatacggaaatatggtttggtatgtatggcttgtggctatgttccaaaggtatcaacgcaaatagacgttcatcacaaggatccaattgcggagggtgagcgtaaaacaacggtagccgacgtacttgttttgtgtgcgaattgtcacagatttgcgcatagcgagtcacctccgcttgaacttgaagcaatacgtctttaagttaggttgtaaactaaaaatcaagggcagaagaccggctgcataagtgtccatccgtttattaaaaaataaaatcttatgatcaagttagccctacttacggtatccatagctgctagcgcgatgagtgtggctagttcgtatacacccgagcaggtgcgatctgcagtcaaacaggcagggggtgctgagcgctttattgtcgagattgcacagaacacggcaaagatgtcgggacagatgttagacgatcaaacgcagttaactggttctgttgcctttgaaagaacgatcgtctactacttgcgtatggtgaattacgataagagagatatccagaacatcagtgcttttcgacgaaaagtggctagcctgttggcaccatcagtatgcacagcacccctcgcgtcaattttgataaatgagtatcgtgctgagtacaagtacatggcatattctaagtcgcgtgaatacttatttgaatacggattcaaccgaaacacttgtgcgccaagctaccgttggtagcggatacattacctcgacaattacggaactcgaaagtctgaaagaaggcacacaaccgtggaggtgggctctattcaattttgttttttggtcgtcgcccccggagtttcacttcctctgcaaagagtccaattttgttccctaagttgttgacgccggttgaaaactgaccaggtggtcagtattcaaccggcgccaacagccaagagaccaaaaagtgcatgacacacgtgacctgaagacaaaagggctgagcgtgattagagagtgcaaacttaatcaaaacaagttaagctttataagcgatcaagcgtagctaaggacatacccatatgttgcaaactcgactagcaatgctactcgtctcctgtgtaatcacagccttaactggttgcgccaacatatccgttccaaccggaactagtgaggaaaggtacctaaatacaagctcggtttcgcctgtagccaccgtcatttactcggctaaatacgatccaattggtcaaacaatttatttggaagttagccaatacaaattgcagcagttgtacaccgtacccaaacacttcaacaccgcatcgcgcaccattgaattgagttaccccaatgcgaaaccgaaaaataattacaagtgggaatcccaaaaaattagttggttttccttatatcagatgcggcaggtttcattgacctcgcagggaggggattcgatttccgtacccgtagacctaaaaaatgagcgcgttgaactcgaattaagtggtgtgattgataagcttcaccctaacgtcctttacaaggtagcttgtgcttcttgcactccttgggtttataagaagttaatcccatctgaatatttgccagcccctcctagtaatagcaacgaagtcagcttttctatccttcctcctgaaaaggtctcaatactgaacaaattagaagatctacgaaaagctcaactggcggagaaaagagcgcgggagactgaagcccacgagttggaacagcgaatggctaaagagaaacgtgaattagagctgaaactggcccgtgaaaagcgtgagagggagcagcagttagccgcagaaaagcgtgagcgcgatgctcgaataagaacagcggatgcagaaagaaagcgcgaagccgccagagtcgtgcgagaaggcgatggaagcaccgatgacttagtctgcaaaaaatacgggtttaggccaaatacgcaagcttatgccaattgcagactacaaatcgacgttgcaaaacgggagatgcaacagcaacaggctcagtatatggcccaacagcaacagttcgaagctgctcaagaaactgcaagagaaagacgacagaacgaattcttgttgggaatgggattgcgcatgatgggcggtcagagtcctgctggggcttatgttgatcagtcagtgggagcacctatgtatcagccacccccaccaagcacacgtacttactcatttccaaatggccgaatgatgacctgcacttccaatgggagttttacgaattgttattgaaggttgttttcacctgtgctgtaagtgccaattgctttctaaaagcgtctaaaaaattagggagtacctgacggataactacgataataataaactgcaacatcataattaatttagcgaatccaaaatttaaccggttgagttcaaaagtgaagtgcaacactaaccttgaggtactgtgttgcgatgaaaaccaaatacaagcaacttaattgtgaagagcgaattttgattcagctgagccttgagaaaggaagcaccatacgggccattgcgcttagcttggaccgaagcgcgagctccataagtcgagagctggctcgtaaccagtggtgtagtcctcaggcacaggcttttaggcctggcaggtccgctttggccggt

(The sequence listing continues in the following parts.)

What is claimed is:

1. A non-naturally occurring, engineered composition comprising a Class 1, Type IV Cas system comprising a helicase comprising a DinG domain and a HNH domain that is less than 600 amino acids in size, and at least one guide sequence capable of complexing with the Cas system and directing binding of the guide-Cas system complex to a target polynucleotide.

2. The composition of any one of the preceding claims, further comprising one or more Cas proteins.

3. The composition of claim 2, wherein the one or more Cas proteins comprise Cas7 or a Cas7-like Cas protein, Cas5 or a Cas5-like Cas protein, Cas6 or a Cas6-like protein, and a Cse3 family protein.

4. The composition of claim 2, wherein the one or more Cas proteins comprise Csf2, Csf3, Cas6, and Pfam08798.

5. The composition of any one of the preceding claims, wherein the Cas protein is a protein with nucleotide sequence listed in Table 1 and SEQ ID NOs 1-405.

6. The composition of any one of the preceding claims, wherein the target sequence comprises a protospacer adjacent motif (PAM) at the 5′ side of the target sequence.

7. The composition of claim 6, wherein the PAM sequence comprises CC.

8. The composition of claim 6, wherein the PAM sequence comprises (C/T)CN.

9. The composition of any one of claims 1-7, wherein the target sequence comprises a PAM at the 3′ side of the target sequence.

10. The composition of claim 9, wherein the PAM sequence is GG.

11. The composition of any one of the preceding claims, wherein the composition comprises cascade/helicase activity.

12. The composition of any one of the preceding claims, wherein the composition does not comprise Cas3 DNA shredding activity.

13. The composition of any one of the preceding claims, further comprising a donor polynucleotide.

14. The composition of claim 13, wherein the donor polynucleotide:
a. introduces one or more mutations to the target polynucleotide;
b. corrects a premature stop codon in the target polynucleotide;
c. disrupts a splicing site;
d. restores a splicing site; or
e. a combination thereof.

15. The composition of claim 14, wherein the one or more mutations introduced by the donor polynucleotide comprises substitutions, deletions, insertions, or a combination thereof.

16. The composition of claim 14, wherein the one or more mutations causes a shift in an open reading frame on the target polynucleotide.

17. The composition of any one of the preceding claims, further comprising a plurality of guide molecules capable of complexing with the Cas protein and directing binding of the guide-Cas protein complex to one or more target polynucleotides.

18. A composition comprising one or more polynucleotides encoding:
a. one or more class 1, Type IV Cas proteins or functional fragments thereof, wherein the one or more class 1, Type IV Cas proteins comprises DinG protein with a length less than 600 amino acids; and
b. one or more guide molecules capable of complexing with the class 1, Type IV Cas protein and directing binding of the guide-Cas protein complex to one or more target polynucleotides.

19. The composition of claim 18, further comprising a donor polynucleotide.

20. The composition of claim 19, wherein the donor polynucleotide comprises a polynucleotide insert.

21. The composition of claim 18, wherein the one or more target polynucleotides encode a part of the components in claim 1.

22. The composition of claim 18, wherein the one or more class 1, Type IV Cas proteins comprise Csf2 (Cas7-like), Csf3 (Cas5-like), Cas6, and Pfam08798 (Cse3 family).

23. A vector comprising the one or more polynucleotides of any one of claims 18-22.

24. An engineered cell comprising the composition of any one of claims 1-23.

25. A method of modifying a target polynucleotide sequence in a cell, comprising introducing to the cell:
a. one or more class 1, Type IV Cas proteins or functional fragments thereof, wherein the one or more class 1, Type IV Cas proteins comprises DinG protein with a length less than 600 amino acids; and
b. one or more guide molecules capable of complexing with the class 1, Type IV Cas protein and directing binding of the guide-Cas protein complex to one or more target polynucleotides.

26. The method of claim 25, further comprising introducing a donor polynucleotide.

27. The method of either claim 25 or claim 26, wherein the donor polynucleotide:
a. introduces one or more mutations to the target polynucleotide;
b. corrects a premature stop codon in the target polynucleotide;
c. disrupts a splicing site;
d. restores a splicing site; or
e. a combination thereof.

28. The method of claim 27, wherein the one or more mutations introduced by the donor polynucleotide comprises substitutions, deletions, insertions, or a combination thereof.

29. The method of claim 27, wherein the one or more mutations causes a shift in an open reading frame on the target polynucleotide.

30. The method of any one of claims 27-29, wherein the cell is a prokaryotic cell.

31. The method of any one of claims 25-29, wherein the cell is a eukaryotic cell.

32. The method of any one of claims 25-29, wherein the cell is a mammalian cell, a cell of a non-human primate, or a human cell.

33. The method of any one of claims 25-29, wherein the cell is a plant cell.

34. A non-naturally occurring, engineered composition comprising a Cas protein that comprises an HNH domain and a helicase domain, and at least one guide sequence capable of complexing with the Cas protein and directing binding of the guide-Cas protein complex to a target polynucleotide.

35. The composition of claim 34, wherein the helicase domain is a DinG domain.

36. The composition of claim 34, wherein the Cas protein is a class 1 Type IV Cas protein.

37. A composition comprising one or more polynucleotides encoding one or more components of the composition of claim 34.

38. A method of modifying a target polynucleotide sequence in a cell, comprising introducing to the cell one or more components of composition of claim 34.

39. A non-naturally occurring, engineered composition comprising a class 1, Type I Cas system that comprises an HNH domain that is less than 400 amino acids in length, and at least one guide sequence capable of complexing with the Cas protein and directing binding of the guide-Cas protein complex to a target polynucleotide.

40. The composition of claim 39, wherein the class 1, Type I Cas system HNH domain is comprised in an McRA protein.

41. The composition of claim 40, wherein the class 1, Type I Cas system HNH domain is comprised in a Cas5 protein.

42. The composition of claims 39-41, further comprising one or more Cas proteins.

43. The composition of claim 42, wherein the one or more Cas proteins comprise Cas1, Cas2, Cas6, Cas7, Cas8e-Cse fusion, CasE, Cse2, and McrA.

44. The composition of claims 39-43, wherein the Cas protein is a protein with nucleotide sequence listed in Table 2 and SEQ ID NOs. 495-1212.

45. The composition of claims 39-45, wherein the target sequence comprises a protospacer adjacent motif (PAM) at the 5′ side of the target sequence.

46. The composition of claim 45, wherein the PAM sequence is AAG.

47. The composition of any one of claims 39-45, wherein the target sequence comprises a PAM at the 3′ side of the target sequence.

48. The composition of claim 47, wherein the PAM sequence is CTT.

49. The composition of claims 39-48, wherein the composition comprises cascade/helicase activity.

50. The composition of claims 39-49, wherein the composition does not comprise Cas3 and/or Cas3 DNA shredding activity.

51. The composition of claims 39-50, further comprising a donor polynucleotide.

52. The composition of claim 51, wherein the donor polynucleotide:
a. introduces one or more mutations to the target polynucleotide;
b. corrects a premature stop codon in the target polynucleotide;
c. disrupts a splicing site;
d. restores a splicing site; or
e. a combination thereof.

53. The composition of claim 52, wherein the one or more mutations introduced by the donor polynucleotide comprises substitutions, deletions, insertions, or a combination thereof.

54. The composition of claim 52, wherein the one or more mutations causes a shift in an open reading frame on the target polynucleotide.

55. The composition of claims 39-54, further comprising a plurality of guide molecules capable of complexing with the Cas protein and directing binding of the guide-Cas protein complex to one or more target polynucleotides.

56. A composition comprising one or more polynucleotides encoding:
a. one or more class 1, Type I Cas proteins or functional fragments thereof, wherein the one or more class 1, Type I Cas proteins comprises Cas5 protein with a length less than 400 amino acids; and
b. one or more guide molecules capable of complexing with the class 1, Type I Cas protein and directing binding of the guide-Cas protein complex to one or more target polynucleotides.

57. The composition of claim 56, further comprising a donor polynucleotide.

58. The composition of claim 57, wherein the donor polynucleotide comprises a polynucleotide insert.

59. The composition of claim 56, wherein the one or more target polynucleotides encode a part of the components in claim 1.

60. The composition of claim 56, wherein the one or more Type I Cas proteins comprise Cas1, Cas2, Cas6, Cas7, Cas8e-Cse fusion, CasE, Cse2, and McrA.

61. A vector comprising the one or more polynucleotides of any one of claims 56-60.

62. An engineered cell comprising the composition of any one of claims 39-61.

63. A method of modifying a target polynucleotide sequence in a cell, comprising introducing to the cell:
a. one or more class 1, Type I Cas proteins or functional fragments thereof, wherein the one or more class 1, Type I Cas proteins comprises Cas5 protein with a length less than 400 amino acids; and
b. one or more guide molecules capable of complexing with the class 1, Type I Cas protein and directing binding of the guide-Cas protein complex to one or more target polynucleotides.

64. The method of claim 63, further comprising introducing a donor polynucleotide.

65. The method of either claim 63 or claim 64, wherein the donor polynucleotide:
a. introduces one or more mutations to the target polynucleotide,
b. corrects a premature stop codon in the target polynucleotide,
c. disrupts a splicing site,
d. restores a splicing site, or
e. a combination thereof.

66. The method of claim 65, wherein the one or more mutations introduced by the donor polynucleotide comprises substitutions, deletions, insertions, or a combination thereof.

67. The method of claim 65, wherein the one or more mutations causes a shift in an open reading frame on the target polynucleotide.

68. The method of any one of claims 63-67, wherein the cell is a prokaryotic cell.

69. The method of any one of claims 63-67, wherein the cell is a eukaryotic cell.

70. The method of any one of claims 63-67, wherein the cell is a mammalian cell, a cell of a non-human primate, or a human cell.

71. The method of any one of claims 63-67, wherein the cell is a plant cell.
